(19) United States
(12) Patent Application Publication
(10) Pub. No.: US 2024/0310389 A1
(43) Pub. Date: Sep. 19, 2024

(54) METHODS AND COMPOSITIONS FOR SCREENING AND TREATING ALZHEIMER'S DISEASE

(71) Applicant: Population Bio, Inc., New York, NY (US)

(72) Inventors: Eli HATCHWELL, Winchester (GB); Peggy S. EIS, Fitchburg, WI (US); Edward B. SMITH, III, New York, NY (US); Shapour JALILZADEH, Headington, Oxford (GB)

(21) Appl. No.: 18/411,834

(22) Filed: Jan. 12, 2024

Related U.S. Application Data
(60) Provisional application No. 63/438,710, filed on Jan. 12, 2023.

(51) Int. Cl. G01N 33/68

(52) U.S. Cl. CPC G01N 33/6896; G01N 2800/2821

(57) ABSTRACT

This document provides methods and materials related to screening for and treating Alzheimer's disease (AD), including late-onset Alzheimer's disease (LOAD).

### CROSS-REFERENCE TO RELATED APPLICATIONS

[0001] This application claims priority to U.S. Provisional Patent Application No. 63/438,710, filed on Jan. 12, 2023, the entire content of which is entirely incorporated herein by reference.

### REFERENCE TO A SEQUENCE LISTING

[0002] The instant application contains a Sequence Listing which has been submitted in XML format via Patent Center and is hereby incorporated by reference in its entirety. Said XML copy, created on Jan. 2, 2024, is named 33655_715_201_SL.xml and is 11,482,807 bytes in size. The aforementioned file was created on Jan. 2, 2024, and is hereby incorporated by reference in its entirety.

### BACKGROUND

[0003] Alzheimer's Disease (AD) is a chronic, incurable, neurodegenerative disease that affects an estimated 5.4 million people in the United States. AD is a highly heritable complex disorder, for which the majority of genetic causes have yet to be identified. While a number of genes have been identified in early onset families (e.g., APP, PSEN1, PSEN2), early onset Alzheimer's Disease (EOAD), diagnosed at <65 years of age, affects only 5-10% of cases. Late Onset Alzheimer's Disease (LOAD) shares the same clinical and pathological features as AD but is diagnosed in those >65 years of age. The most important genetic risk factor for the development of LOAD and sporadic EOAD that has been identified to date is presence of the E4 variant of the APOE gene.

[0004] The primary function of the urea cycle is to aid the body in metabolizing ammonia (a by-product of amino acid breakdown) into the final product urea. Ammonia is a highly toxic compound, with known effects on the central nervous system. There is no mechanism for its direct excretion from the body. Urea is a relatively benign molecule which is excreted from the kidneys. Rare disorders, such as autosomal recessive (AR) and chromosome X-linked recessive (XLR) disease models, have been reported that affect one of the urea cycle genes (including CPS1) and result in variable phenotypes in neonates, infants and adults. Many of the features are a direct result of hyperammonemia, due to the failure of the urea cycle to effectively remove ammonia (Walker, 2014). In the most severe forms, neonates fail to thrive, vomit and suffer seizures. In some cases, the urea cycle disorder is lethal.

[0005] While there is no clear-cut phenotype or disease associated with dominant mutations in urea cycle genes, hyperammonemia has been posited as an etiological factor in Alzheimer's disease (Branconnier et al., 1986; Seiler, 2002; Adlimoghaddam et al., 2016; Jin et al., 2018). However, this finding has not been tied to heterozygous mutations in urea cycle disorder genes, or other genes involved in ammonia metabolism.

[0006] The ability to accurately predict who is at risk of developing LOAD will be of enormous benefit in the context of drug treatment with compounds that are highly effective in their disease context but carry a risk of a devastating disorder. There is a need to identify genetic variants, such as copy number variants (CNVs) and single nucleotide variants (SNVs), associated with developing LOAD and the genes affected by them. For example, a proportion of individuals with AD may have hyperammonemia as a causal factor and some of these cases may be due to mutations in urea cycle disorders genes. Any therapeutic approaches developed for the treatment of classical (AR) urea cycle disorders would have relevance for the treatment of AD in these cases. For example, the drugs glycerol phenylbutyrate (RAVICTI®) or taste-masked sodium phenylbutyrate (OLPRUVA™) for the treatment of children and adults with a urea cycle disorder might prove to be valuable in AD, even if only in a specific, genetically-defined subset.

### SUMMARY

[0007] Provided herein are methods and materials related to screening for and treating Alzheimer's disease (AD), including late-onset Alzehimer's disease (LOAD) in human subjects.

[0008] Provided herein is a method of treating or preventing Alzheimer's Disease (AD) in a subject in need thereof, comprising: administering a therapeutically effective amount of a urea cycle agent to the subject, wherein the subject is identified as having AD or a risk of developing AD.

[0009] Provided herein is a method of treating Alzheimer's Disease (AD) in a subject in need thereof, comprising: administering a therapeutically effective amount of a urea cycle agent to the subject, wherein the subject has an AD or a risk of developing AD, wherein the subject's risk of developing AD is due to the presence of one or more genetic variations that occur at a frequency of 10% or less in a population of human subjects with AD.

[0010] In some embodiments, the urea cycle agent is a therapeutic agent listed in Table 13 or Table 14, or any combination thereof.

[0011] In some embodiments, the AD is Late-Onset Alzheimer's Disease (LOAD).

[0012] In some embodiments, the subject is a mild cognitively impaird (MCI) subject.

[0013] In some embodiments, the subject is identified as having AD or a risk of developing AD.

[0014] In some embodiments, the subject is identified as having AD or a risk of developing AD by a genetic test.

[0015] In some embodiments, the subject has one or more genetic variations associated with the AD or a risk of developing the AD.

[0016] In some embodiments, the genetic test comprises detecting one or more genetic variations associated with the AD or a risk of developing the AD in a polynucleic acid sample from the subject.

[0017] In some embodiments, the one or more genetic variations associated with the AD or a risk of developing the AD is a genetic variation that causes a mutation in a protein encoded by a urea cycle disorder (UCD) gene, a hyperammonemia (HA) gene, a gene in Table 8 or a gene in Table 9.

[0018] In some embodiments, the mutation is a deleterious mutation.

[0019] In some embodiments, the mutation is a loss-of-function (LOF) mutation.

[0020] In some embodiments, the protein encoded by the UCD or HA gene is not expressed or expressed at a lower level compared to the protein encoded by the UCD or HA gene without the mutation.

[0021] In some embodiments, the one or more genetic variations associated with the AD or a risk of developing the AD is a genetic variation in a regulatory element of a UCD or HA gene.

[0022] In some embodiments, a protein encoded by the UCD or HA gene is not expressed or expressed at a lower level compared to the protein encoded by the UCD or HA gene without the genetic variation in the regulatory element of the UCD or HA gene.

[0023] In some embodiments, the one or more genetic variations associated with the AD or a risk of developing the AD is a genetic variation that causes a mutation in a protein encoded by a UCD gene.

[0024] In some embodiments, the one or more genetic variations associated with the AD or a risk of developing the AD is a genetic variation that causes a mutation in a protein encoded by a HA gene.

[0025] In some embodiments, the one or more genetic variations associated with the AD or a risk of developing the AD comprise a point mutation, polymorphism, single nucleotide polymorphism (SNP), single nucleotide variation (SNV), translocation, insertion, deletion, amplification, inversion, interstitial deletion, copy number variation (CNV), structural variation (SV), loss of heterozygosity, or any combination thereof.

[0026] In some embodiments, the one or more genetic variations disrupt or modulate a gene, expression of a gene and/or a regulatory element of a gene selected from the group consisting of ARG1, ASL, ASS1, CPS1, NAGS, OTC, SLC25A13, and SLC25A15.

[0027] In some embodiments, the one or more genetic variations disrupt or modulate a gene, expression of a gene and/or a regulatory element of a gene selected from the group consisting of ACADM, ACADVL, ALDH18A1, AMT, ATP5F1D, ATPAF2, CA5A, CPT1A, CPT2, CYC1, DLAT, ETFA, ETFB, ETFDH, FBXL4, FH, GLUD1, GLUL, HADHA, HADHB, HLCS, HMGCL, IVD, LMBRD1, MCCC1, MCCC2, MCEE, MLYCD, MMAA, MMAB, MMACHC, MMADHC, MMUT, OAT, PC, PCCA, PCCB, PDHA1, SLC22A5, SLC25A20, SLC25A42, SLC7A7, TAFAZZIN, TANGO2, TMEM70, TUFM, UQCRC2 and YARS2.

[0028] In some embodiments, the one or more genetic variations disrupt or modulate a gene, expression of a gene and/or a regulatory element of a gene selected from the group consisting of GLUL, CPS1, LMBRD1, ASL, SLC25A13, TMEM70, ASS1, MMAB, PCCA, SLC7A7, ACADVL, ATPAF2, ATP5FID, OTC and TAFAZZIN.

[0029] In some embodiments, the one or more genetic variations disrupt or modulate a gene, expression of a gene and/or a regulatory element of a gene selected from the group consisting of GLUL, CPS1, LMBRD1, ASL, SLC25A13, TMEM70, ASS1, MMAB, PCCA, SLC7A7, ACADVL, ATPAF2, ATP5FID, OTC, TAFAZZIN, UBE2W, ASGR2, MIR33B, RAI1, SREBF1, ABCA7, CNN2 and TSPAN7.

[0030] In some embodiments, the one or more genetic variations is in an exon or intron of a gene and disrupts or modulates expression of a gene and/or a regulatory element of a gene that encodes a transcript with at least 80% sequence identity to any one of SEQ ID NOs: 26-96.

[0031] In some embodiments, the one or more genetic variations is in an intergenic genomic region and disrupts or modulates expression of a gene and/or a regulatory element of a gene that encodes a transcript with at least 80% sequence identity to any one of SEQ ID NOs: 55 and 97-111.

[0032] In some embodiments, the one or more genetic variations is in an intergenic genomic region.

[0033] In some embodiments, the one or more genetic variations disrupt or modulate expression and/or a regulatory element of a gene selected from the group consisting of GLUL, SLC25A13, SLC7A7, OTC and TAFAZZIN.

[0034] In some embodiments, the one or more genetic variations is in an exon of a gene.

[0035] In some embodiments, the one or more genetic variations is in an exon of a gene selected from the group consisting of LMBRD1, UBE2W, ASS1, MIR33B, RAI1, SREBF1, ABCA7, CNN2 and TSPAN7.

[0036] In some embodiments, the one or more genetic variations disrupt or modulate expression and/or a regulatory element of a gene selected from the group consisting of LMBRD1, TMEM70, ASS1, ATPAF2, ATP5FID and OTC.

[0037] In some embodiments, the one or more genetic variations is in an intron of a gene.

[0038] In some embodiments, the one or more genetic variations is in an intron of a gene selected from the group consisting of CPS1, LMBRD1, ASL, MMAB, PCCA, ASGR2, OTC and TSPAN7.

[0039] In some embodiments, the one or more genetic variations disrupt or modulate expression and/or a regulatory element of a gene selected from the group consisting of CPS1, LMBRD1, ASL, MMAB, PCCA, ACADVL and OTC.

[0040] In some embodiments, wherein the one or more genetic variations comprise a CNV loss.

[0041] In some embodiments, the one or more genetic variations comprise a CNV loss of a sequence with at least 80% sequence identity to any one of SEQ ID NOs: 1-10, 12-14 and 16-20.

[0042] In some embodiments, the genetic variation is a CNV gain.

[0043] In some embodiments, the genetic variation is a CNV gain of a sequence with at least 80% sequence identity to any one of SEQ ID NOs: 11, 15 and 21-25.

[0044] In some embodiments, the urea cycle disorder (UCD) is selected from the group consisting of Argininemia, Argininosuccinic aciduria, Citrullinemia, Carbamoylphosphate synthetase I deficiency, N-acetylglutamate synthase deficiency, Ornithine transcarbamylase deficiency, Citrullinemia, type II, neonatal-onset; Citrullinemia, adult-onset type II and Hyperomithinemia-hyperammonemia-homocitrullinemia syndrome.

[0045] In some embodiments, the one or more genetic variations disrupt or modulate a gene, expression of a gene and/or a regulatory element of a gene selected from the group consisting of ARG 1, ASL, ASS1, CPS1, NAGS, OTC, SLC25A13 and SLC25A15.

[0046] In some embodiments, the hyperammonemia (HA) is selected from the group consisting of Acyl-CoA dehydrogenase, medium chain, deficiency of; VLCAD deficiency; Cutis laxa, autosomal recessive, type IIIA; Glycine encephalopathy; Mitochondrial complex V (ATP synthase) deficiency; Mitochondrial complex V (ATP synthase) deficiency, nuclear type 1; Carbonic anydrase VA deficiency; CPT deficiency, hepatic, type IA; CPT II deficiency, infantile; Mitochondrial complex III deficiency, nuclear type 6; Pyruvate dehydrogenase E2 deficiency; Glutaric acidemia IIA; Glutaric acidemia IIB; Glutaric acidemia IIC; Mitochondrial DNA depletion syndrome 13 (encephalomyopathic type); Fumarase deficiency; Hyperinsulinism-hyperammonemia syndrome; Glutamine deficiency, congenital; Mitochondrial trifunctional protein deficiency; Trifunctional protein deficiency; Holocarboxylase synthetase deficiency; HMG-CoA lyase deficiency; Isovaleric acidemia; Methylmalonic aciduria and homocystinuria, cblF type; 3-Methylcrotonyl-CoA carboxylase 1 deficiency; 3-Methylcrotonyl-CoA carboxylase 2 deficiency; Methylmalonyl-CoA epimerase deficiency; Malonyl-CoA decarboxylase deficiency; Methylmalonic aciduria, vitamin B 12-responsive; Methylmalonic aciduria, vitamin B 12-responsive, cblB type; Methylmalonic aciduria and homocystinuria, cblC type; Homocystinuria, cblD type, variant 1; Methylmalonic aciduria and homocystinuria, cblD type; Methylmalonic aciduria, cblD type, variant 2; Methylmalonic aciduria, mut(0) type; Gyrate atrophy of choroid and retina with or without omithinemia; Pyruvate carboxylase deficiency; Propionicacidemia; Propionicacidemia; Pyruvate dehydrogenase E1-alpha deficiency; Camitine deficiency, systemic primary; Carnitine-acylcarnitine translocase deficiency; Metabolic crises, recurrent, with variable encephalomyopathic features and neurologic regression; Lysinuric protein intolerance; Barth syndrome; Metabolic encephalomyopathic crises, recurrent, with rhabdomyolysis, cardiac arrhythmias, and neurodegeneration; Mitochondrial complex V (ATP synthase) deficiency, nuclear type 2; Combined oxidative phosphorylation deficiency 4; Mitochondrial complex III deficiency, nuclear type 5; Myopathy, lactic acidosis, and sideroblastic anemia 2.

[0047] In some embodiments, the one or more genetic variations disrupt or modulate a gene, expression of a gene and/or a regulatory element of a gene selected from the group consisting of ACADM, ACADVL, ALDH18A1, AMT, ATP5FID, ATPAF2, CASA, CPT1A, CPT2, CYC1, DLAT, ETFA, ETFB, ETFDH, FBXL4, FH, GLUD1, GLUL, HADHA, HADHB, HLCS, HMGCL, IVD, LMBRD1, MCCC1, MCCC2, MCEE, MLYCD, MMAA, MMAB, MMACHC, MMADHC, MMUT, OAT, PC, PCCA, PCCB, PDHA1, SLC22A5, SLC25A20, SLC25A42, SLC7A7, TAFAZZIN, TANGO2, TMEM70, TUFM, UQCRC2 and YARS2.

[0048] In some embodiments, the one or more genetic variations comprise a genetic variation according to any one of Tables 1-11 and 13-15.

[0049] In some embodiments, the one or more genetic variations comprise an SNV.

[0050] In some embodiments, the SNV is in an exon of a gene.

[0051] In some embodiments, the SNV is in an exon of a gene selected from the group consisting of MMACHC, HADHA, MMADHC, SLC25A20, AMT, PCCB, MCCC1, MMAA, MMUT, FBXL4, ASL, SLC25A13, PC, DLAT, SLC7A7, TUFM, MLYCD, ACADVL, NAGS and HLCS.

[0052] In some embodiments, the one or more genetic variations comprise a sequence according to any one of SEQ ID NOs: 117-119, 125-154 and 159-183.

[0053] In some embodiments, the one or more genetic variations comprise an indel.

[0054] In some embodiments, the indel is in an intron of a gene.

[0055] In some embodiments, the indel is in an intron of a CPS1 gene.

[0056] In some embodiments, the one or more genetic variations comprise a sequence according to any one of SEQ ID NOs: 120-124 and 155-157.

[0057] In some embodiments, the SNV is in an intron of a CPS1 gene.

[0058] In some embodiments, the one or more genetic variations comprise an SNV within a CPS1 GeneHancer enhancer GH02J210503.

[0059] In some embodiments, the SNV within a CPS1 GeneHancer enhancer GH02J210503 comprises a sequence according to SEQ ID NO: 125.

[0060] In some embodiments, the one or more genetic variations comprise a CNV loss of a sequence with at least 80% sequence identity to SEQ ID NO: 3.

[0061] In some embodiments, the urea cycle agent targets a gene selected from the group consisting of ARG1, ASS1, CPS1, NAGS, OTC, SLC25A13 and SLC25A15, or an RNA transcript or protein encoded by the gene.

[0062] In some embodiments, the urea cycle agent is a small molecule, fusogen, gene therapy, microbiome metabolic therapy, enzyme replacement therapy or mRNA therapy.

[0063] In some embodiments, the urea cycle agent is selected from the group consisting of carglumic acid, glycerol phenylbutyrate, sodium phenylacetate and sodium benzoate, sodium phenylbutyrate, taste-masked sodium phenylbutyrate and sodium benzoate.

[0064] In some embodiments, the urea cycle agent is selected from the group consisting of ACER-001, AEB 1102 (pegzilarginase), ARCT-810, BB-OTC, DTX301, KB-195, P-OTC-101, PRX-OTC, SEL-313, SG328 and P-OTC-101.

[0065] In some embodiments, the method comprises administration co-administration of a urea cycle agent and an antibiotic of an additional agent.

[0066] In some embodiments, the additional agent is an antibiotic or taurine.

[0067] In some embodiments, the subject's risk of developing AD is due to the presence of one or more genetic variations that occur at a frequency of 10% or less in a population of human subjects with AD and without a UCD.

[0068] In some embodiments, the subject's risk of developing AD is due to the presence of one or more genetic variations that occur at a frequency of 10% or less in a population of human subjects with AD and with a UCD.

[0069] In some embodiments, the subject's risk of developing AD is due to the presence of one or more genetic variations that occur at a frequency of 1% or less in a population of human subjects with AD.

[0070] In some embodiments, the subject's risk of developing AD is due to the presence of one or more genetic variations that occur at a frequency of 1% or less in a population of human subjects with AD and without a UCD.

[0071] In some embodiments, the subject's risk of developing AD is due to the presence of one or more genetic variations that occur at a frequency of 1% or less in a population of human subjects with AD and with a UCD.

[0072] In some embodiments, the one or more genetic variations have an odds ratio (OR) of 3 or more, and wherein the OR is:

[D_{D}/D_{N}]/[N_{D}/N_{N}],
[0073] wherein:
[0074] D_{D} is the number of subjects in a diseased cohort of subjects with the one or more genetic variations;
[0075] D_{N} the number of subjects in the diseased cohort without the one or more genetic variations;
[0076] N_{D} is the number of subjects in a non-diseased cohort of subjects with the one or more genetic variations; and
[0077] N_{N} is the number of subjects in the non-diseased cohort without the one or more genetic variations.

[0078] In some embodiments, the diseased cohort or non-diseased cohort comprises at least 100 human subjects.

[0079] In some embodiments, the at least 100 human subjects comprises at least 100 human subjects with AD.

[0080] In some embodiments, the at least 100 human subjects comprises at least 10 human subjects without a UCD.

[0081] In some embodiments, the subject's risk of developing AD is due to the presence of one or more genetic variations that has an odds ratio (OR) of at least 3, 4, 5, 6, 7, 8, 9, 10, 15, 20, 25, 30, 35, 40, 45 or 50.

[0082] In some embodiments, the one or more genetic variations comprise at least 2, 3, 4, 5, 6, 7, 8, 9, 10, 11, 12, 13, 14, 15, 20, 25, 30, 35, 40, 45, 50, 75, 100 genetic variations.

[0083] In an aspect, the present disclosure provides a method of treating or preventing AD comprising:
[0084] (a) testing a subject with AD for the presence of one or more genetic variations that disrupt or modulate a corresponding gene according to any one of Tables 1-11 and 13-15,
[0085] (b) determining that the subject has one or more genetic variations that disrupt or modulate a corresponding gene according to any one of Tables 1-11 and 13-15, and
[0086] (c) administering a urea cycle agent to the subject that was determined to have the one or more genetic variations that disrupt or modulate a corresponding gene according to any one of Tables 1-11 and 13-15.

[0087] In some embodiments, the genetic test or the testing comprises microarray analysis, PCR, sequencing, nucleic acid hybridization, or any combination thereof.

[0088] In some embodiments, the genetic test or the testing comprises microarray analysis selected from the group consisting of a Comparative Genomic Hybridization (CGH) array analysis and an SNP array analysis.

[0089] In some embodiments, the genetic test or the testing comprises sequencing, wherein the sequencing is selected from the group consisting of Massively Parallel Signature Sequencing (MPSS), polony sequencing, 454 pyrosequencing, Illumina sequencing, Illumina (Solexa) sequencing using 10× Genomics library preparation, SOLID sequencing, ion semiconductor sequencing, DNA nanoball sequencing, heliscope single molecule sequencing, single molecule real time (SMRT) sequencing, RNAP sequencing, Nanopore DNA sequencing, sequencing by hybridization, and microfluidic Sanger sequencing.

[0090] In some embodiments, the genetic test or the testing comprises analyzing a whole genome of the subject.

[0091] In some embodiments, the genetic test or the testing comprises analyzing a whole exome of the subject.

[0092] In some embodiments, the genetic test or the testing comprises analyzing nucleic acid information that has already been obtained for a whole genome or a whole exome of the subject.

[0093] In some embodiments, the nucleic acid information is obtained from an in sit/co analysis.

[0094] In some embodiments, the subject is a human subject.

[0095] In some embodiments, the polynucleic acid sample comprises a polynucleic acid from blood, saliva, urine, serum, tears, skin, tissue, or hair of the subject.

[0096] In an aspect, the present disclosure provides a method of identifying a subject as having a risk of developing AD, comprising:
[0097] (a) analyzing a polynucleic acid sample from the subject for one or more genetic variations that disrupt or modulate a corresponding gene according to any one of Tables 1-14, wherein a genetic variation of the one or more genetic variations that disrupt or modulate a corresponding gene according to any one of Tables 1-11 and 13-15 is present in the polynucleic acid sample;
[0098] (b) identifying the subject as having a risk of developing AD.

[0099] In an aspect, the present disclosure provides a method of identifying a subject as having a reduced risk of developing AD, comprising:
[0100] (a) analyzing a polynucleic acid sample from the subject for one or more genetic variations that disrupt or modulate a corresponding gene according to Table 12, wherein a genetic variation of the one or more genetic variations that disrupt or modulate a corresponding gene according to Table 12 is present in the polynucleic acid sample;
[0101] (b) identifying the subject as having a reduced risk of developing AD compared to the risk of developing AD in a subject without the one or more genetic variations that disrupt or modulate a corresponding gene according to Table 12.

[0102] In some embodiments, the one or more genetic variations comprise a sequence according to any one of SEQ ID NOs: 184 and 185.

[0103] In an aspect, the present disclosure provides a kit, comprising reagents for assaying a polynucleic acid sample from a subject in need thereof for the presence of one or more genetic variations that disrupt or modulate a corresponding gene according to any one of Tables 1-11 and 13-15.

[0104] In some embodiments, the reagents comprise at least one contiguous oligonucleotide that hybridizes to a fragment of the polynucleic acid sample.

[0105] In some embodiments, the reagents comprise at least one pair of oligonucleotides that hybridize to opposite strands of a fragment of the polynucleic acid sample.

[0106] In some embodiments, the kit further comprises one or more urea cycle agents.

[0107] In some embodiments, the kit further comprises a set of instructions for administration of the one or more urea cycle agents.

[0108] In an aspect, the present disclosure provides a method of screening for an Alzheimer's disease (AD) biomarker comprising:
[0109] (a) obtaining biological samples from subjects with AD;
[0110] (b) screening the biological samples to obtain nucleic acid information;
[0111] (c) detecting one or more genetic variations that disrupt or modulate a corresponding gene according to any one of Tables 1-11 and 13-15 in a polynucleic acid sample from a subject suspected of having AD; and
[0112] (d) using that detection as a biomarker for predicting a response of the subject to a therapy to be beneficial, wherein the therapy is one or more urea cycle agents.

[0113] In some embodiments, the detecting one or more genetic variations further comprises using polymerase chain reaction (PCR), sequencing, nucleic acid hybridization, microarray analysis, northern blot, or any combination thereof.

[0114] In some embodiments, the microarray analysis is selected from the group consisting of a comparative genomic hybridization (CGH) analysis and a SNP array analysis.

[0115] In some embodiments, the sequencing comprises a sequencing method selected from the group consisting of massively parallel signature sequencing, polony sequencing, high throughput pyrose-quencing, bead array sequencing, ion semiconductor sequencing, DNA nanoball sequencing, single molecule sequencing, single molecule real time sequencing, RNAP sequencing, nanopore DNA se quencing, sequencing by hybridization, and microfluidic Sanger sequencing.

[0116] In some embodiments, the one or more urea cycle agents is a therapeutic agent listed in Table 13 or Table 14, or any combination thereof.

[0117] In some embodiments, the using further comprises comparing the nucleic acid information to a panel of nucleic acid biomarkers.

[0118] In some embodiments, the panel of nucleic acid biomarkers comprises at least about 100 nucleic acid biomarkers.

### INCORPORATION BY REFERENCE

[0119] All publications, patents, and patent applications mentioned in this specification are herein incorporated by reference to the same extent as if each individual publication, patent, or patent application was specifically and individually indicated to be incorporated by reference. In the event of a conflict between a term herein and a term incorporated by reference, the term herein controls.

### BRIEF DESCRIPTION OF THE DRAWINGS

[0120] The novel features of the disclosure are set forth with particularity in the appended claims. A better understanding of the features and advantages of the present disclosure will be obtained by reference to the following detailed description that sets forth illustrative embodiments, in which the principles of the disclosure are utilized, and the accompanying drawings.

[0121] FIG. 1 represents an example of an aCGH-detected 3-probe intronic deletion that impacts the UCD gene CPS1. The deletion was observed in 3/100 LOAD cases and 1/1,000 Normal (NVE) subjects. All 4 deletions appear to be identical, with a genomic span of 6,430 bp. Genome coordinates of the deletion are: hg18, chr2:211070190-211076620; hg19, chr2:211361945-211368375. Log 2 ratios for the y-axes (4 data tracks) report deletions as negatively shifted probes. Genome coordinates for the x-axis are based on the NCBI36/hg18 freeze.

[0122] FIG. 2 represents an example of the extent of the CPS1 intronic deletion compared to different public data sources for CNVs/SVs in the UCSC genome browser. The deletion reported by Population Bio (CPS1_del_PBio) is defined by the location of 3 aCGH probes (see FIG. 1). The deletion reported in other data sources (IKG Ph3 labeled as CPS1 del_IKG_Ph3, DGV_Gold labeled as gssvL69036, and gnomAD labeled as DEL_2_26674) is based on analysis of WGS data, which allows (in this instance) for a more accurate delineation of the endpoints. Five aCGH probes are shown (central 3 mapping to the deletion plus 1 flanking on each side). The endpoints of the WGS mapped deletion do not extend to the flanking probes, which confirms the aCGH data. Genome coordinates are based on the NCBI36/hg18 freeze.

[0123] FIG. 3 represents an example of UCSC genome browser regulatory site annotations that are encompassed by, or overlap with, the CPS1 deletion detected in 3 LOAD cases. Displayed are the 3 Agilent probes (identified by dashed lines and are the same 3 aCGH probes shown in FIG. 1), CNV/SV public data (DGV GS, IKG Ph3, and gnomAD) that is also shown in FIG. 2, and regulatory site annotation from two public data sources: ENCODE transcription factor binding sites; GeneHancer mapping of enhancer and promoter sites. This demonstrates that the deletion overlaps an enhancer regulatory element (GH02J210503) with a functional role for expression of the CPS1 gene. Genome coordinates are based on the GRCh37/hg 19 freeze.

[0124] FIG. 4 represents an example of UCSC genome browser regulatory site annotations for the full extent of the CPS1 gene (zoomed out view of FIG. 3, the intronic deletion is demarcated by the pair of vertical dashed lines). Besides GeneHancer enhancer GH02J210503, the location of 5 other promoter/enhancer elements are shown. Also displayed are the interactions between GeneHancer regulatory elements and genes (Double Elite), which shows that enhancer GH02J210503 (located in an intron of CPS1) interacts with CPS1 promoter GH02J210475.

[0125] FIG. 5 represents an example of a PCR assay designed to detect the CPS1 intronic deletion (see FIG. 1 and FIG. 2). Shown is a 1% agarose gel with a PCR product band (350 bp in size) obtained for a positive (Pos.) control genomic DNA sample (i.e., from a subject known to harbor the CPS1 deletion) using PCR primers CPS1_delF and CPS1_delR (see Table 6). No PCR product is observed for two different negative (Neg.) control genomic DNA samples, thereby demonstrating the specificity of the DNA assay to detect the CPS1 deletion.

[0126] FIG. 6 represents an example of a PCR assay used to validate the aCGH-detected CPS1 deletion found in 3 LOAD cases (see FIG. 1). Each of the 3 positive LOAD samples (Expt IDs 2693, 2696, and 2719) was run in duplicate (lanes 1-6 after the DNA ladder) on a 2% agarose gel. Two negative controls (samples known not to harbor the deletion on the basis of aCGH, lanes 7 and 8) are also shown, plus a non-template control (NTC) wherein the assay was run with no input DNA. This demonstrates that all 3 LOAD samples yield a positive product at the expected size of 350 bp (see FIG. 5).

[0127] FIG. 7 shows examples of aCGH-detected CNVs nearby UCD gene OTC (gene locations are shown at the top) in 5 LOAD cases (all female). The CNVs (a deletion in track 1, a duplication in track 2, and an identical duplication in tracks 3-5) are also nearby or directly impact the TSPAN7 gene. Log 2 ratios for the y-axes (5 tracks) report deletions as negatively shifted probes and duplications as positively shifted probes. Genome coordinates for the x-axis are based on the NCBI36/hg18 freeze. See Table 1 for the NCBI36/hg 18 genome coordinates of the CNVs.

[0128] FIG. 8 represents examples of aCGH-detected CNVs (deletion and duplication) compared to public data sources for CNVs/SVs (DGV GS and gnomAD SV) in the UCSC genome browser. Two aCGH-detected CNVs (see FIG. 7) were confirmed in the gnomAD SV database: DEL_X_185726 corresponds to the deletion found in 1 LOAD case (Expt ID 2732); DUP_X_52986 corresponds to the duplication found in 3 LOAD cases (Expt IDs 2724, 2726, and 2744). The duplication found in LOAD case Expt ID 2687 is not found in public CNV/SV data sources. Genome coordinates are based on the GRCh37/hg 19 freeze. See Table 1 for the NCBI36/hg18 genome coordinates of the CNVs.

[0129] FIG. 9 represents an example of an aCGH-detected 1-probe (Agilent probe A_16_P21444361) intronic deletion that impacts the UCD gene OTC. The deletion was observed in 1/100 LOAD cases and 0/1,000 Normal (NVE) subjects (the dotted vertical line demarcates the 1,000 Normal subjects from the 100 LOAD cases). Genome coordinates for the aCGH probe: hg18, chrX:38109666-38109725; hg19, chrX:38224722-38224781. The y-axis Log 2 ratio reports deletions as negatively shifted probes. The plot demonstrates that (i) the probe is well-behaved (very little noise across 1,100 total aCGH experiments) and (ii) that there exists an individual with a very low log 2 ratio (consistent with a homozygous deletion). This individual is male and thus this result demonstrates that this individual is deleted at this locus (the log 2 ratio is lower than expected for a deletion affecting only one allele, because males only have one Chr X).

[0130] FIG. 10 represents an example of a plot of aCGH data for an individual with the deletion shown in FIG. 9. The probes (dots) in this plot are all from the same LOAD case (Expt ID 2764) and span the OTC gene (located at chrX:38,096,680-38,165,647), demonstrating the deleted probe in the context of the full extent of the gene. Genome coordinates for the x-axis are based on the NCBI36/hg 18 freeze.

[0131] FIG. 11 represents an example of an aCGH-detected 1-probe (Agilent probe A_16 P15364898) intergenic deletion ˜226Kb downstream of HA gene GLUL. The deletion was observed in 2/100 LOAD cases and 1/1,000 Normal (NVE) subjects (the dotted vertical line demarcates the 1,000 Normal subjects from the 100 LOAD cases). Genome coordinates for the aCGH probe: hg18, chr1:180387776-180387835; hg19, chr1:182121153-182121212. The y-axis Log 2 ratio reports deletions as negatively shifted probes.

[0132] FIG. 12 represents an example of UCSC genome browser regulatory site annotations that are immediately adjacent to the intergenic deletion (˜226Kb downstream of the GLUL gene) detected in 2 LOAD cases (see FIG. 11). Displayed are the deletion-reporting aCGH Agilent probe (A_16 P15364898, see FIG. 11), CNV/SV public data (DGV GS and gnomAD), and regulatory site annotation from two public data sources: GeneHancer mapping of enhancer and promoter sites; ENCODE transcription factor binding sites. The 1-probe deletion maps to gnomAD DEL 19677, which is immediately adjacent to an enhancer regulatory element (GH01J182142) with a functional role for expression of the GLUL gene. There are numerous ENCODE transcription factor binding sites (bottom track) that map to this enhancer element. Genome coordinates are based on the GRCh37/hg 19 freeze.

[0133] FIG. 13 represents an example of UCSC genome browser regulatory site annotations for the full extent of the GLUL gene and downstream region encompassing the intergenic deletion (zoomed out view of FIG. 12, the deletion detected by Agilent probe A16P15364898 and mapping to gnomAD DEL_1_9677). Besides GeneHancer enhancer GH01J182142, the location of 10 other promoter/enhancer elements downstream of the GLUL gene are shown. This demonstrates that enhancer and promoter elements do not need to be contained within the gene whose expression they are regulating and that they can be located far away from the gene.

### DETAILED DESCRIPTION OF THE DISCLOSURE

[0134] The details of one or more inventive embodiments are set forth in the accompanying drawings, the claims, and in the description herein. Other features, objects, and advantages of inventive embodiments disclosed and contemplated herein will be apparent from the description and drawings, and from the claims.

[0135] As used herein, unless otherwise indicated, the article “a” means one or more unless explicitly otherwise provided for.

[0136] As used herein, unless otherwise indicated, terms such as “contain,” “containing,” “include,” “including,” and the like mean “comprising.”

[0137] As used herein, unless otherwise indicated, the term “or” can be conjunctive or disjunctive. As used herein, unless otherwise indicated, any embodiment can be combined with any other embodiment.

[0138] As used herein, unless otherwise indicated, some inventive embodiments herein contemplate numerical ranges. When ranges are present, the ranges include the range endpoints. Additionally, every subrange and value within the range is present as if explicitly written out.

[0139] As used herein, unless otherwise indicated, the term “about” in relation to a reference numerical value and its grammatical equivalents include a range of values plus or minus 10% from that value, such as a range of values plus or minus 10%, 9%, 8%, 7%, 6%, 5%, 4%, 3%, 2%, or 1% from that value. For example, the amount “about 10” includes amounts from 9 to 11.

[0140] As used herein, unless otherwise indicated, the term “biological product” refers to a virus, therapeutic serum, toxin, antitoxin, vaccine, blood, blood component or derivative, allergenic product, protein (any alpha amino acid polymer with a specific defined sequence that is greater than 40 amino acids in size), or analogous product, or arsphenamine or derivative of arsphenamine (or any trivalent organic arsenic compound), applicable to the prevention, treatment, or cure of a disease or condition of human beings.

[0141] As used herein, unless otherwise indicated, the term “biosimilar product” refers to 1) a biological product having an amino acid sequence that is identical to a reference product; 2) a biological product having a different amino acid sequence (e.g., N- or C-terminal truncations) from a reference product; or 3) a biological product having a different posttranslational modification (e.g., glycosylation or phosphorylation) from a reference product, wherein the biosimilar product and the reference product utilize the same mechanism or mechanisms of action for the prevention, treatment, or cure of a disease or condition.

[0142] As used herein, “mechanism of action” refers to an interaction or activity through which a drug product (e.g., a biological product) produces a pharmacological effect.

[0143] As used herein, unless otherwise indicated, the term “interchangeable product” refers to a biosimilar product, wherein a response rate of a human subject administered the interchangeable product is from 80% to 120% of the response rate of the human subject administered the reference product.

[0144] As used herein, unless otherwise indicated, the term “reference product” refers to 1) a biological product having an amino acid sequence that is identical to a biosimilar product; 2) a biological product having a different amino acid sequence (e.g., N- or C-terminal truncations) from a biosimilar product; or 3) a biological product having a different posttranslational modification (e.g., glycosylation or phosphorylation) from a biosimilar product, wherein the reference product and the biosimilar product utilize the same mechanism or mechanisms of action for the prevention, treatment, or cure of a disease or condition.

### Late-Onset Alzheimer's Disease (LOAD)

[0145] Alzheimer's disease (AD) is the most common form of dementia in the elderly, accounting for a majority of cases at autopsy and in clinical series. The number of people affected by AD is increasing and are characterized by deterioration of memory and other cognitive domains, and leading to death 3-9 years after diagnosis. The number of patients with AD, the most common cause of disability in the elderly, rises dramatically. Late Onset Alzheimer's Disease (LOAD) shares the same clinical and pathological features as AD but is diagnosed in those >65 years of age. Therefore, it is important for clinicians to recognize early signs and symptoms of dementia and to note potentially modifiable risk factors and early disease markers.

[0146] AD and LOAD may be characterized by extensive atrophy of the brain caused by a series neuropathologic changes, including neuronal loss, formation of amyloid plaques, appearance of neurofibrillary tangles, and synaptic loss. Amyloid plaques and neurofibrillary tangles result from an aberration in deposition of the Aβ peptide and the hyperphosphorylated tau protein, respectively, and these depositions lead to neuronal loss and neurotoxicity in the brain affected by AD. These changes in the brain may not be found throughout the brain and preferentially affect specific brain areas in a manner that is essentially consistent from patient to patient. Data obtained by electron microscopy and immunocytochemical and biochemical analysis on synaptic marker proteins in AD biopsies and autopsies indicate that synaptic loss in the hippocampus and neocortex may be an early event and the major structural correlate of cognitive dysfunction. From all cortical areas analyzed, the hippocampus may be the most severely affected by the loss of synaptic proteins, while the occipital cortex is affected least. In addition, synaptic loss may be currently the best neurobiological correlate of cognitive deficits in AD. In some cases, living neurons may lose their synapses in AD. Furthermore, synaptic function may be impaired in living neurons, as demonstrated by decrements in transcripts related to synaptic vesicle trafficking.

[0147] In some cases, genetic factors leading to AD or LOAD may be part of the urea cycle.

[0148] Any therapeutic agent in Table 13 and Table 14 may be used for treatment of AD or at least for ameliorating one or more symptoms of AD. Several drugs have been reported in the context of UCD or HA and may be used for treatment of LOAD or at least for ameliorating one or more symptoms of LOAD. Several drugs/therapies (i.e., urea cycle agents) have been reported in the context of Urea cycle disorders (UCDs) or hyperammonemia (HA) and may be used for treatment of AD or at least for ameliorating one or more symptoms of AD. Several drugs have been reported in the context of UCD or HA and may be used for treatment of LOAD or at least for ameliorating one or more symptoms of LOAD. Medications can include, but are not limited to, carglumic acid, glycerol phenylbutyrate, sodium phenylacetate, sodium benzoate and sodium phenylbutyrate. In some embodiments, a therapy is classified as an experimental therapy, such as a small molecule therapy (for example, ACER-001 (taste masked sodium phenylbutyrate)), an enzyme replacement therapy (for example, AEB 1102 also known as pegzilarginase, BB-OTC, or PRX-OTC), a mRNA therapy (for example, ARCT-810), a gene therapy (for instance, DTX301 (AAV8), P-OTC-101, or SEL-313), a microbiome metabolic therapy (for instance, KB-195), or a fusogen therapy (for instance, SG328). In some cases, drugs developed for use in treatment of classical (AR) urea cycle may be used for treatment of AD. Examples of this include but are not limited to glycerol phenylbutyrate (RAVICTI®) and taste-masked sodium phenylbutyrate (OLPRUVA™).

[0149] In some cases, earlier treatment of LOAD patients may include treatment of symptoms such as hyperammonemia. In some cases, an earlier treatment of AD or LOAD may include dietary plans (e.g., the Mediterranean diet, see PMID 29734664, Jin et al. Nutrients. 2018 May 4; 10(5):564) and/or supplements (e.g., medical food brands Milupa UCD 2 and UCD Anamix Junior by Nutricia North America). These may be typically available as over-the-counter (OTC) treatments and include, but are not limited to: low protein diet, low carbohydrate and high protein and fat diet, medium-chain triglyceride (MCT), sodium pyruvate, essential amino acids, L-arginine, L-citrulline (e.g., Cytolline by Solace Nutrition), D-ribose, uridine, and S-adenosyl-1-methionine. Critical care treatments may sometimes be included in the treatment regimen and include, but are not limited to, hemodialysis and liver transplants (e.g., orthotic or cells). Other therapeutic approaches under development include, but are not limited to, nitric oxide (NO) supplementation, mesenchymal stem cells, codon-optimized human OTC mRNA complexed with lipid-based nanoparticles, ammonia consuming bioengineered bacteria (e.g., SYNB 1020 by Synlogic), lactulose, autophagy enhancers, and farnesoid X receptor (FXR) agonists. Another experimental therapy is taurine supplementation, which has support from rodent models in the context of taurine deficiency (mouse knockout of SLC6A6, gene alias TAUT) as a cause of HA (e.g., see PMID 30862735, Qvartskhava N. et al. Proc Natl Acad Sci USA. 2019 Mar. 26; 116(13):6313-6318) and HA due to chronic liver injury (i.e., a non-genetic cause of HA) in rats (see PMID 28959615, Heidari R et al. Toxicol Rep. 2016 Apr. 13; 3:870 879). In humans, taurine supplementation (e.g., in the form of homotaurine, which is also known as ALZ-801, Alzhemed, tramiprosate, and Vivimind) is being investigated for treatment of MCI and AD (e.g., see PMID 32733362, Manzano S et al. Front Neurol. 2020 Jul. 7; 11:614 for a review on reported findings) and clinical trials suggest specific subsets of patients may see a greater benefit, such as AD patients homozygous for the APOE4/4 variant (e.g., see PMID 29199323, Abushakra S et al. J Prev Alzheimers Dis. 2016; 3(4):219-228). In MCI patients, homotaurine was found to favorably impact cytokine profiles, which was correlated with an improvement of episodic memory (see PMID 35515001, Toppi E et al. Front Immunol. 2022 Apr. 19; 13:813951). Evidence suggests that AD and/or MCI patients testing positive for one or more deleterious variants in a UCD/HA gene may see a greater benefit from homotaurine supplementation than AD and/or MCI patients without a deleterious variant in a UCD/HA gene. Since lipopolysaccharides (LPSs) from bacteria (e.g., that reside in the gastrointestinal tract of humans) are neurotoxic and have been linked to AD (e.g., see PMID 36293528, Zhao Y et al. Int J Mol Sci. 2022 Oct. 21; 23(20):12671), another potential treatment for AD or to prevent AD in those at risk for developing AD is to administer antibiotics (e.g., see PMID 34946536, Hurkacz M et al. Molecules. 2021 Dec. 9; 26(24):7456). Examples of antibiotics (reviewed by Hurkacz M et al. 2021) that may be useful for treating or preventing AD include, but are not limited to, tetracyclines (e.g., doxycycline and minocycline), cephalosporins (e.g., ceftriaxone), and antibiotics in the ansamycin family (e.g., rifampicin, a rifamycin derivative that is a subclass of the ansamycin family). A hypothesis for the mechanism of action of antibiotic therapy in treatment of AD or preventing AD is reduction of blood levels of ammonia due to secretion by the gut bacteria. Since HA can result from genetic (e.g., presence of one or more deleterious variants in one or more UCD or HA genes) and/or non-genetic factors (e.g., acute/chronic liver injury or gut bacteria), treatment modality for AD patients or subjects at risk of developing AD could include determining if the patient has a UCD/HA genetic subtype. If an AD patient (or MCI patient who is at risk for developing AD) is found to have HA due to genetic and non-genetic factors, it may be be beneficial to treat both sources of HA (e.g., with a urea cycle agent and an antibiotic).

[0150] The “diagnostic yield” as used herein refers to the percentage of cases with the presence of one or more genetic variations (e.g., CNV, SNV, indel, etc.) in a LOAD cohort using an assay. For example, if 40 cases were found with the presence of one or more genetic variations (e.g., CNV, SNV, indel, etc.) in a cohort of 100 LOAD patients, the diagnostic yield of the assay is 40%. In some cases, the patients in the LOAD cohort are clinically diagnosed with LOAD. In some cases, a patient is clinically diagnosed with LOAD when the patient presents with memory issues such as dementia, learning deficiencies, disorientation, cognitive damage, disorganized thinking, confusion. In some cases, the LOAD cohort has at least 5 LOAD cases, for example, at least 5, 6, 7, 8, 9, 10, 20, 30, 40, 50, 60, 70, 80, 90, 100, 200, 300, 400, 500, 600, 700, 800, 900, or 1000 LOAD cases. In some cases, the LOAD cohort is a cohort listed herein. For example, the LOAD cohort is the LOAD patient cohort listed in Table 7. In some cases, the assay is a genetic assay. In some cases, the genetic assay tests the genetic predisposition for LOAD.

[0151] The genetic assay can comprise any method disclosed herein. In some cases, the genetic assay has a diagnostic yield of at least about 0.1%, 0.2%, 0.3%, 04%, 0.5%, 1%, 2%, 3%, 4%, 5%, 6%, 7%, 8%, 9%, 10%, 15%, 20%, 25%, 30%, 35%, 40%, 45%, 50%, 55%, 60%, 65%, 70%, 75%, 80%, 85%, 90%, 95%, or 99%. In some cases, the genetic assay has a diagnostic yield of about 1%-5%, 1%-10%, 1%-20%, 5%-10%, 5%-20%, 10%-20%, 10%-30%, 20%-30%, 20%-40%, 30%-40%, 30%-50%, 40%-50%, 40%-60%, 50% 60%, 50%-70%, 60%-70%, 60%-80%, 70%-80%, 70%-90%, 80%-90%, 80%-95%, 90%-95%, 90%-99%, 90%-100%, 95%-99%, or 99%-100%.

Genetic Variations Associated with LOAD

[0152] Described herein, are methods that can be used to detect genetic variations. Detecting specific genetic variations, for example polymorphic markers and/or haplotypes, copy number, absence or presence of an allele, or genotype associated with a condition (e.g., disease or disorder) as described herein, can be accomplished by methods known in the art for analyzing nucleic acids and/or detecting sequences at polymorphic or genetically variable sites, for example, amplification techniques, hybridization techniques, sequencing, microarrays/arrays, or any combination thereof. Thus, by use of these methods disclosed herein or other methods available to the person skilled in the art, one or more alleles at polymorphic markers, including microsatellites, single nucleotide polymorphisms (SNPs), single nucleotide variations (SNVs), insertions/deletions (indels), copy number variations (CNVs), or other types of genetic variations, can be identified in a sample obtained from a subject.

[0153] Genomic sequences within populations exhibit variability between individuals at many locations in the genome. For example, the human genome exhibits sequence variations that occur on average every 500 base pairs. Such genetic variations in polynucleic acid sequences are commonly referred to as polymorphisms or polymorphic sites. As used herein, a polymorphism, e.g., genetic variation, includes a variation in the sequence of the genome amongst a population, such as allelic variations and other variations that arise or are observed. Thus, a polymorphism refers to the occurrence of two or more genetically determined alternative sequences or alleles in a population. These differences can occur in coding (e.g., exonic) and non-coding (e.g., intronic or intergenic) portions of the genome, and can be manifested or detected as differences in polynucleic acid sequences, gene expression, including, for example transcription, processing, translation, transport, protein processing, trafficking, DNA synthesis; expressed proteins, other gene products or products of biochemical pathways or in post-translational modifications and any other differences manifested amongst members of a population. Polymorphisms that arise as the result of a single base change, such as single nucleotide polymorphisms (SNPs) or single nucleotide variations (SNVs), can include an insertion, deletion or change in one nucleotide. A polymorphic marker or site is the locus at which divergence occurs. Such sites can be as small as one base pair (an SNP or SNV). Polymorphic markers include, but are not limited to, restriction fragment length polymorphisms (RFLPs), variable number of tandem repeats (VNTRs), hypervariable regions, minisatellites, dinucleotide repeats, trinucleotide repeats, tetranucleotide repeats and other repeating patterns, simple sequence repeats and insertional elements, such as Alu. Polymorphic forms also are manifested as different mendelian alleles for a gene. Polymorphisms can be observed by differences in proteins, protein modifications, RNA expression modification, DNA and RNA methylation, regulatory factors that alter gene expression and DNA replication, and any other manifestation of alterations in genomic polynucleic acid or organelle polynucleic acids. Those skilled in the art can appreciate that polymorphisms are sometimes considered to be a subclass of variations, defined on the basis of a particular frequency cutoff in a population. For example, in some embodiments, polymorphisms are considered to genetic variants/variations that occur at >1%, or >5%, frequency in the population.

[0154] In some embodiments, these genetic variations can be found to be associated with one or more disorders and/or diseases using the methods disclosed herein. In some embodiments, these genetic variations can be found to be associated with absence of one or more disorders and/or diseases (i.e. the one or more variants are protective against development of the disorder and/or diseases) using the methods disclosed herein.

[0155] In some embodiments, these genetic variations comprise point mutations, polymorphisms, single nucleotide polymorphisms (SNPs), single nucleotide variations (SNVs), translocations, insertions, deletions, amplifications, inversions, interstitial deletions, copy number variations (CNVs), structural variation (SV), loss of heterozygosity, or any combination thereof. As genetic variation includes any deletion, insertion or base substitution of the genomic DNA of one or more individuals in a first portion of a total population which thereby results in a difference at the site of the deletion, insertion or base substitution relative to one or more individuals in a second portion of the total population. Thus, the term “genetic variation” encompasses “wild type” or the most frequently occurring variation, and also includes “mutant,” or the less frequently occurring variation. In some embodiments, a wild type allele may be referred to as an ancestral allele.

[0156] As used herein, a target molecule that is “associated with” or “correlates with” a particular genetic variation is a molecule that can be functionally distinguished in its structure, activity, concentration, compartmentalization, degradation, secretion, and the like, as a result of such genetic variation. In some embodiments polymorphisms (e.g., polymorphic markers, genetic variations, or genetic variants) can comprise any nucleotide position at which two or more sequences are possible in a subject population. In some embodiments, each version of a nucleotide sequence, with respect to the polymorphism/variation, can represent a specific allele of the polymorphism/variation. In some embodiments, genomic DNA from a subject can contain two alleles for any given polymorphic marker, representative of each copy of the marker on each chromosome. In some embodiments, an allele can be a nucleotide sequence of a given location on a chromosome. Polymorphisms/variations can comprise any number of specific alleles. In some embodiments of the disclosure, a polymorphism/variation can be characterized by the presence of two or more alleles in a population. In some embodiments, the polymorphism/variation can be characterized by the presence of three or more alleles. In some embodiments, the polymorphism/variation can be characterized by four or more alleles, five or more alleles, six or more alleles, seven or more alleles, nine or more alleles, or ten or more alleles. In some embodiments an allele can be associated with one or more diseases or disorders, for example, a LOAD risk allele can be an allele that is associated with increased or decreased risk of developing LOAD. In some embodiments, genetic variations and alleles can be used to associate an inherited phenotype with a responsible genotype. In some embodiments, a LOAD risk allele can be a variant allele that is statistically associated with a screening of LOAD. In some embodiments, genetic variations can be of any measurable frequency in the population, for example, a frequency higher than 10%, a frequency from 5-10%, a frequency from 1-5%, a frequency from 0.1-1%, or a frequency below 0.1%. As used herein, variant alleles can be alleles that differ from a reference allele. As used herein, a variant can be a segment of DNA that differs from the reference DNA, such as a genetic variation. In some embodiments, genetic variations can be used to track the inheritance of a gene that has not yet been identified, but whose approximate location is known.

[0157] As used herein, a “haplotype” can be information regarding the presence or absence of one or more genetic markers in a given chromosomal region in a subject. In some embodiments, a haplotype can be a segment of DNA characterized by one or more alleles arranged along the segment, for example, a haplotype can comprise one member of the pair of alleles for each genetic variation or locus. In some embodiments, the haplotype can comprise two or more alleles, three or more alleles, four or more alleles, five or more alleles, or any combination thereof, wherein, each allele can comprise one or more genetic variations along the segment.

[0158] In some embodiments, a genetic variation can be a functional aberration that can alter gene function, gene expression, polypeptide expression, polypeptide function, or any combination thereof. In some embodiments, a genetic variation can be a loss-of-function mutation, gain-of-function mutation, dominant negative mutation, or reversion. In some embodiments, a genetic variation can be part of a gene's coding region or regulatory region. Regulatory regions can control gene expression and thus polypeptide expression. In some embodiments, a regulatory region can be a segment of DNA wherein regulatory polypeptides, for example, transcription or splicing factors, can bind. In some embodiments a regulatory region can be positioned near the gene being regulated, for example, positions upstream or downstream of the gene being regulated. In some embodiments, a regulatory region (e.g., enhancer element) can be several thousands of base pairs upstream or downstream of a gene.

[0159] In some embodiments, variants can include changes that affect a polypeptide, such as a change in expression level, sequence, function, localization, binding partners, or any combination thereof. In some embodiments, a genetic variation can be a frameshift mutation, nonsense mutation, missense mutation, neutral mutation, or silent mutation. For example, sequence differences, when compared to a reference nucleotide sequence, can include the insertion or deletion of a single nucleotide, or of more than one nucleotide, resulting in a frame shift; the change of at least one nucleotide, resulting in a change in the encoded amino acid; the change of at least one nucleotide, resulting in the generation of a premature stop codon; the deletion of several nucleotides, resulting in a deletion of one or more amino acids encoded by the nucleotides; the insertion of one or several nucleotides, such as by unequal recombination or gene conversion, resulting in an interruption of the coding sequence of a reading frame; duplication of all or a part of a sequence; transposition; or a rearrangement of a nucleotide sequence. Such sequence changes can alter the polypeptide encoded by the nucleic acid, for example, if the change in the nucleic acid sequence causes a frame shift, the frame shift can result in a change in the encoded amino acids, and/or can result in the generation of a premature stop codon, causing generation of a truncated polypeptide. In some embodiments, a genetic variation associated with LOAD can be a synonymous change in one or more nucleotides, for example, a change that does not result in a change in the amino acid sequence. Such a polymorphism can, for example, alter splice sites, affect the stability or transport of mRNA, or otherwise affect the transcription or translation of an encoded polypeptide. In some embodiments, a synonymous mutation can result in the polypeptide product having an altered structure due to rare codon usage that impacts polypeptide folding during translation, which in some cases may alter its function and/or drug binding properties if it is a drug target. In some embodiments, the changes that can alter DNA increase the possibility that structural changes, such as amplifications or deletions, occur at the somatic level. A polypeptide encoded by the reference nucleotide sequence can be a reference polypeptide with a particular reference amino acid sequence, and polypeptides encoded by variant nucleotide sequences can be variant polypeptides with variant amino acid sequences.

[0160] The most common sequence variants comprise base variations at a single base position in the genome, and such sequence variants, or polymorphisms, are commonly called single nucleotide polymorphisms (SNPs) or single nucleotide variants (SNVs). In some embodiments, a SNP represents a genetic variant present at greater than or equal to 1% occurrence in a population and in some embodiments a SNP or an SNV can represent a genetic variant present at any frequency level in a population. A SNP can be a nucleotide sequence variation occurring when a single nucleotide at a location in the genome differs between members of a species or between paired chromosomes in a subject. SNPs can include variants of a single nucleotide, for example, at a given nucleotide position, some subjects can have a ‘G’, while others can have a ‘C’. SNPs can occur in a single mutational event, and therefore there can be two possible alleles at each SNP site; the original allele and the mutated allele. SNPs that are found to have two different bases in a single nucleotide position are referred to as biallelic SNPs, those with three are referred to as triallelic, and those with all four bases represented in the population are quadallelic. In some embodiments, SNPs can be considered neutral. In some embodiments SNPs can affect susceptibility to a condition (e.g., LOAD). SNP polymorphisms can have two alleles, for example, a subject can be homozygous for one allele of the polymorphism wherein both chromosomal copies of the individual have the same nucleotide at the SNP location, or a subject can be heterozygous wherein the two sister chromosomes of the subject contain different nucleotides. The SNP nomenclature as reported herein is the official Reference SNP (rs) ID identification tag as assigned to each unique SNP by the National Center for Biotechnological Information (NCBI).

[0161] Another genetic variation of the disclosure can be copy number variations (CNVs). As used herein, “CNVs” include alterations of the DNA of a genome that results in an abnormal number of copies of one or more sections of DNA. In some embodiments, a CNV comprises a CNV-subregion. As used herein, a “CNV-subregion” includes a continuous nucleotide sequence within a CNV. In some embodiments, the nucleotide sequence of a CNV-subregion can be shorter than the nucleotide sequence of the CNV, and in another embodiment the CNV-subregion can be equivalent to the CNV (e.g., such as for some CNVs). CNVs can be inherited or caused by de novo mutation and can be responsible for a substantial amount of human phenotypic variability, behavioral traits, and disease susceptibility. In some embodiments, CNVs of the current disclosure can be associated with susceptibility to one or more conditions, for example, LOAD. In some embodiments, CNVs can include a single gene or include a contiguous set of genes. In some embodiments, CNVs can be caused by structural rearrangements of the genome, for example, unbalanced translocations or inversions, insertions, deletions, amplifications, and interstitial deletions. In some embodiments, these structural rearrangements occur on one or more chromosomes. Low copy repeats (LCRs), which are region-specific repeat sequences (also known as segmental duplications), can be susceptible to these structural rearrangements, resulting in CNVs. Factors such as size, orientation, percentage similarity and the distance between the copies can influence the susceptibility of LCRs to genomic rearrangement. In addition, rearrangements may be mediated by the presence of high copy number repeats, such as long interspersed elements (LINES) and short interspersed elements (SINEs), often via non-homologous recombination. For example, chromosomal rearrangements can arise from non-allelic homologous recombination during meiosis or via a replication-based mechanism such as fork stalling and template switching (FoSTeS) (Zhang F. et al., Nat. Genet. (2009)) or microhomology-mediated break-induced repair (MMBIR) (Hastings P. J. et al., PLoS Genetics (2009)). In some embodiments, CNVs are referred to as structural variants, which are a broader class of variant that also includes copy number neutral alterations such as balanced inversions and balanced translocations.

[0162] CNVs can account for genetic variation affecting a substantial proportion of the human genome, for example, known CNVs can cover over 15% of the human genome sequence (Estivill and Armengol, PLoS Genetics (2007)). CNVs can affect gene expression, phenotypic variation and adaptation by disrupting or impairing gene dosage, and can cause disease, for example, microdeletion and microduplication disorders, and can confer susceptibility to diseases and disorders. Updated information about the location, type, and size of known CNVs can be found in one or more databases, for example, the Database of Genomic Variants (See, MacDonald J R et al., Nucleic Acids Res., 42, D986-92 (2014), which currently contains data for over 500,000 CNVs (as of May, 2016).

[0163] Other types of sequence variants can be found in the human genome and can be associated with a disease or disorder, including but not limited to, microsatellites. Microsatellite markers are stable, polymorphic, easily analyzed, and can occur regularly throughout the genome, making them especially suitable for genetic analysis. A polymorphic microsatellite can comprise multiple small repeats of bases, for example, CA repeats, at a particular site wherein the number of repeat lengths varies in a population. In some embodiments, microsatellites, for example, variable number of tandem repeats (VNTRs), can be short segments of DNA that have one or more repeated sequences, for example, about 2 to 5 nucleotides long, that can occur in non-coding DNA. In some embodiments, changes in microsatellites can occur during genetic recombination of sexual reproduction, increasing or decreasing the number of repeats found at an allele, or changing allele length.

[0164] The genetic variations disclosed herein can be associated with a risk of developing LOAD or MCI in a subject. In some cases, the subject can have a decreased risk due to the absence of one or more genetic variations that disrupt or modulate a corresponding gene according to Tables 1 to 11 or 15-18. For example, the subject can have a decreased risk due to the absence of one or more genetic variations that disrupt or modulate a corresponding gene according to Tables 1-5. In some cases, the subject can have an increased risk due to the presence of one or more genetic variations that disrupt or modulate a corresponding gene according to Tables 1 to 11 or 15-18. For example, the subject can have an increased risk due to the presence of one or more genetic variations that disrupt or modulate a corresponding gene according to Tables 1-5. In some cases, the subject can have a decreased risk due to the presence of one or both variants in Table 12. In some cases, the subject can have an increased risk due to the absence of one or both variants in Table 12.

### Subjects

[0165] A “subject”, as used herein, can be an individual of any age or sex from whom a sample containing polynucleotides is obtained for analysis by one or more methods described herein so as to obtain polynucleic acid information; for example, a male or female adult, child, newborn, or fetus. In some embodiments, a subject can be any target of therapeutic administration. In some embodiments, a subject can be a test subject or a reference subject.

[0166] As used herein, a “cohort” can represent an ethnic group, a patient group, a particular age group, a group not associated with a particular condition (e.g., disease or disorder), a group associated with a particular condition (e.g., disease or disorder), a group of asymptomatic subjects, a group of symptomatic subjects, or a group or subgroup of subjects associated with a particular response to a treatment regimen or enrolled in a clinical trial. In some embodiments, a patient can be a subject afflicted with a condition (e.g., disease or disorder). In some embodiments, a patient can be a subject not afflicted with a condition (e.g., disease or disorder) and is considered apparently healthy, or a normal or control subject. In some embodiments, a subject can be a test subject, a patient or a candidate for a therapeutic, wherein genomic DNA from the subject, patient, or candidate is obtained for analysis by one or more methods of the present disclosure herein, so as to obtain genetic variation information of the subject, patient or candidate.

[0167] In some embodiments, the polynucleic acid sample can be obtained prenatally from a fetus or embryo or from the mother, for example, from fetal or embryonic cells in the maternal circulation. In some embodiments, the polynucleic acid sample can be obtained with the assistance of a health care provider, for example, to draw blood. In some embodiments, the polynucleic acid sample can be obtained without the assistance of a health care provider, for example, where the polynucleic acid sample is obtained non-invasively, such as a saliva sample, or a sample comprising buccal cells that is obtained using a buccal swab or brush, or a mouthwash sample.

[0168] The present disclosure also provides methods for assessing genetic variations in subjects who are members of a target population. Such a target population is in some embodiments a population or group of subjects at risk of developing the condition (e.g., disease or disorder), based on, for example, other genetic factors, biomarkers, biophysical parameters, diagnostic testing such as magnetic resonance imaging (MRI), family history of the condition, previous screening or medical history, or any combination thereof.

[0169] The genetic variations of the present disclosure found to be associated with a condition (e.g., disease or disorder) can show similar association in other human populations. Particular embodiments comprising subject human populations are thus also contemplated and within the scope of the disclosure. Such embodiments relate to human subjects that are from one or more human populations including, but not limited to, Caucasian, Ashkenazi Jewish, Sephardi Jewish, European, American, Eurasian, Asian, Central/South Asian, East Asian, Middle Eastern, African, Hispanic, Caribbean, and Oceanic populations. European populations include, but are not limited to, Swedish, Norwegian, Finnish, Russian, Danish, Icelandic, Irish, Celt, English, Scottish, Dutch, Belgian, French, German, Spanish, Portuguese, Italian, Polish, Bulgarian, Slavic, Serbian, Bosnian, Czech, Greek and Turkish populations. The ethnic contribution in subjects can also be determined by genetic analysis, for example, genetic analysis of ancestry can be carried out using unlinked microsatellite markers or single nucleotide polymorphisms (SNPs) such as those set out in Smith et al., (Smith M. W. et al., Am. J. Hum. Genet., 74:1001 (2004)).

[0170] Certain genetic variations can have different population frequencies in different populations, or are polymorphic in one population but not in another. The methods available and as thought herein can be applied to practice the present disclosure in any given human population. This can include assessment of genetic variations of the present disclosure, so as to identify those markers that give strongest association within the specific population. Thus, the at-risk variants of the present disclosure can reside on different haplotype background and in different frequencies in various human populations.

### Samples

[0171] Samples that are suitable for use in the methods described herein can be polynucleic acid samples from a subject. A “polynucleic acid sample” as used herein can include RNA or DNA, or a combination thereof. In another embodiment, a “polypeptide sample” (e.g., peptides or proteins, or fragments therefrom) can be used to ascertain information that an amino acid change has occurred, which is the result of a genetic variant. Polynucleic acids and polypeptides can be extracted from one or more samples including but not limited to, blood, saliva, urine, mucosal scrapings of the lining of the mouth, expectorant, serum, tears, skin, tissue, or hair. A polynucleic acid sample can be assayed for polynucleic acid information. “Polynucleic acid information,” as used herein, includes a polynucleic acid sequence itself, the presence/absence of genetic variation in the polynucleic acid sequence, a physical property which varies depending on the polynucleic acid sequence (e.g., Tm), and the amount of the polynucleic acid (e.g., number of mRNA copies). A “polynucleic acid” means any one of DNA, RNA, DNA including artificial nucleotides, or RNA including artificial nucleotides. As used herein, a “purified polynucleic acid” includes cDNAs, fragments of genomic polynucleic acids, polynucleic acids produced using the polymerase chain reaction (PCR), polynucleic acids formed by restriction enzyme treatment of genomic polynucleic acids, recombinant polynucleic acids, and chemically synthesized polynucleic acid molecules. A “recombinant” polynucleic acid molecule includes a polynucleic acid molecule made by an artificial combination of two otherwise separated segments of sequence, e.g., by chemical synthesis or by the manipulation of isolated segments of polynucleic acids by genetic engineering techniques. As used herein, a “polypeptide” includes proteins, fragments of proteins, and peptides, whether isolated from natural sources, produced by recombinant techniques, or chemically synthesized. A polypeptide may have one or more modifications, such as a post-translational modification (e.g., glycosylation, phosphorylation, etc.) or any other modification (e.g., pegylation, etc.). The polypeptide may contain one or more non-naturally-occurring amino acids (e.g., such as an amino acid with a side chain modification).

[0172] In some embodiments, the polynucleic acid sample can comprise cells or tissue, for example, cell lines. Exemplary cell types from which nucleic acids can be obtained using the methods described herein include, but are not limited to, the following: a blood cell such as a B lymphocyte, T lymphocyte, leukocyte, erythrocyte, macrophage, or neutrophil; a muscle cell such as a skeletal cell, smooth muscle cell or cardiac muscle cell; a germ cell, such as a sperm or egg; an epithelial cell; a connective tissue cell, such as an adipocyte, chondrocyte; fibroblast or osteoblast; a neuron; an astrocyte; a stromal cell; an organ specific cell, such as a kidney cell, pancreatic cell, liver cell, or a keratinocyte; a stem cell; or any cell that develops therefrom. A cell from which nucleic acids can be obtained can be a blood cell or a particular type of blood cell including, for example, a hematopoietic stem cell or a cell that arises from a hematopoietic stem cell such as a red blood cell, B lymphocyte, T lymphocyte, natural killer cell, neutrophil, basophil, eosinophil, monocyte, macrophage, or platelet. Generally, any type of stem cell can be used including, without limitation, an embryonic stem cell, adult stem cell, or pluripotent stem cell.

[0173] In some embodiments, a polynucleic acid sample can be processed for RNA or DNA isolation, for example, RNA or DNA in a cell or tissue sample can be separated from other components of the polynucleic acid sample. Cells can be harvested from a polynucleic acid sample using standard techniques, for example, by centrifuging a cell sample and resuspending the pelleted cells, for example, in a buffered solution, for example, phosphate-buffered saline (PBS). In some embodiments, after centrifuging the cell suspension to obtain a cell pellet, the cells can be lysed to extract DNA. In some embodiments, the nucleic acid sample can be concentrated and/or purified to isolate DNA. All nucleic acid samples obtained from a subject, including those subjected to any sort of further processing, are considered to be obtained from the subject. In some embodiments, standard techniques and kits known in the art can be used to extract RNA or DNA from a nucleic acid sample, including, for example, phenol extraction, a QIAAMP® Tissue Kit (Qiagen, Chatsworth, Calif.), a WIZARD® Genomic DNA purification kit (Promega), or a Qiagen Autopure method using Puregene chemistry, which can enable purification of highly stable DNA well-suited for archiving.

[0174] In some embodiments, determining the identity of an allele or determining copy number can, but need not, include obtaining a polynucleic acid sample comprising RNA and/or DNA from a subject, and/or assessing the identity, copy number, presence or absence of one or more genetic variations and their chromosomal locations within the genomic DNA (i.e. subject's genome) derived from the polynucleic acid sample.

[0175] The individual or organization that performs the determination need not actually carry out the physical analysis of a nucleic acid sample from a subject. In some embodiments, the methods can include using information obtained by analysis of the polynucleic acid sample by a third party. In some embodiments, the methods can include steps that occur at more than one site. For example, a polynucleic acid sample can be obtained from a subject at a first site, such as at a health care provider or at the subject's home in the case of a self-testing kit. The polynucleic acid sample can be analyzed at the same or a second site, for example, at a laboratory or other testing facility.

### Nucleic Acids

[0176] The nucleic acids and polypeptides described herein can be used in methods and kits of the present disclosure. In some embodiments, aptamers that specifically bind the nucleic acids and polypeptides described herein can be used in methods and kits of the present disclosure. As used herein, a nucleic acid can comprise a deoxyribonucleotide (DNA) or ribonucleotide (RNA), whether singular or in polymers, naturally occurring or non-naturally occurring, double-stranded or single-stranded, coding, for example a translated gene, or non-coding, for example a regulatory region, or any fragments, derivatives, mimetics or complements thereof. In some embodiments, nucleic acids can comprise oligonucleotides, nucleotides, polynucleotides, nucleic acid sequences, genomic sequences, complementary DNA (cDNA), antisense nucleic acids, DNA regions, probes, primers, genes, regulatory regions, introns, exons, open-reading frames, binding sites, target nucleic acids and allele-specific nucleic acids.

[0177] A “probe,” as used herein, includes a nucleic acid fragment for examining a nucleic acid in a specimen using the hybridization reaction based on the complementarity of nucleic acid.

[0178] A “hybrid” as used herein, includes a double strand formed between any one of the abovementioned nucleic acid, within the same type, or across different types, including DNA-DNA, DNA-RNA, RNA-RNA or the like.

[0179] “Isolated” nucleic acids, as used herein, are separated from nucleic acids that normally flank the gene or nucleotide sequence (as in genomic sequences) and/or has been completely or partially purified from other transcribed sequences (e.g., as in an RNA library). For example, isolated nucleic acids of the disclosure can be substantially isolated with respect to the complex cellular milieu in which it naturally occurs, or culture medium when produced by recombinant techniques, or chemical precursors or other chemicals when chemically synthesized. In some instances, the isolated material can form part of a composition, for example, a crude extract containing other substances, buffer system or reagent mix. In some embodiments, the material can be purified to essential homogeneity using methods known in the art, for example, by polyacrylamide gel electrophoresis (PAGE) or column chromatography (e.g., HPLC). With regard to genomic DNA (gDNA), the term “isolated” also can refer to nucleic acids that are separated from the chromosome with which the genomic DNA is naturally associated. For example, the isolated nucleic acid molecule can contain less than about 250 kb, 200 kb, 150 kb, 100 kb, 75 kb, 50 kb, 25 kb, 10 kb, 5 kb, 4 kb, 3 kb, 2kb, 1 kb, 0.5 kb or 0.1 kb of the nucleotides that flank the nucleic acid molecule in the gDNA of the cell from which the nucleic acid molecule is derived.

[0180] Nucleic acids can be fused to other coding or regulatory sequences can be considered isolated. For example, recombinant DNA contained in a vector is included in the definition of “isolated” as used herein. In some embodiments, isolated nucleic acids can include recombinant DNA molecules in heterologous host cells or heterologous organisms, as well as partially or substantially purified DNA molecules in solution. Isolated nucleic acids also encompass in vivo and in vitro RNA transcripts of the DNA molecules of the present disclosure. An isolated nucleic acid molecule or nucleotide sequence can be synthesized chemically or by recombinant means. Such isolated nucleotide sequences can be useful, for example, in the manufacture of the encoded polypeptide, as probes for isolating homologous sequences (e.g., from other mammalian species), for gene mapping (e.g., by in situ hybridization with chromosomes), or for detecting expression of the gene, in tissue (e.g., human tissue), such as by Northern blot analysis or other hybridization techniques disclosed herein. The disclosure also pertains to nucleic acid sequences that hybridize under high stringency hybridization conditions, such as for selective hybridization, to a nucleotide sequence described herein Such nucleic acid sequences can be detected and/or isolated by allele- or sequence-specific hybridization (e.g., under high stringency conditions). Stringency conditions and methods for nucleic acid hybridizations are well known to the skilled person (see, e.g., Current Protocols in Molecular Biology, Ausubel, F. et al., John Wiley & Sons, (1998), and Kraus, M. and Aaronson, S., Methods Enzymol., 200:546-556 (1991), the entire teachings of which are incorporated by reference herein.

[0181] Calculations of “identity” or “percent identity” between two or more nucleotide or amino acid sequences can be determined by aligning the sequences for optimal comparison purposes (e.g., gaps can be introduced in the sequence of a first sequence). The nucleotides at corresponding positions are then compared, and the percent identity between the two sequences is a function of the number of identical positions shared by the sequences (i.e. % identity=#of identical positions/total #of positions×100). For example, a position in the first sequence is occupied by the same nucleotide as the corresponding position in the second sequence, then the molecules are identical at that position. The percent identity between the two sequences is a function of the number of identical positions shared by the sequences, taking into account the number of gaps, and the length of each gap, which need to be introduced for optimal alignment of the two sequences.

[0182] In some embodiments, the length of a sequence aligned for comparison purposes is at least 30%, at least 40%, at least 50%, at least 60%, at least 70%, at least 80%, at least 90%, or at least 95% of the length of the reference sequence. The actual comparison of the two sequences can be accomplished by well-known methods, for example, using a mathematical algorithm. A non-limiting example of such a mathematical algorithm is described in Karlin, S. and Altschul, S., Proc. Natl. Acad. Sci. USA, 90-5873-5877 (1993). Such an algorithm is incorporated into the NBLAST and XBLAST programs (version 2.0), as described in Altschul, S. et al., Nucleic Acids Res., 25:3389-3402 (1997). When utilizing BLAST and Gapped BLAST programs, any relevant parameters of the respective programs (e.g., NBLAST) can be used. For example, parameters for sequence comparison can be set at score=100, word length=12, or can be varied (e.g., W=5 or W=20). Other examples include the algorithm of Myers and Miller, CABIOS (1989), ADVANCE, ADAM, BLAT, and FASTA. In some embodiments, the percent identity between two amino acid sequences can be accomplished using, for example, the GAP program in the GCG software package (Accelrys, Cambridge, UK).

[0183] “Probes” or “primers” can be oligonucleotides that hybridize in a base-specific manner to a complementary strand of a nucleic acid molecule. Probes can include primers, which can be a single-stranded oligonucleotide probe that can act as a point of initiation of template-directed DNA synthesis using methods including but not limited to, polymerase chain reaction (PCR) and ligase chain reaction (LCR) for amplification of a target sequence. Oligonucleotides, as described herein, can include segments or fragments of nucleic acid sequences, or their complements. In some embodiments, DNA segments can be between 5 and 10,000 contiguous bases, and can range from 5, 10, 12, 15, 20, or 25 nucleotides to 10, 15, 20, 25, 30, 40, 50, 100, 200, 500, 1000 or 10,000 nucleotides. In addition to DNA and RNA, probes and primers can include polypeptide nucleic acids (PNA), as described in Nielsen, P. et al., Science 254: 1497 1500 (1991). A probe or primer can comprise a region of nucleotide sequence that hybridizes to at least about 15, typically about 20-25, and in certain embodiments about 40, 50, 60 or 75, consecutive nucleotides of a nucleic acid molecule.

[0184] The present disclosure also provides isolated nucleic acids, for example, probes or primers, that contain a fragment or portion that can selectively hybridize to a nucleic acid that comprises, or consists of, a nucleotide sequence, wherein the nucleotide sequence can comprise at least one polymorphism or polymorphic allele contained in the genetic variations described herein or the wild-type nucleotide that is located at the same position, or the complements thereof. In some embodiments, the probe or primer can be at least 70% identical, at least 80% identical, at least 85% identical, at least 90% identical, or at least 95% identical, to the contiguous nucleotide sequence or to the complement of the contiguous nucleotide sequence.

[0185] In some embodiments, a nucleic acid probe can be an oligonucleotide capable of hybridizing with a complementary region of a gene associated with a condition (e.g., LOAD) containing a genetic variation described herein. The nucleic acid fragments of the disclosure can be used as probes or primers in assays such as those described herein.

[0186] The nucleic acids of the disclosure, such as those described above, can be identified and isolated using standard molecular biology techniques well known to the skilled person. In some embodiments, DNA can be amplified and/or can be labeled (e.g., radiolabeled, fluorescently labeled) and used as a probe for screening, for example, a cDNA library derived from an organism. cDNA can be derived from mRNA and can be contained in a suitable vector. For example, corresponding clones can be isolated, DNA obtained fallowing in vivo excision, and the cloned insert can be sequenced in either or both orientations by art-recognized methods to identify the correct reading frame encoding a polypeptide of the appropriate molecular weight. Using these or similar methods, the polypeptide and the DNA encoding the polypeptide can be isolated, sequenced and further characterized.

[0187] In some embodiments, nucleic acid can comprise one or more polymorphisms, variations, or mutations, for example, single nucleotide polymorphisms (SNPs), single nucleotide variations (SNVs), copy number variations (CNVs), for example, insertions, deletions, inversions, and translocations. In some embodiments, nucleic acids can comprise analogs, for example, phosphorothioates, phosphoramidates, methyl phosphonate, chiralmethyl phosphonates, 2-0-methyl ribonucleotides, or modified nucleic acids, for example, modified backbone residues or linkages, or nucleic acids combined with carbohydrates, lipids, polypeptide or other materials, or peptide nucleic acids (PNAs), for example, chromatin, ribosomes, and transcriptosomes. In some embodiments nucleic acids can comprise nucleic acids in various structures, for example, A DNA, B DNA, Z-form DNA, siRNA, tRNA, and ribozymes. In some embodiments, the nucleic acid may be naturally or non-naturally polymorphic, for example, having one or more sequence differences, for example, additions, deletions and/or substitutions, as compared to a reference sequence. In some embodiments, a reference sequence can be based on publicly available information, for example, the U.C. Santa Cruz Human Genome Browser Gateway (genome.ucsc.edu/cgi-bin/hgGateway) or the NCBI website (ncbi.nlm.nih.gov). In some embodiments, a reference sequence can be determined by a practitioner of the present disclosure using methods well known in the art, for example, by sequencing a reference nucleic acid.

[0188] In some embodiments, a probe can hybridize to an allele, SNP, SNV, or CNV as described herein. In some embodiments, the probe can bind to another marker sequence associated with LOAD as described herein.

[0189] One of skill in the art would know how to design a probe so that sequence specific hybridization can occur only if a particular allele is present in a genomic sequence from a test nucleic acid sample. The disclosure can also be reduced to practice using any convenient genotyping method, including commercially available technologies and methods for genotyping particular genetic variations

[0190] Control probes can also be used, for example, a probe that binds a less variable sequence, for example, a repetitive DNA associated with a centromere of a chromosome, can be used as a control. In some embodiments, probes can be obtained from commercial sources. In some embodiments, probes can be synthesized, for example, chemically or in vitro, or made from chromosomal or genomic DNA through standard techniques. In some embodiments sources of DNA that can be used include genomic DNA, cloned DNA sequences, somatic cell hybrids that contain one, or a part of one, human chromosome along with the normal chromosome complement of the host, and chromosomes purified by flow cytometry or microdissection. The region of interest can be isolated through cloning, or by site-specific amplification using PCR.

[0191] One or more nucleic acids for example, a probe or primer, can also be labeled, for example, by direct labeling, to comprise a detectable label. A detectable label can comprise any label capable of detection by a physical, chemical, or a biological process for example, a radioactive label, such as ³²P or ³H, a fluorescent label, such as FITC, a chromophore label, an affinity-ligand label, an enzyme label, such as alkaline phosphatase, horseradish peroxidase, or I2 galactosidase, an enzyme cofactor label, a hapten conjugate label, such as digoxigenin or dinitrophenyl, a Raman signal generating label, a magnetic label, a spin label, an epitope label, such as the FLAG or HA epitope, a luminescent label, a heavy atom label, a nanoparticle label, an electrochemical label, a light scattering label, a spherical shell label, semiconductor nanocrystal label, such as quantum dots (described in U.S. Pat. No. 6,207,392), and probes labeled with any other signal generating label known to those of skill in the art, wherein a label can allow the probe to be visualized with or without a secondary detection molecule. A nucleotide can be directly incorporated into a probe with standard techniques, for example, nick translation, random priming, and PCR labeling. A “signal,” as used herein, include a signal suitably detectable and measurable by appropriate means, including fluorescence, radioactivity, chemiluminescence, and the like.

[0192] Non-limiting examples of label moieties useful for detection include, without limitation, suitable enzymes such as horseradish peroxidase, alkaline phosphatase, beta-galactosidase, or acetylcholinesterase; members of a binding pair that are capable of forming complexes such as streptavidin/biotin, avidin/biotin or an antigen/antibody complex including, for example, rabbit IgG and anti-rabbit IgG; fluorophores such as umbelliferone, fluorescein, fluorescein isothiocyanate, rhodamine, tetramethyl rhodamine, eosin, green fluorescent protein, erythrosin, coumarin, methyl coumarin, pyrene, malachite green, stilbene, lucifer yellow, Cascade Blue, Texas Red, dichlorotriazinylamine fluorescein, dansyl chloride, phycoerythrin, fluorescent lanthanide complexes such as those including Europium and Terbium, cyanine dye family members, such as Cy3 and Cy5, molecular beacons and fluorescent derivatives thereof, as well as others known in the art as described, for example, in Principles of Fluorescence Spectroscopy, Joseph R. Lakowicz (Editor), Plenum Pub Corp, 2nd edition (July 1999) and the 6th Edition of the Molecular Probes Handbook by Richard P. Hoagland; a luminescent material such as luminol; light scattering or plasmon resonant materials such as gold or silver particles or quantum dots; or radioactive material include ¹⁴C, ¹²³I, ¹²⁴I, ¹²⁵I, Tc99m, ³²P, ³³P, ³⁵S or ³H.

[0193] Other labels can also be used in the methods of the present disclosure, for example, backbone labels. Backbone labels comprise nucleic acid stains that bind nucleic acids in a sequence independent manner. Non-limiting examples include intercalating dyes such as phenanthridines and acridines (e.g., ethidium bromide, propidium iodide, hexidium iodide, dihydroethidium, ethidium homodimer-1 and -2, ethidium monoazide, and ACMA); some minor grove binders such as indoles and imidazoles (e.g., Hoechst 33258, Hoechst 33342, Hoechst 34580 and DAPI); and miscellaneous nucleic acid stains such as acridine orange (also capable of intercalating), 7-AAD, actinomycin D, LDS75 1, and hydroxystilbamidine. All of the aforementioned nucleic acid stains are commercially available from suppliers such as Molecular Probes, Inc. Still other examples of nucleic acid stains include the following dyes from Molecular Probes: cyanine dyes such as SYTOX Blue, SYTOX Green, SYTOX Orange, POPO-1, POPO-3, YOYO-1, YOYO-3, TOTO-1, TOTO-3, JOJO-1, LOLO-1, BOBO-1, BOBO-3, PO-PRO-1, PO-PRO-3, BO-PRO-1, BO-PRO-3, TO-PRO-1, TO-PRO-3, TO-PRO-S, JO-PRO-1, LO-PRO-1, YO-PRO-1, YO-PRO-3, PicoGreen, OliGreen, RiboGreen, SYBR Gold, SYBR Green I, SYBR Green II, SYBR DX, SYTO-40, -41, -42, -43, 44, -45 (blue), SYTO-13, -16, -24, -21, -23, -12, -11, -20, -22, -15, -14, -25 (green), SYTO-81, -80, -82, 83, -84, -85 (orange), SYTO-64, -17, -59, -61, -62, -60, -63 (red).

[0194] In some embodiments, fluorophores of different colors can be chosen, for example, 7-amino-4-methylcoumarin-3-acetic acid (AMCA), 5-(and-6)-carboxy-X-rhodamine, lissamine rhodamine B, 5-(and-6)-carboxyfluorescein, fluorescein-5-isothiocyanate (FITC), 7-diethylaminocoumarin-3-carboxylic acid, tetramethylrhodamine-5-(and-6)—isothiocyanate, 5-(and-6)-carboxytetramethylrhodamine, 7-hydroxycoumarin-3-carboxylic acid, 6-[fluorescein 5-(and-6)-carboxamido]hexanoic acid, N-(4,4-difluoro-5,7-dimethyl-4-bora-3a,4a diaza-3-indacenepropionic acid, eosin-5-isothiocyanate, erythrosin-5-isothiocyanate, TRITC, rhodamine, tetramethylrhodamine, R-phycoerythrin, Cy-3, Cy-5, Cy-7, Texas Red, Phar-Red, allophycocyanin (APC), and CASCADE™ blue acetylazide, such that each probe in or not in a set can be distinctly visualized. In some embodiments, fluorescently labeled probes can be viewed with a fluorescence microscope and an appropriate filter for each fluorophore, or by using dual or triple band-pass filter sets to observe multiple fluorophores. In some embodiments, techniques such as flow cytometry can be used to examine the hybridization pattern of the probes.

[0195] In other embodiments, the probes can be indirectly labeled, for example, with biotin or digoxygenin, or labeled with radioactive isotopes such as ³²P and/or ³H. As a non-limiting example, a probe indirectly labeled with biotin can be detected by avidin conjugated to a detectable marker. For example, avidin can be conjugated to an enzymatic marker such as alkaline phosphatase or horseradish peroxidase. In some embodiments, enzymatic markers can be detected using colorimetric reactions using a substrate and/or a catalyst for the enzyme. In some embodiments, catalysts for alkaline phosphatase can be used, for example, 5-bromo-4-chloro-3-indolylphosphate and nitro blue tetrazolium. In some embodiments, a catalyst can be used for horseradish peroxidase, for example, diaminobenzoate.

### Methods of Screening

[0196] As used herein, screening a subject comprises diagnosing or determining, theranosing, or determining the susceptibility to developing (prognosing) a condition, for example, LOAD. In particular embodiments, the disclosure is a method of determining a presence of, or a susceptibility to, LOAD, by detecting at least one genetic variation in a sample from a subject as described herein. In some embodiments, detection of particular alleles, markers, variations, or haplotypes is indicative of a presence or susceptibility to a condition (e.g., LOAD).

[0197] While means for screening LOAD using cognitive functions exist, LOAD risk is not adequately assessed by the neuropsychologic tests alone. Thus there exists a need for an improved screening test for assessing the risk of developing LOAD. Described herein are methods of screening an individual for a risk of developing LOAD, including but not limited to, determining the identity and location of genetic variations, such as variations in nucleotide sequence and copy number, and the presence or absence of alleles or genotypes in one or more samples from one or more subjects using any of the methods described herein. In some embodiments, determining an association to having or developing LOAD can be performed by detecting particular variations that appear more frequently in test subjects compared to reference subjects and analyzing the molecular and physiological pathways these variations can affect.

[0198] Within any given population, there can be an absolute susceptibility of developing a disease or trait, defined as the chance of a person developing the specific disease or trait over a specified time-period. Susceptibility (e.g., being at-risk) is typically measured by looking at very large numbers of people, rather than at a particular individual. As described herein, certain copy number variations (genetic variations) and/or single nucleotide variations are found to be useful for susceptibility assessment of LOAD. Susceptibility assessment can involve detecting particular genetic variations in the genome of individuals undergoing assessment. Particular genetic variations are found more frequently in individuals with LOAD, than in individuals without LOAD. Therefore, these genetic variations have predictive value for detecting LOAD, or a susceptibility to LOAD, in an individual. Without intending to be limited by theory, it is believed that the genetic variations described herein to be associated with susceptibility of LOAD represent functional variants predisposing to the disease. In some embodiments, a genetic variation can confer a susceptibility of the condition, for example carriers of the genetic variation are at a different risk of the condition than non-carriers. In some embodiments, the presence of a genetic variation is indicative of increased susceptibility to LOAD.

[0199] In some embodiments, screening can be performed using any of the methods disclosed, alone or in combination. In some embodiments, screening can be performed using Polymerase Chain Reaction (PCR). In some embodiments screening can be performed using Array Comparative Genomic Hybridization (aCGH) to detect CNVs. In another preferred embodiment screening can be performed using whole exome sequencing (WES) to detect SNVs, indels, and in some cases CNVs using appropriate analysis algorithms. In another preferred embodiment screening is performed using high-throughput (also known as next generation) whole genome sequencing (WGS) methods and appropriate algorithms to detect all or nearly all genetic variations present in a genomic DNA sample. In some embodiments, the genetic variation information as it relates to the current disclosure can be used in conjunction with any of the above mentioned symptomatic screening tests to screen a subject for LOAD, for example, using a combination of aCGH and/or sequencing with a neuropsychologic test such as cognitive function test, memory analysis, patient history.

[0200] In some embodiments, information from any of the above screening methods (e.g., specific symptoms, scoring matrix, or genetic variation data) can be used to define a subject as a test subject or reference subject. In some embodiments, information from any of the above screening methods can be used to associate a subject with a test or reference population, for example, a subject in a population.

[0201] In one embodiment, an association with LOAD can be determined by the statistical likelihood of the presence of a genetic variation in a subject with LOAD, for example, an unrelated individual or a first or second-degree relation of the subject. In some embodiments, an association with LOAD can be decided by determining the statistical likelihood of the absence of a genetic variation in an unaffected reference subject, for example, an unrelated individual or a first or second-degree relation of the subject. The methods described herein can include obtaining and analyzing a nucleic acid sample from one or more suitable reference subjects.

[0202] In the present context, the term screening comprises diagnosis, prognosis, and theranosis. Screening can refer to any available screening method, including those mentioned herein. As used herein, susceptibility can be proneness of a subject towards the development of LOAD, or towards being less able to resist LOAD than one or more control subjects. In some embodiments, susceptibility can encompass increased susceptibility. For example, particular nucleic acid variations of the disclosure as described herein can be characteristic of increased susceptibility to LOAD. In some embodiments, particular nucleic acid variations can confer decreased susceptibility, for example particular nucleic variations of the disclosure as described herein can be characteristic of decreased susceptibility to development of LOAD.

[0203] As described herein, a genetic variation predictive of susceptibility to or presence of LOAD can be one where the particular genetic variation is more frequently present in a group of subjects with the condition (affected), compared to the frequency of its presence in a reference group (control), such that the presence of the genetic variation is indicative of susceptibility to or presence of LOAD. In some embodiments, the reference group can be a population nucleic acid sample, for example, a random nucleic acid sample from the general population or a mixture of two or more nucleic acid samples from a population. In some embodiments, disease-free controls can be characterized by the absence of one or more specific disease-associated symptoms, for example, individuals who have not experienced symptoms associated with LOAD. In some embodiments, the disease-free control group is characterized by the absence of one or more disease-specific risk factors, for example, at least one genetic and/or environmental risk factor. In some embodiments, a reference sequence can be referred to for a particular site of genetic variation. In some embodiments, a reference allele can be a wild-type allele and can be chosen as either the first sequenced allele or as the allele from a control individual. In some embodiments, one or more reference subjects can be characteristically matched with one or more affected subjects, for example, with matched aged, gender or ethnicity.

[0204] A person skilled in the art can appreciate that for genetic variations with two or more alleles present in the population being studied, and wherein one allele can be found in increased frequency in a group of individuals with LOAD in the population, compared with controls, the other allele of the marker can be found in decreased frequency in the group of individuals with the trait or disease, compared with controls. In such a case, one allele of the marker, for example, the allele found in increased frequency in individuals with LOAD, can be the at-risk allele, while the other allele(s) can be a neutral or protective allele.

[0205] A genetic variant associated with LOAD can be used to predict the susceptibility of the disease for a given genotype. For any genetic variation, there can be one or more possible genotypes, for example, homozygote for the at-risk variant (e.g., in autosomal recessive disorders), heterozygote, and non-carrier of the at-risk variant. Autosomal recessive disorders can also result from two distinct genetic variants impacting the same gene such that the individual is a compound heterozygote (e.g., the maternal allele contains a different mutation than the paternal allele). Compound heterozygosity may result from two different SNVs, two different CNVs, an SNV and a CNV, or any combination of two different genetic variants but each present on a different allele for the gene. For X-linked genes, males who possess one copy of a variant-containing gene may be affected, while carrier females, who also possess a wild-type gene, may remain unaffected. In some embodiments, susceptibility associated with variants at multiple loci can be used to estimate overall susceptibility. For multiple genetic variants, there can be k (k=3\hat{ }n*2\hat{ }P) possible genotypes; wherein n can be the number of autosomal loci and p can be the number of gonosomal (sex chromosomal) loci. Overall susceptibility assessment calculations can assume that the relative susceptibilities of different genetic variants multiply, for example, the overall susceptibility associated with a particular genotype combination can be the product of the susceptibility values for the genotype at each locus. If the susceptibility presented is the relative susceptibility for a person, or a specific genotype for a person, compared to a reference population, then the combined susceptibility can be the product of the locus specific susceptibility values and can correspond to an overall susceptibility estimate compared with a population. If the susceptibility for a person is based on a comparison to non-carriers of the at-risk allele, then the combined susceptibility can correspond to an estimate that compares the person with a given combination of genotypes at all loci to a group of individuals who do not carry at-risk variants at any of those loci. The group of non-carriers of any at-risk variant can have the lowest estimated susceptibility and can have a combined susceptibility, compared with itself, for example, non-carriers, of 1.0, but can have an overall susceptibility, compared with the population, of less than 1.0.

[0206] Overall risk for multiple risk variants can be performed using standard methodology. Genetic variations described herein can form the basis of risk analysis that combines other genetic variations known to increase risk of LOAD, or other genetic risk variants for LOAD. In certain embodiments of the disclosure, a plurality of variants (genetic variations, variant alleles, and/or haplotypes) can be used for overall risk assessment. These variants are in some embodiments selected from the genetic variations as disclosed herein. Other embodiments include the use of the variants of the present disclosure in combination with other variants known to be useful for screening a susceptibility to LOAD. In such embodiments, the genotype status of a plurality of genetic variations, markers and/or haplotypes is determined in an individual, and the status of the individual compared with the population frequency of the associated variants, or the frequency of the variants in clinically healthy subjects, such as age-matched and sex-matched subjects.

[0207] Methods such as the use of available algorithms and software can be used to identify, or call, significant genetic variations, including but not limited to, algorithms of DNA Analytics or DNA copy, iPattern and/or QuantiSNP. In some embodiments, a threshold log ratio value can be used to determine losses and gains. For example, using DNA Analytics, a log₂ ratio cutoff of ≥0.5 and ≤0.5 to classify CNV gains and losses respectively can be used. For example, using DNA Analytics, a log₂ ratio cutoff of ≥0.25 and ≤0.25 to classify CNV gains and losses respectively can be used. As a further example, using DNAcopy, a log₂ ratio cutoff of ≥0.35 and ≤0.35 to classify CNV gains and losses respectively can be used. For example, an Aberration Detection Module 2 (ADM2) algorithm, such as that of DNA Analytics 4.0.85 can be used to identify, or call, significant genetic variations. In some embodiments, two or more algorithms can be used to identify, or call, significant genetic variations. For example, 2, 3, 4, 5, 6, 7, 8, 9, or 10 or more algorithms can be used to identify, or call, significant genetic variations. In another embodiment, the log 2 ratio of one or more individual probes on a microarray can be used to identify significant genetic variations, such as the presence of homozygously deleted regions in a subject's genome. In some embodiments, significant genetic variations can be CNVs.

[0208] CNVs detected by two or more algorithms can be defined as stringent and can be utilized for further analyses. In some embodiments, the information and calls from two or more of the methods described herein can be compared to each other to identify significant genetic variations more or less stringently. For example, CNV calls generated by two or more of DNA Analytics, Aberration Detection Module 2 (ADM2) algorithms, and DNAcopy algorithms can be defined as stringent CNVs. In some embodiments significant or stringent genetic variations can be tagged as identified or called if it can be found to have a minimal reciprocal overlap to a genetic variation detected by one or more platforms and/or methods described herein. For example, a minimum of 50% reciprocal overlap can be used to tag the CNVs as identified or called. For example, significant or stringent genetic variations can be tagged as identified or called if it can be found to have a reciprocal overlap of more than about 50%, 55% 60%, 65%, 70%, 75%, 80%, 85%, 90%, or 95%, 99%, or equal to 100%, to a genetic variation detected by one or more platforms and/or methods described herein. For example, significant or stringent genetic variations can be tagged as identified or called if it can be found to have a reciprocal overlap of more than about 50% reciprocal overlap to a genetic variation detected by one or more platforms and/or methods described herein. In another embodiment, genetic variations can be detected from the log 2 ratio values calculated for individual probes present on an aCGH microarray via a statistical comparison of the probe's log 2 ratio value in a cohort of subjects with LOAD to the probe's log 2 ratio value in a cohort of subjects without LOAD.

[0209] In some embodiments, a threshold log ratio value can be used to determine losses and gains. A log ratio value can be any log ratio value; for example, a log ratio value can be a log 2 ratio or a log 10 ratio. In some embodiments, a CNV segment whose median log 2 ratio is less than or equal to a log 2 ratio threshold value can be classified as a loss. For example, any segment whose median log 2 ratio is less than or equal to −0.1, −0.11, −0.12, −0.13, −0.14, −0.15, −0.16, −0.17, −0.18, −0.19, −0.2, −0.21, −0.22, −0.23, −0.24, −0.25, 0.26, −0.27, −0.28, −0.29, −0.3, −0.31, −0.32, −0.33, −0.34, −0.35, −0.36, −0.37, −0.38, −0.39, −0.4, −0.41, −0.42, −0.43, −0.44, −0.45, −0.46, −0.47, −0.48, −0.49, −0.5, −0.55, −0.6, −0.65, −0.7, −0.75, −0.8, −0.85, −0.9, −0.95, −1, −1.1, −1.2, −1.3, −1.4, −1.5, −1.6, −1.7, −1.8, −1.9, −2, −2.1, −2.2, −2.3, −2.4, −2.5, −2.6, −2.7, −2.8, −2.9, −3, −3.1, 3.2, −3.3, −3.4, −3.5, −3.6, −3.7, −3.8, −3.9, −4, −4.1, −4.2, −4.3, −4.4, −4.5, −4.6, −4.7, −4.8, −4.9, −5, −5.5, −6, −6.5, −7, −7.5, −8, −8.5, −9, −9.5, −10, −11, −12, −13, −14, −15, −16, −17, −18, −19, −20 or less, can be classified as a loss.

[0210] In some embodiments, one algorithm can be used to call or identify significant genetic variations, wherein any segment whose median log 2 ratio was less than or equal to −0.1, −0.11, −0.12, −0.13, −0.14, 0.15, −0.16, −0.17, −0.18, −0.19, −0.2, −0.21, −0.22, −0.23, −0.24, −0.25, −0.26, −0.27, −0.28, −0.29, −0.3, −0.31, −0.32, −0.33, −0.34, −0.35, −0.36, −0.37, −0.38, −0.39, −0.4, −0.41, −0.42, −0.43, −0.44, −0.45, −0.46, −0.47, −0.48, −0.49, −0.5, −0.55, −0.6, −0.65, −0.7, −0.75, −0.8, −0.85, −0.9, −0.95, −1, −1.1, −1.2, −1.3, −1.4, −1.5, −1.6, −1.7, 1.8, −1.9, −2, −2.1, −2.2, −2.3, −2.4, −2.5, −2.6, −2.7, −2.8, −2.9, −3, −3.1, −3.2, −3.3, −3.4, −3.5, −3.6, −3.7, −3.8, 3.9, −4, −4.1, −4.2, −4.3, −4.4, −4.5, −4.6, −4.7, −4.8, −4.9, −5, −5.5, −6, −6.5, −7, −7.5, −8, −8.5, −9, −9.5, −10, −11, −12, −13, −14, −15, −16, −17, −18, −19, −20 or less, can be classified as a loss. For example, any CNV segment whose median log 2 ratio is less than −0.35 as determined by DNAcopy can be classified as a loss. For example, losses can be determined according to a threshold log 2 ratio, which can be set at −0.35. In another embodiment, losses can be determined according to a threshold log 2 ratio, which can be set at −0.5.

[0211] In some embodiments, two algorithms can be used to call or identify significant genetic variations, wherein any segment whose median log 2 ratio is less than or equal to −0.1, −0.11, −0.12, −0.13, −0.14, −0.15, −0.16, −0.17, −0.18, −0.19, −0.2, −0.21, −0.22, −0.23, −0.24, −0.25, −0.26, −0.27, −0.28, −0.29, −0.3, −0.31, −0.32, −0.33, −0.34, −0.35, −0.36, −0.37, −0.38, −0.39, −0.4, −0.41, −0.42, −0.43, −0.44, −0.45, −0.46, −0.47, −0.48, −0.49, −0.5, −0.55, −0.6, −0.65, −0.7, −0.75, −0.8, −0.85, −0.9, −0.95, −1, −1.1, −1.2, −1.3, −1.4, −1.5, −1.6, −1.7, −1.8, 1.9, −2, −2.1, −2.2, −2.3, −2.4, −2.5, −2.6, −2.7, −2.8, −2.9, −3, −3.1, −3.2, −3.3, −3.4, −3.5, −3.6, −3.7, −3.8, −3.9, 4, −4.1, −4.2, −4.3, −4.4, −4.5, −4.6, −4.7, −4.8, −4.9, −5, −5.5, −6, −6.5, −7, −7.5, −8, −8.5, −9, −9.5, −10, −11, −12, 13, −14, −15, −16, −17, −18, −19, −20 or less, as determined by one algorithm, and wherein any segment whose median log 2 ratio is less than or equal to −0.1, −0.11, −0.12, −0.13, −0.14, −0.15, −0.16, −0.17, −0.18, −0.19, 0.2, −0.21, −0.22, −0.23, −0.24, −0.25, −0.26, −0.27, −0.28, −0.29, −0.3, −0.31, −0.32, −0.33, −0.34, −0.35, −0.36, −0.37, −0.38, −0.39, −0.4, −0.41, −0.42, −0.43, −0.44, −0.45, −0.46, −0.47, −0.48, −0.49, −0.5, −0.55, −0.6, −0.65, 0.7, −0.75, −0.8, −0.85, −0.9, −0.95, −1, −1.1, −1.2, −1.3, −1.4, −1.5, −1.6, −1.7, −1.8, −1.9, −2, −2.1, −2.2, −2.3, −2.4, −2.5, −2.6, −2.7, −2.8, −2.9, −3, −3.1, −3.2, −3.3, −3.4, −3.5, −3.6, −3.7, −3.8, −3.9, −4, −4.1, −4.2, −4.3, −4.4, 4.5, −4.6, −4.7, −4.8, −4.9, −5, −5.5, −6, −6.5, −7, −7.5, −8, −8.5, −9, −9.5, −10, −11, −12, −13, −14, −15, −16, −17, 18, −19, −20, or less, as determined by the other algorithm can be classified as a loss. For example, CNV calling can comprise using the Aberration Detection Module 2 (ADM2) algorithm and the DNAcopy algorithm, wherein losses can be determined according to a two threshold log 2 ratios, wherein the Aberration Detection Module 2 (ADM2) algorithm log 2 ratio can be −0.25 and the DNAcopy algorithm log 2 ratio can be −0.41.

[0212] In some embodiments, the use of two algorithms to call or identify significant genetic variations can be a stringent method. In some embodiments, the use of two algorithms to call or identify significant genetic variations can be a more stringent method compared to the use of one algorithm to call or identify significant genetic variations.

[0213] In some embodiments, any CNV segment whose median log 2 ratio is greater than a log 2 ratio threshold value can be classified as a gain. For example, any segment whose median log 2 ratio is greater than 0.1, 0.11, 0.12, 0.13, 0.14, 0.15, 0.16, 0.17, 0.18, 0.19, 0.2, 0.21, 0.22, 0.23, 0.24, 0.25, 0.26, 0.27, 0.28, 0.29, 0.3, 0.31, 0.32, 0.33, 0.34, 0.35, 0.36, 0.37, 0.38, 0.39, 0.4, 0.41, 0.42, 0.43, 0.44, 0.45, 0.46, 0.47, 0.48, 0.49, 0.5, 0.55, 0.6, 0.65, 0.7, 0.75, 0.8, 0.85, 0.9, 0.95, 1, 1.1, 1.2, 1.3, 1.4, 1.5, 1.6, 1.7, 1.8, 1.9, 2, 2.1, 2.2, 2.3, 2.4, 2.5, 2.6, 2.7, 2.8, 2.9, 3, or more can be classified as a gain.

[0214] In some embodiments, one algorithm can be used to call or identify significant genetic variations, wherein any segment whose median log 2 ratio is greater than or equal to 0.1, 0.11, 0.12, 0.13, 0.14, 0.15, 0.16, 0.17, 0.18, 0.19, 0.2, 0.21, 0.22, 0.23, 0.24, 0.25, 0.26, 0.27, 0.28, 0.29, 0.3, 0.31, 0.32, 0.33, 0.34, 0.35, 0.36, 0.37, 0.38, 0.39, 0.4, 0.41, 0.42, 0.43, 0.44, 0.45, 0.46, 0.47, 0.48, 0.49, 0.5, 0.55, 0.6, 0.65, 0.7, 0.75, 0.8, 0.85, 0.9, 0.95, 1, 1.1, 1.2, 1.3, 1.4, 1.5, 1.6, 1.7, 1.8, 1.9, 2, 2.1, 2.2, 2.3, 2.4, 2.5, 2.6, 2.7, 2.8, 2.9, 3, or more can be classified as a gain. For example, any CNV segment whose median log 2 ratio is greater than 0.35 as determined by DNAcopy can be classified as a gain. For example, gains can be determined according to a threshold log 2 ratio, which can be set at 0.35. In another embodiment, gains can be determined according to a threshold log 2 ratio, which can be set at 0.5.

[0215] In some embodiments, two algorithms can be used to call or identify significant genetic variations, wherein any segment whose median log 2 ratio is greater than or equal to 0.1, 0.11, 0.12, 0.13, 0.14, 0.15, 0.16, 0.17, 0.18, 0.19, 0.2, 0.21, 0.22, 0.23, 0.24, 0.25, 0.26, 0.27, 0.28, 0.29, 0.3, 0.31, 0.32, 0.33, 0.34, 0.35, 0.36, 0.37, 0.38, 0.39, 0.4, 0.41, 0.42, 0.43, 0.44, 0.45, 0.46, 0.47, 0.48, 0.49, 0.5, 0.55, 0.6, 0.65, 0.7, 0.75, 0.8, 0.85, 0.9, 0.95, 1, 1.1, 1.2, 1.3, 1.4, 1.5, 1.6, 1.7, 1.8, 1.9, 2, 2.1, 2.2, 2.3, 2.4, 2.5, 2.6, 2.7, 2.8, 2.9, 3 or more, as determined by one algorithm, and wherein any segment whose median log 2 ratio is greater than or equal to 0.1, 0.11, 0.12, 0.13, 0.14, 0.15, 0.16, 0.17, 0.18, 0.19, 0.2, 0.21, 0.22, 0.23, 0.24, 0.25, 0.26, 0.27, 0.28, 0.29, 0.3, 0.31, 0.32, 0.33, 0.34, 0.35, 0.36, 0.37, 0.38, 0.39, 0.4, 0.41, 0.42, 0.43, 0.44, 0.45, 0.46, 0.47, 0.48, 0.49, or 0.5, 0.55, 0.6, 0.65, 0.7, 0.75, 0.8, 0.85, 0.9, 0.95, 1, 1.1, 1.2, 1.3, 1.4, 1.5, 1.6, 1.7, 1.8, 1.9, 2, 2.1, 2.2, 2.3, 2.4, 2.5, 2.6, 2.7, 2.8, 2.9, 3, or more, as determined by the other algorithm the can be classified as a gain. For example, CNV calling can comprise using the Aberration Detection Module 2 (ADM2) algorithm and the DNAcopy algorithm, wherein gains can be determined according to a two threshold log 2 ratios, wherein the Aberration Detection Module 2 (ADM2) algorithm log 2 ratio can be 0.25 and the DNAcopy algorithm log 2 ratio can be 0.32.

[0216] Any CNV segment whose absolute (median log-ratio/mad) value is less than 2 can be excluded (not identified as a significant genetic variation). For example, any CNV segment whose absolute (median log-ratio/mad) value is less than 2, 1.9, 1.8, 1.7, 1.6, 1.5, 1.4, 1.3, 1.2, 1.1, 1, 0.9, 0.8, 0.7, 0.6, or 0.5 or less can be excluded.

[0217] In some embodiments, multivariate analyses or joint risk analyses, including the use of multiplicative model for overall risk assessment, can subsequently be used to determine the overall risk conferred based on the genotype status at the multiple loci. Use of a multiplicative model, for example, assuming that the risk of individual risk variants multiply to establish the overall effect, allows fora straight forward calculation of the overall risk for multiple markers. The multiplicative model is a parsimonious model that usually fits the data of complex traits reasonably well. Deviations from multiplicity have been rarely described in the context of common variants for common diseases, and if reported are usually only suggestive since very large sample sizes can be required to be able to demonstrate statistical interactions between loci. Assessment of risk based on such analysis can subsequently be used in the methods, uses and kits of the disclosure, as described herein.

[0218] In some embodiments, the significance of increased or decreased susceptibility can be measured by a percentage. In some embodiments, a significant increased susceptibility can be measured as a relative susceptibility of at least 1.2, including but not limited to: at least 1.3, at least 1.4, at least 1.5, at least 1.6, at least 1.7, at least 1.8, at least 1.9, at least 2.0, at least 2.5, at least 3.0, at least 4.0, at least 5.0, at least 6.0, at least 7.0, at least 8.0, at least 9.0, at least 10.0, and at least 15.0. In some embodiments, a relative susceptibility of at least 2.0, at least 3.0, at least 4.0, at least, 5.0, at least 6.0, or at least 10.0 is significant. Other values for significant susceptibility are also contemplated, for example, at least 2.5, 3.5, 4.5, 5.5, or any suitable other numerical values, wherein the values are also within scope of the present disclosure. In some embodiments, a significant increase in susceptibility is at least about 20%, including but not limited to about 25%, 30%, 35%, 40%, 45%, 50%, 55%, 60%, 65%, 70%, 75%, 80%, 85%, 90%, 95%, 100%, 150%, 200%, 300%, 400%, 500%, 600%, 700%, 800%, 900%, 1000%, and 1500%. In one particular embodiment, a significant increase in susceptibility is at least 100%. In other embodiments, a significant increase in susceptibility is at least 200%, at least 300%, at least 400%, at least 500%, at least 700%, at least 800%, at least 900% and at least 1000%. Other cutoffs or ranges as deemed suitable by the person skilled in the art to characterize the disclosure are also contemplated, and those are also within scope of the present disclosure. In certain embodiments, a significant increase in susceptibility is characterized by a p-value, such as a p-value of less than 0.5, less than 0.4, less than 0.3, less than 0.2, less than 0.1, less than 0.05, less than 0.01, less than 0.001, less than 0.0001, less than 0.00001, less than 0.000001, less than 0.0000001, less than 0.00000001, or less than 0.000000001.

[0219] In some embodiments, an individual who is at a decreased susceptibility for or the lack of presence of a condition (e.g., LOAD) can be an individual in whom at least one genetic variation, conferring decreased susceptibility for or the lack of presence of the condition is identified. In some embodiments, the genetic variations conferring decreased susceptibility are also protective. In one aspect, the genetic variations can confer a significant decreased susceptibility of or lack of presence of LOAD.

[0220] In some embodiments, significant decreased susceptibility can be measured as a relative susceptibility of less than 0.9, including but not limited to less than 0.9, less than 0.8, less than 0.7, less than 0.6, less than 0.5, less than 0.4, less than 0.3, less than 0.2 and less than 0.1. In some embodiments, the decrease in susceptibility is at least 20%, including but not limited to at least 25%, at least 30%, at least 35%, at least 40%, at least 45%, at least 50%, at least 55%, at least 60%, at least 65%, at least 70%, at least 75%, at least 80%, at least 85%, at least 90%, at least 95% and at least 98%. Other cutoffs or ranges as deemed suitable by the person, skilled in the art to characterize the disclosure are however also contemplated, and those are also within scope of the present disclosure. In certain embodiments, a significant decrease in susceptibility is characterized by a p-value, such as a p-value of less than 0.05, less than 0.01, less than 0.001, less than 0.0001, less than 0.00001, less than 0.000001, less than 0.0000001, less than 0.00000001, or less than 0.000000001. Other tests for significance can be used, for example, a Fisher-exact test. Other statistical tests of significance known to the skilled person are also contemplated and are also within scope of the disclosure.

[0221] In some preferred embodiments, the significance of increased or decreased susceptibility can be determined according to the ratio of measurements from a test subject to a reference subject. In some embodiments, losses or gains of one or more CNVs can be determined according to a threshold log₂ ratio determined by these measurements. In some embodiments, a log₂ ratio value greater than 0.35, or 0.5, is indicative of a gain of one or more CNVs. In some embodiments, a logₑ ratio value less than −0.35, or −0.5, is indicative of a loss of one or more CNVs. In some embodiments, the ratio of measurements from a test subject to a reference subject may be inverted such that the log 2 ratios of copy number gains are negative and the log 2 ratios of copy number losses are positive.

[0222] In some embodiments, the combined or overall susceptibility associated with a plurality of variants associated with LOAD can also be assessed; for example, the genetic variations described herein to be associated with susceptibility to LOAD can be combined with other common genetic risk factors. Combined risk for such genetic variants can be estimated in an analogous fashion to the methods described herein.

[0223] Calculating risk conferred by a particular genotype for the individual can be based on comparing the genotype of the individual to previously determined risk expressed, for example, as a relative risk (RR) or an odds ratio (OR), for the genotype, for example, for a heterozygous carrier of an at-risk variant for LOAD. An odds ratio can be a statistical measure used as a metric of causality. For example, in genetic disease research it can be used to convey the significance of a variant in a disease cohort relative to an unaffected/normal cohort. The calculated risk for the individual can be the relative risk for a subject, or for a specific genotype of a subject, compared to the average population. The average population risk can be expressed as a weighted average of the risks of different genotypes, using results from a reference population, and the appropriate calculations to calculate the risk of a genotype group relative to the population can then be performed. Alternatively, the risk for an individual can be based on a comparison of particular genotypes, for example, heterozygous and/or homozygous carriers of an at-risk allele of a marker compared with non-carriers of the at-risk allele (or pair of alleles in the instance of compound heterozygous variants, wherein one variant impacts the maternally inherited allele and the other impacts the paternally inherited allele). Using the population average can, in certain embodiments, be more convenient, since it provides a measure that can be easy to interpret for the user, for example, a measure that gives the risk for the individual, based on his/her genotype, compared with the average in the population.

[0224] In some embodiments, the OR value can be calculated as follows: OR=(A/(N1−A))/(U/(N2−U)), where A=number of affected cases with variant, N1=total number of affected cases, U=number of unaffected cases with variant and N2=total number of unaffected cases. In circumstances where U=0, it is conventional to set U=1, so as to avoid infinities. In some preferred embodiments, the OR can be calculated essentially as above, except that where U or A=0, 0.5 is added to all of A, N1, U, N2. In another embodiment, a Fisher's Exact Test (FET) can be calculated using standard methods. In another embodiment, the p-values can be corrected for false discovery rate (FDR) using the Benjamini-Hochberg method (Benjamini Y. and Hochberg Y., J. Royal Statistical Society 57:289 (1995); Osborne J. A. and Barker C. A. (2007)).

[0225] In certain embodiments of the disclosure, a genetic variation is correlated to LOAD by referencing genetic variation data to a look-up table that comprises correlations between the genetic variation and LOAD. The genetic variation in certain embodiments comprises at least one indication of the genetic variation. In some embodiments, the table comprises a correlation for one genetic variation. In other embodiments, the table comprises a correlation for a plurality of genetic variations in both scenarios, by referencing to a look-up table that gives an indication of a correlation between a genetic variation and LOAD, a risk for LOAD, or a susceptibility to LOAD, can be identified in the individual from whom the nucleic acid sample is derived.

[0226] The present disclosure also pertains to methods of clinical screening, for example, diagnosis, prognosis, or theranosis of a subject performed by a medical professional using the methods disclosed herein. In other embodiments, the disclosure pertains to methods of screening performed by a layman. The layman can be a customer of a genotyping, microarray, exome sequencing, or whole genome sequencing service provider. The layman can also be a genotype, microarray, exome sequencing, or whole genome sequencing service provider, who performs genetic analysis on a DNA sample from an individual, in order to provide service related to genetic risk factors for particular traits or diseases, based on the genotype status of the subject obtained from use of the methods described herein. The resulting genotype or genetic information can be made available to the individual and can be compared to information about LOAD or risk of developing LOAD associated with one or various genetic variations, including but not limited to, information from public or private genetic variation databases or literature and scientific publications. The screening applications of LOAD-associated genetic variations, as described herein, can, for example, be performed by an individual, a health professional, or a third party, for example a service provider who interprets genotype information from the subject. In some embodiments the genetic analysis is performed in a CLIA-certified laboratory (i.e. the federal regulatory standards of the U.S. that are specified in the Clinical Laboratory Improvement Amendments, administered by the Centers for Medicare and Medicaid Services) or equivalent laboratories in Europe and elsewhere in the world.

[0227] The information derived from analyzing sequence data can be communicated to any particular body, including the individual from which the nucleic acid sample or sequence data is derived, a guardian or representative of the individual, clinician, research professional, medical professional, service provider, and medical insurer or insurance company. Medical professionals can be, for example, doctors, nurses, medical laboratory technologists, and pharmacists. Research professionals can be, for example, principle investigators, research technicians, postdoctoral trainees, and graduate students.

[0228] In some embodiments, a professional can be assisted by determining whether specific genetic variants are present in a nucleic acid sample from a subject, and communicating information about genetic variants to a professional. After information about specific genetic variants is reported, a medical professional can take one or more actions that can affect subject care. For example, a medical professional can record information in the subject's medical record (e.g., electronic health record or electronic medical record, including, but not limited to, country-scale health services such as the National Health Service in the United Kingdom) regarding the subject's risk of developing LOAD. In some embodiments, a medical professional can record information regarding risk assessment, or otherwise transform the subject's medical record, to reflect the subject's current medical condition. In some embodiments, a medical professional can review and evaluate a subject's entire medical record and assess multiple treatment strategies for clinical intervention of a subject's condition. In another embodiment, information can be recorded in the context of the system developed by the World Health Organization (WHO), the International Statistical Classification of Diseases and Related Health Problems (ICD), which is currently using the 10th revision (ICD-10 codes). For example, the ICD-10 code for LOAD is A81.2, whereas the ICD-10 code for multiple sclerosis is G35.

[0229] A medical professional can initiate or modify treatment after receiving information regarding a subject's screening for LOAD, for example. In some embodiments, a medical professional can recommend a change in therapy or exclude a therapy. In some embodiments, a medical professional can enroll a subject in a clinical trial for, by way of example, detecting correlations between a haplotype as described herein and any measurable or quantifiable parameter relating to the outcome of the treatment as described above.

[0230] In some embodiments, a medical professional can communicate information regarding a subject's screening of developing LOAD to a subject or a subject's family. In some embodiments, a medical professional can provide a subject and/or a subject's family with information regarding LOAD and risk assessment information, including treatment options, and referrals to specialists. In some embodiments, a medical professional can provide a copy of a subject's medical records to a specialist. In some embodiments, a research professional can apply information regarding a subject's risk of developing LOAD to advance scientific research. In some embodiments, a research professional can obtain a subject's haplotype as described herein to evaluate a subject's enrollment, or continued participation, in a research study or clinical trial. In some embodiments, a research professional can communicate information regarding a subject's screening of LOAD to a medical professional. In some embodiments, a research professional can refer a subject to a medical professional.

[0231] Any appropriate method can be used to communicate information to another person. For example, information can be given directly or indirectly to a professional and a laboratory technician can input a subject's genetic variation as described herein into a computer-based record. In some embodiments, information is communicated by making a physical alteration to medical or research records. For example, a medical professional can make a permanent notation or flag a medical record for communicating the risk assessment to other medical professionals reviewing the record. In addition, any type of communication can be used to communicate the risk assessment information. For example, mail, e-mail, telephone, and face-to-face interactions can be used. The information also can be communicated to a professional by making that information electronically available to the professional. For example, the information can be communicated to a professional by placing the information on a computer database such that the professional can access the information. In addition, the information can be communicated to a hospital, clinic, or research facility serving as an agent for the professional.

[0232] Results of these tests, and optionally interpretive information, can be returned to the subject, the health care provider or to a third party. The results can be communicated to the tested subject, for example, with a prognosis and optionally interpretive materials that can help the subject understand the test results and prognosis; used by a health care provider, for example, to determine whether to administer a specific drug, or whether a subject should be assigned to a specific category, for example, a category associated with a specific disease endophenotype, or with drug response or non-response; used by a third party such as a healthcare payer, for example, an insurance company or HMO, or other agency, to determine whether or not to reimburse a health care provider for services to the subject, or whether to approve the provision of services to the subject. For example, the healthcare payer can decide to reimburse a health care provider for treatments for LOAD if the subject has LOAD or has an increased risk of developing LOAD.

[0233] Also provided herein are databases that include a list of genetic variations as described herein, and wherein the list can be largely or entirely limited to genetic variations identified as useful for screening LOAD as described herein. The list can be stored, for example, on a flat file or computer-readable medium. The databases can further include information regarding one or more subjects, for example, whether a subject is affected or unaffected, clinical information such as endophenotype, age of onset of symptoms, any treatments administered and outcomes, for example, data relevant to pharmacogenomics, diagnostics, prognostics or theranostics, and other details, for example, data about the disorder in the subject, or environmental or other genetic factors. The databases can be used to detect correlations between a particular haplotype and the information regarding the subject.

[0234] The methods described herein can also include the generation of reports for use, for example, by a subject, care giver, or researcher, that include information regarding a subject's genetic variations, and optionally further information such as treatments administered, treatment history, medical history, predicted response, and actual response. The reports can be recorded in a tangible medium, e.g., a computer-readable disk, a solid state memory device, or an optical storage device.

Methods of Screening Using Variations in RNA and/or Polypeptides

[0235] In some embodiments of the disclosure, screening of LOAD can be made by examining or comparing changes in expression, localization, binding partners, and composition of a polypeptide encoded by a nucleic acid variant associated with LOAD, for example, in those instances where the genetic variations of the present disclosure results in a change in the composition or expression of the polypeptide and/or RNA, for example, mRNAs, microRNAs (miRNAs), and other noncoding RNAs (ncRNAs). Thus, screening of LOAD can be made by examining expression and/or composition of one of these polypeptides and/or RNA, or another polypeptide and/or RNA encoded by a nucleic acid associated with LOAD, in those instances where the genetic variation of the present disclosure results in a change in the expression, localization, binding partners, and/or composition of the polypeptide and/or RNA. In some embodiments, screening can comprise diagnosing a subject. In some embodiments, screening can comprise determining a prognosis of a subject, for example determining the susceptibility of developing LOAD. In some embodiments, screening can comprise theranosing a subject.

[0236] The genetic variations described herein that show association to LOAD can play a role through their effect on one or more of these genes, either by directly impacting one or more genes or influencing the expression of one or more nearby genes. For example, while not intending to be limited by theory, it is generally expected that a deletion of a chromosomal segment comprising a particular gene, or a fragment of a gene, can either result in an altered composition or expression, or both, of the encoded polypeptide and/or mRNA. Likewise, duplications, or high number copy number variations, are in general expected to result in increased expression of encoded polypeptide and/or RNA if the gene they are expressed from is fully encompassed within the duplicated (or triplicated, or even higher copy number gains) genomic segment, or conversely can result in decreased expression or a disrupted RNA or polypeptide if one or both breakpoints of the copy number gain disrupt a given gene. Other possible mechanisms affecting genes within a genetic variation region include, for example, effects on transcription, effects on RNA splicing, alterations in relative amounts of alternative splice forms of mRNA, effects on RNA stability, effects on transport from the nucleus to cytoplasm, and effects on the efficiency and accuracy of translation. Thus, DNA variations can be detected directly, using the subjects unamplified or amplified genomic DNA, or indirectly, using RNA or DNA obtained from the subject's tissue(s) that are present in an aberrant form or expression level as a result of the genetic variations of the disclosure showing association to LOAD. In another embodiment, DNA variations can be detected indirectly using a polypeptide or protein obtained from the subject's tissue(s) that is present in an aberrant form or expression level as a result of genetic variations of the disclosure showing association to the LOAD. In another embodiment, an aberrant form or expression level of a polypeptide or protein that results from one or more genetic variations of the disclosure showing association to LOAD can be detected indirectly via another polypeptide or protein present in the same biological/cellular pathway that is modulated or interacts with said polypeptide or protein that results from one or more genetic variations of the disclosure. In some embodiments, the genetic variations of the disclosure showing association to LOAD can affect the expression of a gene within the genetic variation region. In some embodiments, a genetic variation affecting an exonic region of a gene can affect, disrupt, or modulate the expression of the gene. In some embodiments, a genetic variation affecting an intronic or intergenic region of a gene can affect, disrupt, or modulate the expression of the gene.

[0237] Certain genetic variation regions can have flanking duplicated segments, and genes within such segments can have altered expression and/or composition as a result of such genomic alterations. Regulatory elements affecting gene expression can be located far away, even as far as tens or hundreds of kilobases away, from the gene that is regulated by said regulatory elements. Thus, in some embodiments, regulatory elements for genes that are located outside the gene (e.g., upstream or downstream of the gene) can be located within the genetic variation, and thus be affected by the genetic variation. It is thus contemplated that the detection of the genetic variations described herein, can be used for assessing expression for one or more of associated genes not directly impacted by the genetic variations. In some embodiments, a genetic variation affecting an intergenic region of a gene can affect, disrupt, or modulate the expression of a gene located elsewhere in the genome, such as described above. For example, a genetic variation affecting an intergenic region of a gene can affect, disrupt, or modulate the expression of a transcription factor, located elsewhere in the genome, which regulates the gene. Regulatory elements can also be located within a gene, such as within intronic regions, and similarly impact the expression level of the gene and ultimately the protein expression level without changing the structure of the protein. The effects of genetic variants on regulatory elements can manifest in a tissue-specific manner; for example, one or more transcription factors that bind to the regulatory element that is impacted by one or more genetic variations may be expressed at higher concentration in neurons as compared to skin cells (i.e., the impact of the one or more genetic variations may be primarily evident in neuronal cells).

[0238] In some embodiments, genetic variations of the disclosure showing association to LOAD can affect protein expression at the translational level. It can be appreciated by those skilled in the art that this can occur by increased or decreased expression of one or more microRNAs (miRNAs) that regulates expression of a protein known to be important, or implicated, in the cause, onset, or progression of LOAD. Increased or decreased expression of the one or more miRNAs can result from gain or loss of the whole miRNA gene, disruption or impairment of a portion of the gene (e.g., by an indel or CNV), or even a single base change (SNP or SNV) that produces an altered, non-functional or aberrant functioning miRNA sequence. It can also be appreciated by those skilled in the art that the expression of protein, for example, one known to cause LOAD by increased or decreased expression, can result due to a genetic variation that results in alteration of an existing miRNA binding site within the polypeptide's mRNA transcript, or even creates a new miRNA binding site that leads to aberrant polypeptide expression.

[0239] A variety of methods can be used for detecting polypeptide composition and/or expression levels, including but not limited to enzyme linked immunosorbent assays (ELISA), Western blots, spectroscopy, mass spectrometry, peptide arrays, colorimetry, electrophoresis, isoelectric focusing, immunoprecipitations, immunoassays, and immunofluorescence and other methods well-known in the art. A test nucleic acid sample from a subject can be assessed for the presence of an alteration in the expression and/or an alteration in composition of the polypeptide encoded by a nucleic acid associated with LOAD. An “alteration” in the polypeptide expression or composition, as used herein, refers to an alteration in expression or composition in a test nucleic acid sample, as compared to the expression or composition of the polypeptide in a control nucleic acid sample. Such alteration can, for example, be an alteration in the quantitative polypeptide expression or can be an alteration in the qualitative polypeptide expression, for example, expression of a mutant polypeptide or of a different splicing variant, or a combination thereof. In some embodiments, screening of LOAD can be made by detecting a particular splicing variant encoded by a nucleic acid associated with LOAD, or a particular pattern of splicing variants.

[0240] Antibodies can be polyclonal or monoclonal and can be labeled or unlabeled. An intact antibody or a fragment thereof can be used. The term “labeled”, with regard to the probe or antibody, is intended to encompass direct labeling of the probe or antibody by coupling a detectable substance to the probe or antibody, as well as indirect labeling of the probe or antibody by reactivity with another reagent that is directly labeled as previously described herein. Other non-limiting examples of indirect labeling include detection of a primary antibody using a labeled secondary antibody, for example, a fluorescently-labeled secondary antibody and end-labeling of a DNA probe with biotin such that it can be detected with fluorescently-labeled streptavidin.

### Methods of Detecting Genetic Variations

[0241] In some embodiments, standard techniques for genotyping for the presence genetic variations, for example, amplification, can be used. Amplification of nucleic acids can be accomplished using methods known in the art. Generally, sequence information from the region of interest can be used to design oligonucleotide primers that can be identical or similar in sequence to opposite strands of a template to be amplified. In some embodiments, amplification methods can include but are not limited to, fluorescence-based techniques utilizing PCR, for example, ligase chain reaction (LCR), Nested PCR, transcription amplification, self-sustained sequence replication, nucleic acid based sequence amplification (NASBA), and multiplex ligation-dependent probe amplification (MLPA). Guidelines for selecting primers for PCR amplification are well known in the art. In some embodiments, a computer program can be used to design primers, for example, Oligo (National Biosciences, Inc, Plymouth Minn), MacVector (Kodak/IBI), and GCG suite of sequence analysis programs.

[0242] In some embodiments, commercial methodologies available for genotyping, for example, SNP genotyping, can be used, but are not limited to, TaqMan genotyping assays (Applied Biosystems), SNPlex platforms (Applied Biosystems), gel electrophoresis, capillary electrophoresis, size exclusion chromatography, mass spectrometry, for example, MassARRAY system (Sequenom), minisequencing methods, real-time Polymerase Chain Reaction (PCR), Bio-Plex system (BioRad), CEQ and SNPstream systems (Beckman), array hybridization technology, for example, Affymetrix GeneChip (Perlegen), BeadArray Technologies, for example, Illumina GoldenGate and Infinium assays, array tag technology, Multiplex Ligation-dependent Probe Amplification (MLPA), and endonuclease-based fluorescence hybridization technology (Invader assay, either using unamplified or amplified genomic DNA, or unamplified total RNA, or unamplified or amplified cDNA; Third Wave/Hologic). PCR can be a procedure in which target nucleic acid is amplified in a manner similar to that described in U.S. Pat. No. 4,683,195 and subsequent modifications of the procedure described therein. PCR can include a three phase temperature cycle of denaturation of DNA into single strands, annealing of primers to the denatured strands, and extension of the primers by a thermostable DNA polymerase enzyme. This cycle can be repeated so that there are enough copies to be detected and analyzed. In some embodiments, real-time quantitative PCR can be used to determine genetic variations, wherein quantitative PCR can permit both detection and quantification of a DNA sequence in a nucleic acid sample, for example, as an absolute number of copies or as a relative amount when normalized to DNA input or other normalizing genes. In some embodiments, methods of quantification can include the use of fluorescent dyes that can intercalate with double-stranded DNA, and modified DNA oligonucleotide probes that can fluoresce when hybridized with a complementary DNA.

[0243] In some embodiments of the disclosure, a nucleic acid sample obtained from the subject can be collected and PCR can be used to amplify a fragment of nucleic acid that comprises one or more genetic variations that can be indicative of a susceptibility to LOAD. In some embodiments, detection of genetic variations can be accomplished by expression analysis, for example, by using quantitative PCR. In some embodiments, this technique can assess the presence or absence of a genetic alteration in the expression or composition of one or more polypeptides or splicing variants encoded by a nucleic acid associated with LOAD.

[0244] In some embodiments, the nucleic acid sample from a subject containing a SNP can be amplified by PCR prior to detection with a probe. In such an embodiment, the amplified DNA serves as the template for a detection probe and, in some embodiments, an enhancer probe. Certain embodiments of the detection probe, the enhancer probe, and/or the primers used for amplification of the template by PCR can comprise the use of modified bases, for example, modified A, T, C, G, and U, wherein the use of modified bases can be useful for adjusting the melting temperature of the nucleotide probe and/or primer to the template DNA, In some embodiments, modified bases are used in the design of the detection nucleotide probe. Any modified base known to the skilled person can be selected in these methods, and the selection of suitable bases is well within the scope of the skilled person based on the teachings herein and known bases available from commercial sources as known to the skilled person.

[0245] In some embodiments, identification of genetic variations can be accomplished using hybridization methods. The presence of a specific marker allele or a particular genomic segment comprising a genetic variation, or representative of a genetic variation, can be indicated by sequence-specific hybridization of a nucleic acid probe specific for the particular allele or the genetic variation in a nucleic acid sample that has or has not been amplified but methods described herein. The presence of more than one specific marker allele or several genetic variations can be indicated by using two or more sequence-specific nucleic acid probes, wherein each is specific for a particular allele and/or genetic variation.

[0246] Hybridization can be performed by methods well known to the person skilled in the art, for example, hybridization techniques such as fluorescent in situ hybridization (FISH), Southern analysis, Northern analysis, or in situ hybridization. In some embodiments, hybridization refers to specific hybridization, wherein hybridization can be performed with no mismatches. Specific hybridization, if present, can be using standard methods. In some embodiments, if specific hybridization occurs between a nucleic acid probe and the nucleic acid in the nucleic acid sample, the nucleic acid sample can contain a sequence that can be complementary to a nucleotide present in the nucleic acid probe. In some embodiments, if a nucleic acid probe can contain a particular allele of a polymorphic marker, or particular alleles for a plurality of markers, specific hybridization is indicative of the nucleic acid being completely complementary to the nucleic acid probe, including the particular alleles at polymorphic markers within the probe. In some embodiments a probe can contain more than one marker alleles of a particular haplotype, for example, a probe can contain alleles complementary to 2, 3, 4, 5 or all of the markers that make up a particular haplotype. In some embodiments detection of one or more particular markers of the haplotype in the nucleic acid sample is indicative that the source of the nucleic acid sample has the particular haplotype.

[0247] In some embodiments, PCR conditions and primers can be developed that amplify a product only when the variant allele is present or only when the wild type allele is present, for example, allele-specific PCR. In some embodiments of allele-specific PCR, a method utilizing a detection oligonucleotide probe comprising a fluorescent moiety or group at its 3′ terminus and a quencher at its 5′ terminus, and an enhancer oligonucleotide, can be employed (see e.g., Kutyavin et al., Nucleic Acid Res. 34:e 128 (2006)).

[0248] An allele-specific primer/probe can be an oligonucleotide that is specific for particular a polymorphism can be prepared using standard methods. In some embodiments, allele-specific oligonucleotide probes can specifically hybridize to a nucleic acid region that contains a genetic variation. In some embodiments, hybridization conditions can be selected such that a nucleic acid probe can specifically bind to the sequence of interest, for example, the variant nucleic acid sequence.

[0249] In some embodiments, allele-specific restriction digest analysis can be used to detect the existence of a polymorphic variant of a polymorphism, if alternate polymorphic variants of the polymorphism can result in the creation or elimination of a restriction site. Allele-specific restriction digests can be performed, for example, with the particular restriction enzyme that can differentiate the alleles. In some embodiments, PCR can be used to amplify a region comprising the polymorphic site, and restriction fragment length polymorphism analysis can be conducted. In some embodiments, for sequence variants that do not alter a common restriction site, mutagenic primers can be designed that can introduce one or more restriction sites when the variant allele is present or when the wild type allele is present.

[0250] In some embodiments, fluorescence polarization template-directed dye-terminator incorporation (FP-TDI) can be used to determine which of multiple polymorphic variants of a polymorphism can be present in a subject. Unlike the use of allele-specific probes or primers, this method can employ primers that can terminate adjacent to a polymorphic site, so that extension of the primer by a single nucleotide can result in incorporation of a nucleotide complementary to the polymorphic variant at the polymorphic site.

[0251] In some embodiments, DNA containing an amplified portion can be dot-blotted, using standard methods and the blot contacted with the oligonucleotide probe. The presence of specific hybridization of the probe to the DNA can then be detected. The methods can include determining the genotype of a subject with respect to both copies of the polymorphic site present in the genome, wherein if multiple polymorphic variants exist at a site, this can be appropriately indicated by specifying which variants are present in a subject. Any of the detection means described herein can be used to determine the genotype of a subject with respect to one or both copies of the polymorphism present in the subject's genome.

[0252] In some embodiments, a peptide nucleic acid (PNA) probe can be used in addition to, or instead of, a nucleic acid probe in the methods described herein. A PNA can be a DNA mimic having a peptide-like, inorganic backbone, for example, N-(2-aminoethyl) glycine units with an organic base (A, G, C, T or U) attached to the glycine nitrogen via a methylene carbonyl linker.

[0253] Nucleic acid sequence analysis can also be used to detect genetic variations, for example, genetic variations can be detected by sequencing exons, introns, 5′ untranslated sequences, or 3′ untranslated sequences. One or more methods of nucleic acid analysis that are available to those skilled in the art can be used to detect genetic variations, including but not limited to, direct manual sequencing, automated fluorescent sequencing, single-stranded conformation polymorphism assays (SSCP); clamped denaturing gel electrophoresis (CDGE); denaturing gradient gel electrophoresis (DGGE), two-dimensional gel electrophoresis (2DGE or TDGE); conformational sensitive gel electrophoresis (CSGE); denaturing high performance liquid chromatography (DHPLC), infrared matrix-assisted laser desorption/ionization (IR-MALDI) mass spectrometry, mobility shift analysis, quantitative real-time PCR, restriction enzyme analysis, heteroduplex analysis; chemical mismatch cleavage (CMC), RNase protection assays, use of polypeptides that recognize nucleotide mismatches, allele-specific PCR, real-time pyrophosphate DNA sequencing, PCR amplification in combination with denaturing high performance liquid chromatography (dHPLC), and combinations of such methods.

[0254] Sequencing can be accomplished through classic Sanger sequencing methods, which are known in the art. In some embodiments sequencing can be performed using high-throughput sequencing methods some of which allow detection of a sequenced nucleotide immediately after or upon its incorporation into a growing strand, for example, detection of sequence in substantially real time or real time. In some cases, high throughput sequencing generates at least 1,000, at least 5,000, at least 10,000, at least 20,000, at least 30,000, at least 40,000, at least 50,000, at least 100,000 or at least 500,000 sequence reads per hour; with each read being at least 50, at least 60, at least 70, at least 80, at least 90, at least 100, at least 120 or at least 150 bases per read (or 500-1,000 bases per read for 454).

[0255] High-throughput sequencing methods can include but are not limited to, Massively Parallel Signature Sequencing (MPSS, Lynx Therapeutics), Polony sequencing, 454 pyrosequencing, Illumina (Solexa) sequencing, Illumina (Solexa) sequencing using 10× Genomics library preparation, SOLID sequencing, on semiconductor sequencing, DNA nanoball sequencing, Helioscope™ single molecule sequencing, Single Molecule SMRT™ sequencing, Single Molecule real time (RNAP) sequencing, Nanopore DNA sequencing, and/or sequencing by hybridization, for example, a non-enzymatic method that uses a DNA microarray, or microfluidic Sanger sequencing.

[0256] In some embodiments, high-throughput sequencing can involve the use of technology available by Helicos BioSciences Corporation (Cambridge, Mass.) such as the Single Molecule Sequencing by Synthesis (SMSS) method. SMSS is unique because it allows for sequencing the entire human genome in up to 24 hours. This fast sequencing method also allows for detection of a SNP/nucleotide in a sequence in substantially real time or real time. Finally, SMSS is powerful because, like the MIP technology, it does not use a pre-amplification step prior to hybridization. SMSS does not use any amplification. SMSS is described in US Publication Application Nos. 20060024711; 20060024678; 20060012793; 20060012784; and 20050100932. In some embodiments, high-throughput sequencing involves the use of technology available by 454 Life Sciences, Inc. (a Roche company, Branford, Conn.) such as the PicoTiterPlate device which includes a fiber optic plate that transmits chemiluminescent signal generated by the sequencing reaction to be recorded by a CCD camera in the instrument. This use of fiber optics allows for the detection of a minimum of 20 million base pairs in 4.5 hours.

[0257] In some embodiments, PCR-amplified single-strand nucleic acid can be hybridized to a primer and incubated with a polymerase, ATP sulfurylase, luciferase, apyrase, and the substrates luciferin and adenosine 5′ phosphosulfate. Next, deoxynucleotide triphosphates corresponding to the bases A, C, G, and T (U) can be added sequentially. A base incorporation can be accompanied by release of pyrophosphate, which can be converted to ATP by sulfurylase, which can drive synthesis of oxyluciferin and the release of visible light. Since pyrophosphate release can be equimolar with the number of incorporated bases, the light given off can be proportional to the number of nucleotides adding in any one step. The process can repeat until the entire sequence can be determined. In some embodiments, pyrosequencing can be utilized to analyze amplicons to determine whether breakpoints are present. In some embodiments, pyrosequencing can map surrounding sequences as an internal quality control.

[0258] Pyrosequencing analysis methods are known in the art. Sequence analysis can include a four-color sequencing by ligation scheme (degenerate ligation), which involves hybridizing an anchor primer to one of four positions. Then an enzymatic ligation reaction of the anchor primer to a population of degenerate nonamers that are labeled with fluorescent dyes can be performed. At any given cycle, the population of nonamers that is used can be structured such that the identity of one of its positions can be correlated with the identity of the fluorophore attached to that nonamer. To the extent that the ligase discriminates for complementarily at that queried position, the fluorescent signal can allow the inference of the identity of the base. After performing the ligation and four-color imaging, the anchor primer: nonamer complexes can be stripped and a new cycle begins. Methods to image sequence information after performing ligation are known in the art.

[0259] In some embodiments, analysis by restriction enzyme digestion can be used to detect a particular genetic variation if the genetic variation results in creation or elimination of one or more restriction sites relative to a reference sequence. In some embodiments, restriction fragment length polymorphism (RFLP) analysis can be conducted, wherein the digestion pattern of the relevant DNA fragment indicates the presence or absence of the particular genetic variation in the nucleic acid sample.

[0260] In some embodiments, arrays of oligonucleotide probes that can be complementary to target nucleic acid sequence segments from a subject can be used to identify genetic variations. In some embodiments, an array of oligonucleotide probes comprises an oligonucleotide array, for example, a microarray. In some embodiments, the present disclosure features arrays that include a substrate having a plurality of addressable areas, and methods of using them. At least one area of the plurality includes a nucleic acid probe that binds specifically to a sequence comprising a genetic variation, and can be used to detect the absence or presence of the genetic variation, for example, one or more SNPs, microsatellites, or CNVs, as described herein, to determine or identify an allele or genotype. For example, the array can include one or more nucleic acid probes that can be used to detect a genetic variation associated with a gene and/or gene product. In some embodiments, the array can further comprise at least one area that includes a nucleic acid probe that can be used to specifically detect another marker associated with LOAD as described herein.

[0261] Microarray hybridization can be performed by hybridizing a nucleic acid of interest, for example, a nucleic acid encompassing a genetic variation, with the array and detecting hybridization using nucleic acid probes. In some embodiments, the nucleic acid of interest is amplified prior to hybridization. Hybridization and detecting can be carried out according to standard methods described in Published PCT Applications: WO 92/10092 and WO 95/11995, and U.S. Pat. No. 5,424,186. For example, an array can be scanned to determine the position on the array to which the nucleic acid hybridizes. The hybridization data obtained from the scan can be, for example, in the form of fluorescence intensities as a function of location on the array.

[0262] Arrays can be formed on substrates fabricated with materials such as paper; glass; plastic, for example, polypropylene, nylon, or polystyrene; polyacrylamide; nitrocellulose; silicon; optical fiber; or any other suitable solid or semisolid support; and can be configured in a planar, for example, glass plates or silicon chips); or three dimensional, for example, pins, fibers, beads, particles, microtiter wells, and capillaries, configuration.

[0263] Methods for generating arrays are known in the art and can include for example; photolithographic methods (U.S. Pat. Nos. 5,143,854, 5,510,270 and 5,527,681); mechanical methods, for example, directed-flow methods (U.S. Pat. No. 5,384,261); pin-based methods (U.S. Pat. No. 5; 288; 514); bead-based techniques (PCT US/93/04145); solid phase oligonucleotide synthesis methods; or by other methods known to a person skilled in the art (see, e.g., Bier, F. F., et al., Adv Biochem Eng Biotechnol 109:433-53 (2008); Hoheisel, J. D., Nat Rev Genet 7: 200-10 (2006); Fan, J. B., et al., Methods Enzymol 410:57-73 (2006); Raqoussis, J. & Elvidge, G., Expert Rev Mol Design 6: 145-52 (2006); Mockler, T. C., et al., Genomics 85: 1-15 (2005), and references cited therein, the entire teachings of each of which are incorporated by reference herein). Many additional descriptions of the preparation and use of oligonucleotide arrays for detection of polymorphisms can be found, for example, in U.S. Pat. Nos. 6,858,394, 6,429,027, 5,445,934, 5,700,637, 5,744,305, 5,945,334, 6,054,270, 6,300,063, 6,733,977, 7,364,858, EP 619 321, and EP 373 203, the entire teachings of which are incorporated by reference herein. Methods for array production, hybridization, and analysis are also described in Snijders et al., Nat. Genetics 29:263-264 (2001); Klein et al., Proc. Natl. Acad. Sci. USA 96:4494-4499 (1999); Albertson et al., Breast Cancer Research and Treatment 78:289-298 (2003); and Snijders et al., “BAC microarray based comparative genomic hybridization,” in: Zhao et al., (eds), Bacterial Artificial Chromosomes: Methods and Protocols, Methods in Molecular Biology, Humana Press (2002).

[0264] In some embodiments, oligonucleotide probes forming an array can be attached to a substrate by any number of techniques, including, but not limited to, in situ synthesis, for example, high-density oligonucleotide arrays, using photolithographic techniques; spotting/printing a medium to low density on glass, nylon, or nitrocellulose; by masking; and by dot-blotting on a nylon or nitrocellulose hybridization membrane. In some embodiments, oligonucleotides can be immobilized via a linker, including but not limited to, by covalent, ionic, or physical linkage. Linkers for immobilizing nucleic acids and polypeptides, including reversible or cleavable linkers, are known in the art (U.S. Pat. No. 5,451,683 and WO98/20019). In some embodiments, oligonucleotides can be non-covalently immobilized on a substrate by hybridization to anchors, by means of magnetic beads, or in a fluid phase, for example, in wells or capillaries.

[0265] An array can comprise oligonucleotide hybridization probes capable of specifically hybridizing to different genetic variations. In some embodiments, oligonucleotide arrays can comprise a plurality of different oligonucleotide probes coupled to a surface of a substrate in different known locations. In some embodiments, oligonucleotide probes can exhibit differential or selective binding to polymorphic sites, and can be readily designed by one of ordinary skill in the art, for example, an oligonucleotide that is perfectly complementary to a sequence that encompasses a polymorphic site, for example, a sequence that includes the polymorphic site, within it, or at one end, can hybridize preferentially to a nucleic acid comprising that sequence, as opposed to a nucleic acid comprising an alternate polymorphic variant.

[0266] In some embodiments, arrays can include multiple detection blocks, for example, multiple groups of probes designed for detection of particular polymorphisms. In some embodiments, these arrays can be used to analyze multiple different polymorphisms. In some embodiments, detection blocks can be grouped within a single array or in multiple, separate arrays, wherein varying conditions, for example, conditions optimized for particular polymorphisms, can be used during hybridization. General descriptions of using oligonucleotide arrays for detection of polymorphisms can be found, for example, in U.S. Pat. Nos. 5,858,659 and 5,837,832. In addition to oligonucleotide arrays, cDNA arrays can be used similarly in certain embodiments.

[0267] The methods described herein can include but are not limited to providing an array as described herein; contacting the array with a nucleic acid sample, and detecting binding of a nucleic acid from the nucleic acid sample to the array. In some embodiments, the method can comprise amplifying nucleic acid from the nucleic acid sample, for example, a region associated with LOAD or a region that includes another region associated with LOAD. In some embodiments, the methods described herein can include using an array that can identify differential expression patterns or copy numbers of one or more genes in nucleic acid samples from control and affected individuals. For example, arrays of probes to a marker described herein can be used to identify genetic variations between DNA from an affected subject, and control DNA obtained from an individual that does not have LOAD. Since the nucleotides on the array can contain sequence tags, their positions on the array can be accurately known relative to the genomic sequence.

[0268] In some embodiments, it can be desirable to employ methods that can detect the presence of multiple genetic variations, for example, polymorphic variants at a plurality of polymorphic sites, in parallel or substantially simultaneously. In some embodiments, these methods can comprise oligonucleotide arrays and other methods, including methods in which reactions, for example, amplification and hybridization, can be performed in individual vessels, for example, within individual wells of a multi-well plate or other vessel.

[0269] Determining the identity of a genetic variation can also include or consist of reviewing a subject's medical history, where the medical history includes information regarding the identity, copy number, presence or absence of one or more alleles or SNPs in the subject, e.g., results of a genetic test.

[0270] In some embodiments extended runs of homozygosity (ROH) may be useful to map recessive disease genes in outbred populations. Furthermore, even in complex disorders, a high number of affected individuals may have the same haplotype in the region surrounding a disease mutation. Therefore, a rare pathogenic variant and surrounding haplotype can be enriched in frequency in a group of affected individuals compared with the haplotype frequency in a cohort of unaffected controls. Homozygous haplotypes (HH) that are shared by multiple affected individuals can be important for the discovery of recessive disease genes in a condition such as LOAD. In some embodiments, the traditional homozygosity mapping method can be extended by analyzing the haplotype within shared ROH regions to identify homozygous segments of identical haplotype that are present uniquely or at a higher frequency in LOAD probands compared to parental controls. Such regions are termed risk homozygous haplotypes (rHH), which may contain low-frequency recessive variants that contribute to LOAD risk in a subset of LOAD patients.

[0271] Genetic variations can also be identified using any of a number of methods well known in the art. For example, genetic variations available in public databases, which can be searched using methods and custom algorithms or algorithms known in the art, can be used. In some embodiments, a reference sequence can be from, for example, the human draft genome sequence, publicly available in various databases, or a sequence deposited in a database such as GenBank.

[0272] A comparison of one or more genomes relative to one or more other genomes with array CGH, or a variety of other genetic variation detection methods, can reveal the set of genetic variations between two genomes, between one genome in comparison to multiple genomes, or between one set of genomes in comparison to another set of genomes. In some embodiments, an array CGH experiment can be performed by hybridizing a single test genome against a pooled nucleic acid sample of two or more genomes, which can result in minimizing the detection of higher frequency variants in the experiment. In some embodiments, a test genome can be hybridized alone (i.e., one-color detection) to a microarray, for example, using array CGH or SNP genotyping methods, and the comparison step to one or more reference genomes can be performed in silico to reveal the set of genetic variations in the test genome relative to the one or more reference genomes. In one embodiment, a single test genome is compared to a single reference genome in a 2-color experiment wherein both genomes are cohybridized to the microarray. In some embodiments, the whole genome or whole exome from one or more subjects is analyzed. In some embodiments, nucleic acid information has already been obtained for the whole genome or whole exome from one or more individuals and the nucleic acid information is obtained from in silico analysis.

[0273] Any of the polynucleotides described, including polynucleotides comprising a genetic variation, can be made synthetically using methods known in the art.

### Methods of Detecting CNVs

[0274] Detection of genetic variations, specifically CNVs, can be accomplished by one or more suitable techniques described herein. Generally, techniques that can selectively determine whether a particular chromosomal segment is present or absent in an individual can be used for genotyping CNVs. Identification of novel copy number variations can be done by methods for assessing genomic copy number changes.

[0275] In some embodiments, methods include but are not limited to, methods that can quantitatively estimate the number of copies of a particular genomic segment, but can also include methods that indicate whether a particular segment is present in a nucleic acid sample or not. In some embodiments, the technique to be used can quantify the amount of segment present, for example, determining whether a DNA segment is deleted, duplicated, or triplicated in subject, for example, Fluorescent In Situ Hybridization (FISH) techniques, and other methods described herein. In some embodiments, methods include detection of copy number variation from array intensity and sequencing read depth using a stepwise Bayesian model (Zhang, et al., BMC Bioinformatics, 11:539 (2010)). In some embodiments, methods include detecting copy number variations using shotgun sequencing, CNV-seq (Xie C., et al., BMC Bioinformatics, 10:80 (2009)). In some embodiments, methods include analyzing next-generation sequencing (NGS) data for CNV detection using any one of several algorithms developed for each of the four broad methods for CNV detection using NGS, namely the depth of coverage (DOC), read-pair (RP), split-read (SR) and assembly-based (AS) methods. (Teo et al., Bioinformatics (2012)). In some embodiments, methods include combining coverage with map information for the identification of deletions and duplications in targeted sequence data (Nord et al., BMC Genomics, 12:184 (2011)).

[0276] In some embodiments, other genotyping technologies can be used for detection of CNVs, including but not limited to, karyotype analysis, Molecular Inversion Probe array technology, for example, Affymetrix SNP Array 6.0, and BeadArray Technologies, for example, Illumina GoldenGate and Infinium assays, as can other platforms such as NimbleGen HD2.1 or HD4.2, High-Definition Comparative Genomic Hybridization (CGH) arrays (Agilent Technologies), tiling array technology (Affymetrix), multiplex ligation-dependent probe amplification (MLPA), Invader assay, fluorescence in situ hybridization, and, in one embodiment, Array Comparative Genomic Hybridization (aCGH) methods. As described herein, karyotype analysis can be a method to determine the content and structure of chromosomes in a nucleic acid sample. In some embodiments, karyotyping can be used, in lieu of aCGH, to detect translocations or inversions, which can be copy number neutral, and, therefore, not detectable by aCGH. Information about amplitude of particular probes, which can be representative of particular alleles, can provide quantitative dosage information for the particular allele, and by consequence, dosage information about the CNV in question, since the marker can be selected as a marker representative of the CNV and can be located within the CNV. In some embodiments, if the CNV is a deletion, the absence of particular marker allele is representative of the deletion. In some embodiments, if the CNV is a duplication or a higher order copy number variation, the signal intensity representative of the allele correlating with the CNV can represent the copy number. A summary of methodologies commonly used is provided in Perkel (Perkel J. Nature Methods 5:447-453 (2008)).

[0277] PCR assays can be utilized to detect CNVs and can provide an alternative to array analysis. In particular, PCR assays can enable detection of precise boundaries of gene/chromosome variants, at the molecular level, and which boundaries are identical in different individuals. PCR assays can be based on the amplification of a junction fragment present only in individuals that carry a deletion. This assay can convert the detection of a loss by array CGH to one of a gain by PCR.

[0278] Examples of PCR techniques that can be used in the present disclosure include, but are not limited to quantitative PCR, real-time quantitative PCR (qPCR), quantitative fluorescent PCR (QF-PCR), multiplex fluorescent PCR (MF-PCR), real time PCR (RT-PCR), single cell PCR, PCR-RFLP/RT-PCR-RFLP, hot start PCR and Nested PCR. Other suitable amplification methods include the ligase chain reaction (LCR), ligation mediated PCR (LM-PCR), degenerate oligonucleotide probe PCR (DOP-PCR), transcription amplification, self-sustained sequence replication, selective amplification of target polynucleotide sequences, consensus sequence primed polymerase chain reaction (CP-PCR), arbitrarily primed polymerase chain reaction (AP-PCR) and nucleic acid sequence based amplification (NASBA).

[0279] Alternative methods for the simultaneous interrogation of multiple regions include quantitative multiplex PCR of short fluorescent fragments (QMPSF), multiplex amplifiable probe hybridization (MAPH) and multiplex ligation-dependent probe amplification (MLPA), in which copy-number differences for up to 40 regions can be scored in one experiment. Another approach can be to specifically target regions that harbor known segmental duplications, which are often sites of copy-number variation. By targeting the variable nucleotides between two copies of a segmental duplication (called paralogous sequence variants) using a SNP-genotyping method that provides independent fluorescence intensities for the two alleles, it is possible to detect an increase in intensity of one allele compared with the other.

[0280] In some embodiments, the amplified piece of DNA can be bound to beads using the sequencing element of the nucleic acid tag under conditions that favor a single amplified piece of DNA molecule to bind a different bead and amplification occurs on each bead. In some embodiments, such amplification can occur by PCR. Each bead can be placed in a separate well, which can be a picoliter-sized well. In some embodiments, each bead is captured within a droplet of a PCR-reaction-mixture-in-oil-emulsion and PCR amplification occurs within each droplet. The amplification on the bead results in each bead carrying at least one million, at least 5 million, or at least 10 million copies of the single amplified piece of DNA molecule.

[0281] In embodiments where PCR occurs in oil-emulsion mixtures, the emulsion droplets are broken, the DNA is denatured and the beads carrying single-stranded nucleic acids clones are deposited into a well, such as a picoliter-sized well, for further analysis according to the methods described herein. These amplification methods allow for the analysis of genomic DNA regions. Methods for using bead amplification followed by fiber optics detection are described in Margulies et al., Nature, 15; 437(7057):376-80 (2005), and as well as in US Publication Application Nos. 20020012930; 20030068629; 20030100102; 20030148344; 20040248161; 20050079510, 20050124022; and 20060078909.

[0282] Another variation on the array-based approach can be to use the hybridization signal intensities that are obtained from the oligonucleotides employed on Affymetrix SNP arrays or in Illumina Bead Arrays. Here hybridization intensities are compared with average values that are derived from controls, such that deviations from these averages indicate a change in copy number. As well as providing information about copy number, SNP arrays have the added advantage of providing genotype information. For example, they can reveal loss of heterozygosity, which could provide supporting evidence for the presence of a deletion, or might indicate segmental uniparental disomy (which can recapitulate the effects of structural variation in some genomic regions—Prader-Willi and Angelman syndromes, for example).

[0283] Many of the basic procedures followed in microarray-based genome profiling are similar, if not identical, to those followed in expression profiling and SNP analysis, including the use of specialized microarray equipment and data-analysis tools. Since microarray-based expression profiling has been well established in the last decade, much can be learned from the technical advances made in this area. Examples of the use of microarrays in nucleic acid analysis that can be used are described in U.S. Pat. Nos. 6,300,063, 5,837,832, 6,969,589, 6,040,138, 6,858,412, U.S. application Ser. No. 08/529,115, U.S. application Ser. No. 10/272,384, U.S. application Ser. No. 10/045,575, U.S. application Ser. No. 10/264,571 and U.S. application Ser. No. 10/264,574. It should be noted that there are also distinct differences such as target and probe complexity, stability of DNA over RNA, the presence of repetitive DNA and the need to identify single copy number alterations in genome profiling.

[0284] In some embodiments, the genetic variations detected comprise CNVs and can be detected using array CGH. In some embodiments, array CGH can be implemented using a wide variety of techniques. The initial approaches used arrays produced from large-insert genomic clones such as bacterial artificial chromosomes (BACs). Producing sufficient BAC DNA of adequate purity to make arrays is arduous, so several techniques to amplify small amounts of starting material have been employed. These techniques include ligation-mediated PCR (Snijders et al., Nat. Genet. 29:263-64), degenerate primer PCR using one or several sets of primers, and rolling circle amplification. BAC arrays that provide complete genome tiling paths are also available. Arrays made from less complex nucleic acids such as cDNAs, selected PCR products, and oligonucleotides can also be used. Although most CGH procedures employ hybridization with total genomic DNA, it is possible to use reduced complexity representations of the genome produced by PCR techniques. Computational analysis of the genome sequence can be used to design array elements complementary to the sequences contained in the representation. Various SNP genotyping platforms, some of which use reduced complexity genomic representations, can be useful for their ability to determine both DNA copy number and allelic content across the genome. In some embodiments, small amounts of genomic DNA can be amplified with a variety of whole genome or whole exome amplification methods prior to CGH analysis of the nucleic acid sample. A “whole exome,” as used herein, includes exons throughout the whole genome that are expressed in genes. Since exon selection has tissue and cell type specificity, these positions may be different in the various cell types resulting from a splice variant or alternative splicing. A “whole genome,” as used herein, includes the entire genetic code of a genome.

[0285] The different basic approaches to array CGH provide different levels of performance, so some are more suitable for particular applications than others. The factors that determine performance include the magnitudes of the copy number changes, their genomic extents, the state and composition of the specimen, how much material is available for analysis, and how the results of the analysis can be used. Many applications use reliable detection of copy number changes of much less than 50%, a more stringent requirement than for other microarray technologies. Note that technical details are extremely important and different implementations of methods using the same array CGH approach can yield different levels of performance. Various CGH methods are known in the art and are equally applicable to one or more methods of the present disclosure. For example, CGH methods are disclosed in U.S. Pat. Nos. 7,030,231; 7,011,949; 7,014,997; 6,977,148; 6,951,761; and 6,916,621, the disclosure from each of which is incorporated by reference herein in its entirety.

[0286] The data provided by array CGH are quantitative measures of DNA sequence dosage. Array CGH provides high-resolution estimates of copy number aberrations, and can be performed efficiently on many nucleic acid samples. The advent of array CGH technology makes it possible to monitor DNA copy number changes on a genomic scale and many projects have been launched for studying the genome in specific diseases.

[0287] In some embodiments, whole genome array-based comparative genome hybridization (array CGH) analysis, or array CGH on a subset of genomic regions, can be used to efficiently interrogate human genomes for genomic imbalances at multiple loci within a single assay. The development of comparative genomic hybridization (CGH) (Kallioniemi et al., Science 258: 818-21 (1992)) provided the first efficient approach to scanning entire genomes for variations in DNA copy number. The importance of normal copy number variation involving large segments of DNA has been unappreciated. Array CGH is a breakthrough technique in human genetics, which is attracting interest from clinicians working in fields as diverse as cancer and IVF (In Vitro Fertilization). The use of CGH microarrays in the clinic holds great promise for identifying regions of genomic imbalance associated with disease. Advances from identifying chromosomal critical regions associated with specific phenotypes to identifying the specific dosage sensitive genes can lead to therapeutic opportunities of benefit to patients. Array CGH is a specific, sensitive and rapid technique that can enable the screening of the whole genome in a single test. It can facilitate and accelerate the screening process in human genetics and is expected to have a profound impact on the screening and counseling of patients with genetic disorders. It is now possible to identify the exact location on the chromosome where an aberration has occurred and it is possible to map these changes directly onto the genomic sequence.

[0288] An array CGH approach provides a robust method for carrying out a genome-wide scan to find novel copy number variants (CNVs). The array CGH methods can use labeled fragments from a genome of interest, which can be competitively hybridized with a second differentially labeled genome to arrays that are spotted with cloned DNA fragments, revealing copy-number differences between the two genomes. Genomic clones (for example, BACs), cDNAs, PCR products and oligonucleotides, can all be used as array targets. The use of array CGH with BACs was one of the earliest employed methods and is popular, owing to the extensive coverage of the genome it provides, the availability of reliable mapping data and ready access to clones. The last of these factors is important both for the array experiments themselves, and for confirmatory FISH experiments.

[0289] In a typical CGH measurement, total genomic DNA is isolated from control and reference subjects, differentially labeled, and hybridized to a representation of the genome that allows the binding of sequences at different genomic locations to be distinguished. More than two genomes can be compared simultaneously with suitable labels. Hybridization of highly repetitive sequences is typically suppressed by the inclusion of unlabeled Cot-1 DNA in the reaction. In some embodiments of array CGH, it is beneficial to mechanically shear the genomic DNA in a nucleic acid sample, for example, with sonication, prior to its labeling and hybridization step. In another embodiment, array CGH may be performed without use of Cot-1 DNA or a sonication step in the preparation of the genomic DNA in a nucleic acid sample. The relative hybridization intensity of the test and reference signals at a given location can be proportional to the relative copy number of those sequences in the test and reference genomes. If the reference genome is normal then increases and decreases in signal intensity ratios directly indicate DNA copy number variation within the genome of the test cells. Data are typically normalized so that the modal ratio for the genome is set to some standard value, typically 1.0 on a linear scale or 0.0 on a logarithmic scale. Additional measurements such as FISH or flow cytometry can be used to determine the actual copy number associated with a ratio level.

[0290] In some embodiments, an array CGH procedure can include the following steps. First, large-insert clones, for example, BACs can be obtained from a supplier of clone libraries. Then, small amounts of clone DNA can be amplified, for example, by degenerate oligonucleotide-primed (DOP) PCR or ligation-mediated PCR in order to obtain sufficient quantities needed for spotting. Next, PCR products can be spotted onto glass slides using, for example, microarray robots equipped with high-precision printing pins. Depending on the number of clones to be spotted and the space available on the microarray slide, clones can either be spotted once per array or in replicate. Repeated spotting of the same clone on an array can increase precision of the measurements if the spot intensities are averaged, and allows for a detailed statistical analysis of the quality of the experiments. Subject and control DNAs can be labeled, for example, with either Cy3 or Cy5-dUTP using random priming and can be subsequently hybridized onto the microarray in a solution containing an excess of Cott-DNA to block repetitive sequences. Hybridizations can either be performed manually under a coverslip, in a gasket with gentle rocking or, automatically using commercially available hybridization stations. These automated hybridization stations can allow for an active hybridization process, thereby improving the reproducibility as well as reducing the actual hybridization time, which increases throughput. The hybridized DNAs can be detected through the two different fluorochromes using standard microarray scanning equipment with either a scanning confocal laser or a charge coupled device (CCD) camera-based reader, followed by spot identification using commercially or freely available software packages.

[0291] The use of CGH with arrays that comprise long oligonucleotides (60-100 bp) can improve the detection resolution (in some embodiments, as small as ˜3-5 kb sized CNVs on arrays designed for interrogation of human whole genomes) over that achieved using BACs (limited to 50-100 kb or larger sized CNVs due to the large size of BAC clones). In some embodiments, the resolution of oligonucleotide CGH arrays is achieved via in situ synthesis of 1-2 million unique features/probes per microarray, which can include microarrays available from Roche NimbleGen and Agilent Technologies. In addition to array CGH methods for copy number detection, other embodiments for partial or whole genome analysis of CNVs within a genome include, but are not limited to, use of SNP genotyping microarrays and sequencing methods.

[0292] Another method for copy number detection that uses oligonucleotides can be representational oligonucleotide microarray analysis (ROMA). It is similar to that applied in the use of BAC and CGH arrays, but to increase the signal-to-noise ratio, the ‘complexity’ of the input DNA is reduced by a method called representation or whole-genome sampling. Here the DNA that is to be hybridized to the array can be treated by restriction digestion and then ligated to adapters, which results in the PCR-based amplification of fragments in a specific size-range. As a result, the amplified DNA can make up a fraction of the entire genomic sequence—that is, it is a representation of the input DNA that has significantly reduced complexity, which can lead to a reduction in background noise. Other suitable methods available to the skilled person can also be used, and are within scope of the present disclosure.

[0293] A comparison of one or more genomes relative to one or more other genomes with array CGH, or a variety of other CNV detection methods, can reveal the set of CNVs between two genomes, between one genome in comparison to multiple genomes, or between one set of genomes in comparison to another set of genomes. In some embodiments, an array CGH experiment can be performed by hybridizing a single test genome against a pooled nucleic acid sample of two or more genomes, which can result in minimizing the detection of higher frequency variants in the experiment. In some embodiments, a test genome can be hybridized alone (i.e. one-color detection) to a microarray, for example, using array CGH or SNP genotyping methods, and the comparison step to one or more reference genomes can be performed in silico to reveal the set of CNVs in the test genome relative to the one or more reference genomes. In one preferred embodiment, a single test genome is compared to a single reference genome in a 2-color experiment wherein both genomes are cohybridized to the microarray.

[0294] Array CGH can be used to identify genes that are causative or associated with a particular phenotype, condition, or disease by comparing the set of CNVs found in the affected cohort to the set of CNVs found in an unaffected cohort. An unaffected cohort may consist of any individual unaffected by the phenotype, condition, or disease of interest, but in one preferred embodiment is comprised of individuals or subjects that are apparently healthy (normal). Methods employed for such analyses are described in U.S. Pat. Nos. 7,702,468 and 7,957,913. In some embodiments, candidate genes that are causative or associated (e.g., a biomarker) with a phenotype, condition, or disease will be identified by CNVs that occur in the affected cohort but not in the unaffected cohort. In some embodiments, candidate genes that are causative or associated (e.g., a biomarker) with a phenotype, condition, or disease will be identified by CNVs that occur at a statistically significant higher frequency in the affected cohort as compared their frequency in the unaffected cohort. Thus, CNVs preferentially detected in the affected cohort as compared to the unaffected cohort can serve as beacons of genes that are causative or associated with a particular phenotype, condition, or disease. Methods employed for such analyses are described in U.S. Pat. No. 8,862,410. In some embodiments, CNV detection and comparison methods can result in direct identification of the gene that is causative or associated with phenotype, condition, or disease if the CNVs are found to overlap with or encompass the gene(s). In some embodiments, CNV detection and comparison methods can result in identification of regulatory regions of the genome (e.g., promoters, enhancers, transcription factor binding sites) that regulate the expression of one or more genes that are causative or associated with the phenotype, condition, or disease of interest. In some embodiments, CNV detection and comparison methods can result in identification of a region in the genome in linkage disequilibrium with a genetic variant that is causative or associated with the phenotype, condition, or disease of interest. In another embodiment, CNV detection and comparison methods can result in identification of a region in the genome in linkage disequilibrium with a genetic variant that is protective against the condition or disease of interest.

[0295] Due to the large amount of genetic variation between any two genomes, or two sets (cohorts) of genomes, being compared, one preferred embodiment is to reduce the genetic variation search space by interrogating only CNVs, as opposed to the full set of genetic variants that can be identified in an individual's genome or exome. The set of CNVs that occur only, or at a statistically higher frequency, in the affected cohort as compared to the unaffected cohort can then be further investigated in targeted sequencing experiments to reveal the full set of genetic variants (of any size or type) that are causative or associated (e.g., a biomarker) with a phenotype, condition, or disease. It can be appreciated to those skilled in the art that the targeted sequencing experiments are performed in both the affected and unaffected cohorts in order to identify the genetic variants (e.g., SNVs and indels) that occur only, or at a statistically significant higher frequency, in the affected individual or cohort as compared to the unaffected cohort. Methods employed for such analyses are described in U.S. Pat. No. 8,862,410.

[0296] A method of screening a subject for a disease or disorder can comprise assaying a nucleic acid sample from the subject to detect sequence information for more than one genetic locus and comparing the sequence information to a panel of nucleic acid biomarkers and screening the subject for the presence or absence of the disease or disorder if one or more of low frequency biomarkers in the panel are present in the sequence information.

[0297] The panel can comprise at least one nucleic acid biomarker (e.g., genetic variation) for each of the more than one genetic loci. For example, the panel can comprise 2, 3, 4, 5, 6, 7, 8, 9, 10, 15, 20, 25, 30, 35, 40, 45, 50, 75, 100, 150, 200 or more nucleic acid biomarkers for each of the more than one genetic locus. In some embodiments, the panel can comprise from about 2-1000 nucleic acid biomarkers. For example, the panel can comprise from about 2-900, 2-800, 2-700, 2-600, 2-500, 2-400, 2-300, 2-200, 2-100, 25-900, 25-800, 25-700, 25-600, 25-500, 25-400, 25-300, 25-200, 25-100, 100-1000, 100-900, 100-800, 100-700, 100-600, 100-500, 100-400, 100-300, 100-200, 200-1000, 200-900, 200-800, 200-700, 200-600, 200-500, 200-400, 200-300, 300-1000, 300-900, 300-800, 300-700, 300-600, 300-500, 300-400, 400-1000, 400-900, 400-800, 400-700, 400-600, 400-500, 500-1000, 500-900, 500-800, 500-700, 500-600, 600-1000, 600-900, 600-800, 600-700, 700-1000, 700-900, 700-800, 800-1000, 800-900, or 900-1000 nucleic acid biomarkers.

[0298] In some embodiments, a biomarker (e.g., genetic variation) can occur at a frequency of 1% or more in a population of subjects without the disease or disorder. For example, a biomarker can occur at a frequency of 10%, 9%, 8%, 7%, 6%, 5%, 4%, 3%, 2%, 1%, or more in a population of subjects without the disease or disorder. In some embodiments, a biomarker can occur at a frequency from about 1%-20% in a population of subjects without the disease or disorder. For example, a biomarker can occur at a frequency of from about 1%-5% or 1%-10%, in a population of subjects without the disease or disorder.

[0299] The panel can comprise at least 2 low frequency biomarkers (e.g., low frequency genetic variations). For example, the panel can comprise at least 2, 3, 4, 5, 6, 7, 8, 9, 10, 11, 12, 3, 14, 15, 15, 17, 18, 19, 20, 25, 30, 35, 40, 45, 50, 55, 60, 65, 70, 75, 80, 85, 90, 95, 100, 125, 150, 175, 200, 250, 500, or 1000 or more low frequency biomarkers. In some embodiments, the panel can comprise from about 2-1000 low frequency biomarkers. For example, the panel can comprise from about 2-900, 2-800, 2-700, 2-600, 2 500, 2-400, 2-300, 2-200, 2-100, 25-900, 25-800, 25-700, 25-600, 25-500, 25-400, 25-300, 25-200, 25-100, 100-1000, 100-900, 100-800, 100-700, 100-600, 100-500, 100-400, 100-300, 100-200, 200-1000, 200-900, 200-800, 200-700, 200-600, 200-500, 200-400, 200-300, 300-1000, 300-900, 300-800, 300-700, 300-600, 300-500, 300-400, 400-1000, 400-900, 400-800, 400-700, 400-600, 400-500, 500-1000, 500-900, 500-800, 500-700, 500-600, 600-1000, 600-900, 600-800, 600-700, 700-1000, 700-900, 700-800, 800-1000, 800 900, or 900-1000 low frequency biomarkers.

[0300] In some embodiments, a low frequency biomarker can occur at a frequency of 1% or less in a population of subjects without the disease or disorder. For example, a low frequency biomarker can occur at a frequency of 0.5%, 0.1%, 0.05%, 0.01%, 0.005%, 0.001%, 0.0005%, or 0.0001% or less in a population of subjects without the disease or disorder. In some embodiments, a low frequency biomarker can occur at a frequency from about 0.0001%-0.1% in a population of subjects without the disease or disorder. For example, a low frequency biomarker can occur at a frequency of from about 0.0001%-0.0005%, 0.0001% 0.001%, 0.0001%-0.005%, 0.0001%-0.01%, 0.0001%-0.05%, 0.0001%-0.1%, 0.0001%-0.5%, 0.0005%-0.001%, 0.0005%-0.005%, 0.0005%-0.01%, 0.0005%-0.05%, 0.0005%-0.1%, 0.0005%-0.5%, 0.0005%-1%, 0.001%-0.005%, 0.001%-0.01%, 0.001%-0.05%, 0.001%-0.1%, 0.001%-0.5%, 0.001%-1%, 0.005%-0.01%, 0.005%-0.05%, 0.005%-0.1%, 0.005%-0.5%, 0.005%-1%, 0.01%-0.05%, 0.01%-0.1%, 0.01%-0.5%, 0.01%-1%, 0.05%-0.1%, 0.05%-0.5%, 0.05%-1%, 0.1%-0.5%, 0.1%-1%, or 0.5%-1% in a population of subjects without the disease or disorder. In another embodiment, genetic biomarker frequencies can range higher (e.g., 0.5% to 5%) and have utility for diagnostic testing or drug development targeting the genes that harbor such variants. Genetic variants of appreciable frequency and phenotypic effect in the general population are sometimes described as goldilocks variants (e.g., see Cohen J Clin Lipidol. 2013 May-June; 7(3 Suppl):S1-5 and Price et al. Am J Hum Genet. 2010 Jun. 11; 86(6):832-8).

[0301] In some embodiments, the presence or absence of the disease or disorder in the subject can be determined with at least 50% confidence. For example, the presence or absence of the disease or disorder in the subject can be determined with at least 50%, 55%, 60%, 65%, 70%, 75%, 80%, 85%, 90%, 95%, 98%, 99%, or 100% confidence. In some embodiments, the presence or absence of the disease or disorder in the subject can be determined with a 50%-100% confidence. For example, the presence or absence of the disease or disorder in the subject can be determined with a 60%-100%, 70%-100%, 80%-100%, 90% 100%, 50%-90%, 50%-80%, 50%-70%, 50%-60%, 60%-90%, 60%-80%, 60%-70%, 70%-90%, 70%-80%, or 80%-90%. In one embodiment, LOAD candidate CNVs and genes or regulatory loci associated with these CNVs can be determined or identified by comparing genetic data from a cohort of normal individuals to that of an individual or a cohort of individuals known to have, or be susceptible to LOAD.

[0302] In one embodiment, LOAD candidate CNV-subregions and genes associated with these regions can be determined or identified by comparing genetic data from a cohort of normal individuals, such as a pre-existing database of CNVs found in normal individuals termed the Normal Variation Engine (NVE), to that of a cohort of individual known to have, or be susceptible to LOAD.

[0303] In some embodiments, a nucleic acid sample from one individual or nucleic acid samples from a pool of 2 or more individuals without LOAD can serve as the reference nucleic acid sample(s) and the nucleic acid sample from an individual known to have LOAD or being tested to determine if they have LOAD can serve as the test nucleic acid sample. In one preferred embodiment, the reference and test nucleic acid samples are sex-matched and co-hybridized on the CGH array. For example, reference nucleic acid samples can be labeled with a fluorophore such as Cy5, using methods described herein, and test subject nucleic acid samples can be labeled with a different fluorophore, such as Cy3. After labeling, nucleic acid samples can be combined and can be co-hybridized to a microarray and analyzed using any of the methods described herein, such as aCGH. Arrays can then be scanned and the data can be analyzed with software. Genetic alterations, such as CNVs, can be called using any of the methods described herein. A list of the genetic alterations, such as CNVs, can be generated for one or more test subjects and/or for one or more reference subjects. Such lists of CNVs can be used to generate a master list of non-redundant CNVs and/or CNV-subregions for each type of cohort. In one embodiment, a cohort of test nucleic acid samples, such as individuals known to have or suspected to have LOAD, can be cohybridized with an identical sex-matched reference individual or sex-matched pool of reference individuals to generate a list of redundant or non-redundant CNVs. Such lists can be based on the presence or absence of one or more CNVs and/or CNV subregions present in individuals within the cohort. In this manner, a master list can contain a number of distinct CNVs and/or CNV-subregions, some of which are uniquely present in a single individual and some of which are present in multiple individuals.

[0304] In some embodiments, CNVs and/or CNV-subregions of interest can be obtained by annotation of each CNV and/or CNV-subregion with relevant information, such as overlap with known genes and/or exons or intergenic regulatory regions such as transcription factor binding sites. In some embodiments, CNVs and/or CNV-subregions of interest can be obtained by calculating the OR for a CNV and/or CNV-subregion according to the following formula: OR=(LOAD/((#individuals in LOAD cohort)−LOAD))/(NVE/((#individuals in NVE cohort)−NVE)), where: LOAD=number of LOAD individuals with a CNV-subregion of interest and NVE=number of NVE subjects with the CNV-subregion of interest. If NVE=0, it can be set to 1 to avoid dealing with infinities in cases where no CNVs are seen in the NVE. In some embodiments, a set of publicly available CNVs (e.g., the Database of Genomic Variants) can be used as the Normal cohort for comparison to the affected cohort CNVs. In another embodiment, the set of Normal cohort CNVs may comprise a private database generated by the same CNV detection method, such as array CGH, or by a plurality of CNV detection methods that include, but are not limited to, array CGH, SNP genotyping arrays, custom CGH arrays, custom genotyping arrays, exome sequencing, whole genome sequencing, targeted sequencing, FISH, q-PCR, or MLPA.

[0305] The number of individuals in any given cohort can be at least about 10, 50, 100, 200, 300, 400, 500, 600, 700, 800, 900, 1000, 2500, 5000, 7500, 10,000, 100,000, or more. In some embodiments, the number of individuals in any given cohort can be from 25-900, 25-800, 25-700, 25-600, 25-500, 25-400, 25-300, 25-200, 25-100, 100-1000, 100-900, 100-800, 100-700, 100-600, 100-500, 100-400, 100-300, 100 200, 200-1000, 200-900, 200-800, 200-700, 200-600, 200-500, 200-400, 200-300, 300-1000, 300-900, 300 800, 300-700, 300-600, 300-500, 300-400, 400-1000, 400-900, 400-800, 400-700, 400-600, 400-500, 500 1000, 500-900, 500-800, 500-700, 500-600, 600-1000, 600-900, 600-800, 600-700, 700-1000, 700-900, 700-800, 800-1000, 800-900, or 900-1000.

[0306] In some embodiments, a method of determining relevance or statistical significance of a genetic variant in a human subject to a disease or a condition associated with a genotype comprising screening a genome of a human subject with the disease or condition, such as by array Comparative Genomic Hybridization, sequencing, or SNP genotyping, to provide information on one or more genetic variants, such as those in Tables 1 and 2. The method can further comprise comparing, such as via a computer, information of said one or more genetic variants from the genome of said subject to a compilation of data comprising frequencies of genetic variants in at least 100 normal human subjects, such as those without the disease or condition. The method can further comprise determining a statistical significance or relevance of said one or more genetic variants from said comparison to the condition or disease or determining whether a genetic variant is present in said human subject but not present in said compilation of data from said comparison, or an algorithm can be used to call or identify significant genetic variations, such as a genetic variation whose median log 2 ratio is above or below a computed value. A computer can comprise computer executable logic that provides instructions for executing said comparison.

[0307] Different categories for CNVs of interest can be defined. In some embodiments, CNVs/CNV-subregions can be of interest if the CNVs/CNV-subregions occur within intergenic regions and are associated with an OR of at least 0.7. For example, CNVs/CNV-subregions can be of interest if the CNVs/CNV-subregions occur within intergenic regions and are associated with an OR of at least 0.7, 0.8, 0.9, 1, 2, 3, 4, 5, 6, 7, 8, 9, 10, 12, 14, 16, 18, 20, 25, 30, 35, 40, 45, 50, 60, 70, 80, 90, 100, 110, 120, 130, 140, 150, 160, 170, 175, or more. In some embodiments, CNVs/CNV-subregions can be of interest if the CNVs/CNV-subregions occur within intergenic regions and are associated with an OR from about 0.7-200, 0.7-200, 0.7-90, 0.7-80, 0.7-70, 0.7-60, 0.7-50, 0.7-40, 0.7-30, 0.7-20, 0.7-10, 0.7-5, 10-200, 10-180, 10 160, 10-140, 10-120, 10-100, 10-80, 10-60, 10-40, 10-20, 20-200, 20-180, 20-160, 20-140, 20-120, 20-100, 20-80, 20-60, 20-40, 30-200, 30-180, 30-160, 30-140, 30-120, 30-100, 30-80, 30-60, 30-40, 40-200, 40 180, 40-160, 40-140, 40-120, 40-100, 40-90, 40-80, 40-70, 40-60, 40-50, 50-200, 50-180, 50-160, 50-140, 50-120, 50-100, 50-90, 50-80, 50-70, 50-60, 60-200, 60-180, 60-160, 60-140, 60-120, 60-100, 60-90, 60-80, 60-70, 70-200, 70-180, 70-160, 70-140, 70-120, 70-100, 70-90, 70-80, 80-200, 80-180, 80-160, 80-140, 80-120, 80-100, 80-90, 90-200, 90-180, 90-160, 90-140, 90-120, or 90-100.

[0308] In some embodiments, CNVs/CNV-subregions can be of interest if the CNV/CNV-subregion overlaps a known gene, and is associated with an OR of at least 1.8. For example, CNVs/CNV-subregions can be of interest if the CNVs/CNV-subregions occur within intergenic regions and are associated with an OR of at least 1.8, 2, 3, 4, 5, 6, 7, 8, 9, 10, 12, 14, 16, 18, 20, 25, 30, 35, 40, 45, 50, 60, 70, 80, 90, 100, 110, 120, 130, 140, 150, 160, 170, 175, or more. In some embodiments, CNVs/CNV-subregions can be of interest if the CNVs/CNV-subregions occur within exonic regions and are associated with an OR from about 1.8-200, 1.8-200, 1.8-90, 1.8-80, 1.8-70, 1.8-60, 1.8-50, 1.8-40, 1.8-30, 1.8-20, 1.8-10, 1.8-5, 10-200, 10-180, 10-160, 10-140, 10-120, 10-100, 10-80, 10-60, 10-40, 10-20, 20-200, 20-180, 20-160, 20-140, 20 120, 20-100, 20-80, 20-60, 20-40, 30-200, 30-180, 30-160, 30-140, 30-120, 30-100, 30-80, 30-60, 30-40, 40-200, 40-180, 40-160, 40-140, 40-120, 40-100, 40-90, 40-80, 40-70, 40-60, 40-50, 50-200, 50-180, 50 160, 50-140, 50-120, 50-100, 50-90, 50-80, 50-70, 50-60, 60-200, 60-180, 60-160, 60-140, 60-120, 60-100, 60-90, 60-80, 60-70, 70-200, 70-180, 70-160, 70-140, 70-120, 70-100, 70-90, 70-80, 80-200, 80-180, 80 160, 80-140, 80-120, 80-100, 80-90, 90-200, 90-180, 90-160, 90-140, 90-120, or 90-100.

[0309] In some embodiments, CNVs/CNV-subregions can be of interest if the CNVs/CNV-subregions are overlapping and/or non-overlapping, impact an exon, and they affect 1 or more LOAD cases but only 0 Normal subjects. In some embodiments, CNVs/CNV-subregions can be of interest if the CNVs/CNV-subregions are overlapping and/or non-overlapping, impact an exon, and they affect 2 or more LOAD cases but only 0 or 1 Normal subjects. In some embodiments, CNVs/CNV-subregions can be of interest if the CNVs/CNV-subregions are overlapping and/or non-overlapping, impact an exon, and they affect 1-5 LOAD cases but only 0 or 1 Normal subjects. For example, CNVs/CNV-subregions can be of interest if the CNVs/CNV-subregions are overlapping and/or non-overlapping, impact an exon, and they affect 1 LOAD case but only 0 or 1 Normal subjects. This can enable identification of rarer CNVs in cases with LOAD. In some embodiments, CNVs/CNV-subregions can be of interest if the CNVs/CNV-subregions are overlapping and/or non-overlapping, impact an exon, and they affect 1 LOAD case but only 0 or 1 Normal subjects, and are associated with an OR greater than 0.7, such as 1.8. In some embodiments, CNVs/CNV-subregions can be of interest if the CNVs/CNV-subregions are overlapping and/or non-overlapping, impact an exon, and they affect 2 LOAD cases but only 0 or 1 Normal subjects. In some embodiments, CNVs/CNV-subregions can be of interest if the CNVs/CNV-subregions are overlapping and/or non-overlapping, impact an exon, and they affect 3 LOAD cases but only 0 or 1 Normal subjects. In some embodiments, CNVs/CNV-subregions can be of interest if the CNVs/CNV-subregions are overlapping and/or non-overlapping, impact an exon, and they affect 4 LOAD cases but only 0 or 1 Normal subjects.

[0310] In some embodiments, CNVs/CNV-subregions can be of interest if the OR associated with the sum of LOAD cases and the sum of NVE subjects affecting the same gene (including distinct CNVs/CNV-subregions) is at least 0.67. For example, a CNV/CNV-subregion can be of interest if the OR associated with the sum of LOAD cases and the sum of NVE subjects affecting the same gene (including distinct CNVs/CNV-subregions) is at least 0.7, 0.8, 0.9, 1, 2, 3, 4, 5, 6, 7, 8, 9, 10, 12, 14, 16, 18, 20, 25, 30, 35, 40, 45, 50, 60, 70, 80, 90, 100, 110, 120, 130, 140, 150, 160, 170, 175, or more. In some embodiments, a CNVs/CNV-subregions can be of interest if the OR associated with the sum of LOAD cases and the sum of NVE subjects affecting the same gene (including distinct CNVs/CNV-subregions) is from about 0.7 200, 0.7-200, 0.7-90, 0.7-80, 0.7-70, 0.7-60, 0.7-50, 0.7-40, 0.7-30, 0.7-20, 0.7-10, 0.7-5, 10-200, 10-180, 10-160, 10-140, 10-120, 10-100, 10-80, 10-60, 10-40, 10-20, 20-200, 20-180, 20-160, 20-140, 20-120, 20 100, 20-80, 20-60, 20-40, 30-200, 30-180, 30-160, 30-140, 30-120, 30-100, 30-80, 30-60, 30-40, 40-200, 40-180, 40-160, 40-140, 40-120, 40-100, 40-90, 40-80, 40-70, 40-60, 40-50, 50-200, 50-180, 50-160, 50 140, 50-120, 50-100, 50-90, 50-80, 50-70, 50-60, 60-200, 60-180, 60-160, 60-140, 60-120, 60-100, 60-90, 60-80, 60-70, 70-200, 70-180, 70-160, 70-140, 70-120, 70-100, 70-90, 70-80, 80-200, 80-180, 80-160, 80 140, 80-120, 80-100, 80-90, 90-200, 90-180, 90-160, 90-140, 90-120, or 90-100.

[0311] In some embodiments, CNVs/CNV-subregions can be of interest if the OR associated with the sum of LOAD cases and the sum of NVE subjects affecting the same gene (including distinct CNVs/CNV-subregions) is at least 1.8. For example, a CNV/CNV-subregion can be of interest if the OR associated with the sum of LOAD cases and the sum of NVE subjects affecting the same gene (including distinct CNVs/CNV-subregions) is at least 1.8, 2, 3, 4, 5, 6, 7, 8, 9, 10, 12, 14, 16, 18, 20, 25, 30, 35, 40, 45, 50, 60, 70, 80, 90, 100, 110, 120, 130, 140, 150, 160, 170, 175, or more. In some embodiments, a CNVs/CNV-subregions can be of interest if the OR associated with the sum of LOAD cases and the sum of NVE subjects affecting the same gene (including distinct CNVs/CNV-subregions) is from about 1.8-200, 1.8-200, 1.8 90, 1.8-80, 1.8-70, 1.8-60, 1.8-50, 1.8-40, 1.8-30, 1.8-20, 1.8-10, 1.8-5, 10-200, 10-180, 10-160, 10-140, 10-120, 10-100, 10-80, 10-60, 10-40, 10-20, 20-200, 20-180, 20-160, 20-140, 20-120, 20-100, 20-80, 20 60, 20-40, 30-200, 30-180, 30-160, 30-140, 30-120, 30-100, 30-80, 30-60, 30-40, 40-200, 40-180, 40-160, 40-140, 40-120, 40-100, 40-90, 40-80, 40-70, 40-60, 40-50, 50-200, 50-180, 50-160, 50-140, 50-120, 50 100, 50-90, 50-80, 50-70, 50-60, 60-200, 60-180, 60-160, 60-140, 60-120, 60-100, 60-90, 60-80, 60-70, 70-200, 70-180, 70-160, 70-140, 70-120, 70-100, 70-90, 70-80, 80-200, 80-180, 80-160, 80-140, 80-120, 80-100, 80-90, 90-200, 90-180, 90-160, 90-140, 90-120, or 90-100.

[0312] In some embodiments, CNVs/CNV-subregions can be of interest if the CNVs/CNV-subregions do not overlap (distinct CNV/CNV-subregion), but impact the same gene (or regulatory locus) and are associated with an OR of at least 6 (Genic (distinct CNV-subregions); OR >6). For example, CNVs/CNV-subregions can be of interest if the CNVs/CNV-subregions do not overlap, but impact the same gene (or regulatory locus), and are associated with an OR of at 7, 8, 9, 10, 12, 14, 16, 18, 20, 25, 30, 35, 40, 45, 50, or more. In some embodiments, CNVs/CNV-subregions can be of interest if the CNVs/CNV-subregions do not overlap, but impact the same gene (or regulatory locus), and are associated with an OR from about 6-100, 6-50, 6-40, 6-30, 6-20, 6-10, 6-9, 6-8, 6-7, 8-100, 8-50, 8-40, 8-30, 8-20, 8-10, 10-100, 10-50, 10 40, 10-30, 10-20, 20-100, 20-50, 20-40, 20-30, 30-100, 30-50, 30-40, 40-100, 40-50, 50-100, or 5-7. The CNV-subregion/gene can be an exonic or intronic part of the gene, or both.

[0313] In some embodiments, CNVs/CNV-subregions can be of interest if the CNVs/CNV-subregions do not overlap a known gene (e.g., are non-genic or intergenic) and they are associated with an OR of at least 7 (Exon+ve, LOAD >4, NVE<2). For example, CNVs/CNV-subregions can be of interest if the CNVs/CNV-subregion does not overlap a known gene (e.g., is non-genic or intergenic) and/or non-overlapping, impact an exon, affect 2 or more LOAD cases but only 0 or 1 Normal subjects and are associated with an OR of at least 8, 9, 10, 11, 12, 14, 16, 18, 20, 25, 30, 35, 40, 45, 50, or more. In some embodiments, CNVs/CNV-subregions can be of interest if the CNVs/CNV-subregions are overlapping and/or non-overlapping, impact an exon, affect 2 or more LOAD cases but only 0 or 1 Normal subjects and are associated with an OR from about 7-100, 7-50, 7-40, 7-30, 7-20, 20-100, 20-50, 20-40, 20-30, 30-100, 30-50, 30-40, 40-100, 40-50, 50-100, or 7-11.

[0314] In some embodiments, CNVs/CNV-subregions can be of interest if the CNVs/CNV-subregions are overlapping and/or non-overlapping, impact an exon, and they affect 1-5 LOAD cases but only 0 or 1 Normal subjects. This can enable identification of rarer CNVs in cases with LOAD. In some embodiments, CNVs/CNV-subregions can be of interest if the CNVs/CNV-subregions are overlapping and/or non-overlapping, impact an exon, and they affect 1 LOAD case but only 0 or 1 Normal subjects, and are associated with an OR greater than 1, such as 1.47, or from 1-2.5. In some embodiments, CNVs/CNV-subregions can be of interest if the CNVs/CNV-subregions are overlapping and/or non-overlapping, impact an exon, and they affect 2 LOAD cases but only 0 or 1 Normal subjects and are associated with an OR greater than 2.5, such as 2.95, or from 2.5-4. In some embodiments, CNVs/CNV-subregions can be of interest if the CNVs/CNV-subregions are overlapping and/or non-overlapping, impact an exon, and they affect 3 LOAD cases but only 0 or 1 Normal subjects and are associated with an OR greater than 4, such as 4.44, or from 4-5.5. In some embodiments, CNVs/CNV-subregions can be of interest if the CNVs/CNV-subregions are overlapping and/or non-overlapping, impact an exon, and they affect 4 LOAD cases but only 0 or 1 Normal subjects and are associated with an OR greater than 5.5, such as 5.92, or from 5.5-6.8.

[0315] In some embodiments, CNVs/CNV-subregions can be of interest if the OR associated with the sum of LOAD cases and the sum of NVE subjects affecting the same gene (including distinct CNVs/CNV-subregions) is at least 6. For example, a CNV/CNV-subregion can be of interest if the OR associated with the sum of LOAD cases and the sum of NVE subjects affecting the same gene (including distinct CNVs/CNV-subregions) is at least 7, 8, 9, 10, 12, 14, 16, 18, 20, 25, 30, 35, 40, 45, 50, or more. In some embodiments, a CNVs/CNV-subregions can be of interest if the OR associated with the sum of LOAD cases and the sum of NVE subjects affecting the same gene (including distinct CNVs/CNV-subregions) is from about 6-100, 6-50, 6-40, 6-30, 6-20, 6-10, 6-9, 6-8, 6-7, 8-100, 8-50. 8-40, 8-30, 8-20, 8-10, 10-100, 10-50, 10-40, 10-30, 10-20, 20-100, 20-50, 20-40, 20-30, 30-100, 30-50, 30-40, 40-100, 40-50, 50-100, or 5-7.

[0316] In some embodiments, CNVs/CNV-subregions can be of interest if the CNVs/CNV-subregions impact an intron and they affect 5 or more LOAD cases but only 0 or 1 Normal subjects and they are associated with an OR of at least 7 (Intron+ve, LOAD>4, Nonnals<2). For example, CNVs/CNV-subregions can be of interest if the CNVs/CNV-subregions impact an intron and they affect 5 or more LOAD cases but only 0 or 1 Normal subjects and they are associated with an OR of at least 8, 9, 10, 11, 12, 14, 16, 18, 20, 25, 30, 35, 40, 45, 50, or more. In some embodiments, CNVs/CNV-subregions can be of interest if the CNVs/CNV-subregions impact an intron and they affect 5 or more LOAD cases but only 0 or 1 Normal subjects and they are associated with an OR from about 7-100, 7-50, 7-40, 7-30, 7-20, 20-100, 20-50, 20-40, 20-30, 30-100, 30-50, 30-40, 40-100, 40-50, 50-100, or 7-11. CNVs/CNV-subregions impacting introns can be pathogenic (e.g., such variants can result in alternatively spliced mRNAs or loss of a microRNA binding site, which may deleteriously impact the resulting protein's structure or expression level).

[0317] In some embodiments, CNVs/CNV-subregions can be of interest if the CNVs/CNV-subregions occur within intergenic regions and are associated with an OR of greater than 30 (High OR intergenic (OR>30)). For example, CNVs/CNV-subregions can be of interest if the CNVs/CNV-subregions occur within intergenic regions and are associated with an OR of greater than 31, 32, 33, 34, 35, 40, 45, 50, 66, 60, 65, 70, 75, 80, 85, 90, 95, 100 or more. In some embodiments, CNVs/CNV-subregions can be of interest if the CNVs/CNV-subregions impact occur within intergenic regions and are associated with an OR from about 30-100, 30-90, 30-80, 30-70, 30-60, 30-50, 30-40, 40-100, 40-90, 40-80, 40-70, 40-60, 40-50, 50-100, 50 90, 50-80, 50-70, 50-60, 60-100, 60-90, 60-80, 60-70, 70-100, 70-90, 70-80, 80-100, 80-90, or 90-100.

[0318] In some embodiments, a CNV/CNV-subregion can be of interest if the CNV/CNV-subregion overlaps a known gene, and is associated with an OR of at least 10. In some embodiments, a CNV/CNV-subregion can be of interest if the CNV/CNV-subregion overlaps a known gene, is associated with an OR of at least 6, and if the OR associated with the sum of LOAD cases and the sum of NVE subjects affecting the same gene (including distinct CNV-subregions) is at least 6.

### Methods of Treatment

[0319] Several drugs have been reported in the context of UCD or HA and may be used for treatment of AD or at least for ameliorating one or more symptoms of AD. Several drugs have been reported in the context of UCD or HA and may be used for treatment of LOAD or at least for ameliorating one or more symptoms of LOAD. Medications can include, but are not limited to, carglumic acid, glycerol phenylbutyrate, sodium phenylacetate, sodium benzoate and sodium phenylbutyrate. In some embodiments, an immunosuppressive therapy is classified as an experimental therapy, such as a small molecule therapy (for example, ACER-001 (taste masked sodium phenlbutyrate)), an enzyme replacement therapy (AEB 1102 (for example, pegzilarginase), BB-OTC, PRX-OTC,), a mRNA therapy (for example, ARCT-810), a gene therapy (for instance, DTX301 (AAV8), P-OTC-101, SEL-313), a microbiome metabolic therapy (for instance, KB-195), a fusogen therapy (for instance, SG328). In some cases, drugs developed for use in treatment of classical (AR) urea cycle may be used for treatment of AD. Examples of this include but are not limited to glycerol phenylbutyrate (RAVICTI 0) or taste-masked sodium phenylbutyrate (OLPRUVA™), both of which are small molecule therapies.

[0320] In some cases, earlier treatment of AD patients may include treatment of symptoms such as hyperammonemia. In some cases, an earlier treatment of AD or LOAD may include dietary plans (e.g., the Mediterranean diet, see PMID 29734664, Jin et al. Nutrients. 2018 May 4; 10(5):564) and/or supplements (e.g., medical food brands Milupa UCD 2 and UCD Anamix Junior by Nutricia North America). These may be typically available as over-the-counter (OTC) treatments and include, but are not limited to: low protein diet, low carbohydrate and high protein and fat diet, medium-chain triglyceride (MCT), sodium pyruvate, essential amino acids, L-arginine, L-citrulline (e.g., Cytolline by Solace Nutrition), D-ribose, uridine, and S-adenosyl-1-methionine. Critical care treatments may sometimes be included in the treatment regimen and include, but are not limited to, hemodialysis and liver transplants (e.g., orthotic or cells). Other therapeutic approaches under development include, but are not limited to, nitric oxide (NO) supplementation, mesenchymal stem cells, codon-optimized human OTC mRNA complexed with lipid-based nanoparticles, ammonia consuming bioengineered bacteria (e.g., SYNB 1020 by Synlogic), lactulose, autophagy enhancers, and famesoid X receptor (FXR) agonists. Another experimental therapy is taurine supplementation, which has support from rodent models in the context of taurine deficiency (mouse knockout of SLC6A6, gene alias TAUT) as a cause of HA (e.g., see PMID 30862735, Qvartskhava N. et al. Proc Natl Acad Sci USA. 2019 Mar. 26; 116(13):6313-6318) and HA due to chronic liver injury (i.e., a non-genetic cause of HA) in rats (see PMID 28959615, Heidari R et al. Toxicol Rep. 2016 Apr. 13; 3:870 879). In humans, taurine supplementation (e.g., in the form of homotaurine, which is also known as ALZ-801, Alzhemed, tramiprosate, and Vivimind) is being investigated for treatment of MCI and AD (e.g., see PMID 32733362, Manzano S et al. Front Neurol. 2020 Jul. 7; 11:614 for a review on reported findings) and clinical trials suggest specific subsets of patients may see a greater benefit, such as AD patients homozygous for the APOE4/4 variant (e.g., see PMID 29199323, Abushakra S et al. J Prev Alzheimers Dis. 2016; 3(4):219-228). In MCI patients, homotaurine was found to favorably impact cytokine profiles, which was correlated with an improvement of episodic memory (see PMID 35515001, Toppi E et al. Front Immunol. 2022 Apr. 19; 13:813951). Evidence suggests that AD and/or MCI patients testing positive for one or more deleterious variants in a UCD/HA gene may see a greater benefit from homotaurine supplementation than AD and/or MCI patients without a deleterious variant in a UCD/HA gene. Since lipopolysaccharides (LPSs) from bacteria (e.g., that reside in the gastrointestinal tract of humans) are neurotoxic and have been linked to AD (e.g., see PMID 36293528, Zhao Y et al. Int J Mol Sci. 2022 Oct. 21; 23(20):12671), another potential treatment for AD or to prevent AD in those at risk for developing AD is to administer antibiotics (e.g., see PMID 34946536, Hurkacz M et al. Molecules. 2021 Dec. 9; 26(24):7456). Examples of antibiotics (reviewed by Hurkacz M et al. 2021) that may be useful for treating or preventing AD include, but are not limited to, tetracyclines (e.g., doxycycline and minocycline), cephalosporins (e.g., ceftriaxone), and antibiotics in the ansamycin family (e.g., rifampicin, a rifamycin derivative that is a subclass of the ansamycin family). A hypothesis for the mechanism of action of antibiotic therapy in treatment of AD or preventing AD is reduction of blood levels of ammonia due to secretion by the gut bacteria. Since HA can result from genetic (e.g., presence of one or more deleterious variants in one or more UCD or HA genes) and/or non-genetic factors (e.g., acute/chronic liver injury or gut bacteria), treatment modality for AD patients or subjects at risk of developing AD could include determining if the patient has a UCD/HA genetic subtype. If an AD patient (or MCI patient who is at risk for developing AD) is found to have HA due to genetic and non-genetic factors, it may be be beneficial to treat both sources of HA (e.g., with a urea cycle agent and an antibiotic).

[0321] The present disclosure also includes kits that can be used to treat a condition in animal subjects. These kits comprise one or more immunosuppressive medications and in some embodiments instructions teaching the use of the kit according to the various methods and approaches described herein. Such kits can also include information, such as scientific literature references, package insert materials, clinical trial results, and/or summaries of these and the like, which indicate or establish the activities and/or advantages (or risks and/or disadvantages) of the agent. Such information can be based on the results of various studies, for example, studies using experimental animals involving in vivo models and studies based on human clinical trials. Kits described herein can be provided, marketed and/or promoted to health providers, including physicians, nurses, pharmacists, formulary officials, and the like.

[0322] In some aspects a host cell can be used for testing or administering therapeutics. In some embodiments, a host cell can comprise a nucleic acid comprising expression control sequences operably-linked to a coding region. The host cell can be natural or non-natural. The non-natural host used in aspects of the method can be any cell capable of expressing a nucleic acid of the disclosure including, bacterial cells, fungal cells, insect cells, mammalian cells and plant cells. In some aspects the natural host is a mammalian tissue cell and the non-natural host is a different mammalian tissue cell. Other aspects of the method include a natural host that is a first cell normally residing in a first mammalian species and the non-natural host is a second cell normally residing in a second mammalian species. In another alternative aspect, the method uses a first cell and the second cell that are from the same tissue type. In those aspects of the method where the coding region encodes a mammalian polypeptide, the mammalian polypeptide may be a hormone. In other aspects the coding region may encode a neuropeptide, an antibody, an antimetabolite, or a polypeptide or nucleotide therapeutic.

[0323] Expression control sequences can be those nucleotide sequences, both 5′ and 3′ to a coding region, that are used for the transcription and translation of the coding region in a host organism. Regulatory sequences include a promoter, ribosome binding site, optional inducible elements and sequence elements used for efficient 3′ processing, including polyadenylation. When the structural gene has been isolated from genomic DNA, the regulatory sequences also include those intronic sequences used for splicing of the introns as part of mRNA formation in the target host.

### Formulations, Routes of Administration, and Effective Doses

[0324] Yet another aspect of the present disclosure relates to formulations, routes of administration and effective doses for pharmaceutical compositions comprising an agent or combination of agents of the instant disclosure. Such pharmaceutical compositions can be used to treat a condition (e.g., multiple sclerosis) as described above.

[0325] Compounds of the disclosure can be administered as pharmaceutical formulations including those suitable for oral (including buccal and sub-lingual), rectal, nasal, topical, transdermal patch, pulmonary, vaginal, suppository, or parenteral (including intramuscular, intraarterial, intrathecal, intradermal, intraperitoneal, subcutaneous and intravenous) administration or in a form suitable for administration by aerosolization, inhalation or insufflation. General information on drug delivery systems can be found in Ansel et al., Pharmaceutical Dosage Forms and Drug Delivery Systems (Lippencott Williams & Wilkins, Baltimore Md. (1999).

[0326] In various embodiments, the pharmaceutical composition includes carriers and excipients (including but not limited to buffers, carbohydrates, mannitol, polypeptides, amino acids, antioxidants, bacteriostats, chelating agents, suspending agents, thickening agents and/or preservatives), water, oils including those of petroleum, animal, vegetable or synthetic origin, such as peanut oil, soybean oil, mineral oil, sesame oil and the like, saline solutions, aqueous dextrose and glycerol solutions, flavoring agents, coloring agents, detackifiers and other acceptable additives, adjuvants, or binders, other pharmaceutically acceptable auxiliary substances to approximate physiological conditions, such as pH buffering agents, tonicity adjusting agents, emulsifying agents, wetting agents and the like. Examples of excipients include starch, glucose, lactose, sucrose, gelatin, malt, rice, flour, chalk, silica gel, sodium stearate, glycerol monostearate, talc, sodium chloride, dried skim milk, glycerol, propylene, glycol, water, ethanol and the like. In some embodiments, the pharmaceutical preparation is substantially free of preservatives. In other embodiments, the pharmaceutical preparation can contain at least one preservative. General methodology on pharmaceutical dosage forms is found in Ansel et al., Pharmaceutical Dosage Forms and Drug Delivery Systems (Lippencott, Williams, & Wilkins, Baltimore Md. (1999)). It can be recognized that, while any suitable carrier known to those of ordinary skill in the art can be employed to administer the compositions of this disclosure, the type of carrier can vary depending on the mode of administration.

[0327] Compounds can also be encapsulated within liposomes using well-known technology. Biodegradable microspheres can also be employed as carriers for the pharmaceutical compositions of this disclosure. Suitable biodegradable microspheres are disclosed, for example, in U.S. Pat. Nos. 4,897,268, 5,075,109, 5,928,647, 5,811,128, 5,820,883, 5,853,763, 5,814,344 and 5,942,252.

[0328] The compound can be administered in liposomes or microspheres (or microparticles). Methods for preparing liposomes and microspheres for administration to a subject are well known to those of skill in the art. U.S. Pat. No. 4,789,734, the contents of which are hereby incorporated by reference, describes methods for encapsulating biological materials in liposomes. Essentially, the material is dissolved in an aqueous solution, the appropriate phospholipids and lipids added, and along with surfactants if required, and the material dialyzed or sonicated, as necessary. A review of known methods is provided by G. Gregoriadis, Chapter 14, “Liposomes,” Drug Carriers in Biology and Medicine, pp. 2.sup.87-341 (Academic Press, 1979).

[0329] Microspheres formed of polymers or polypeptides are well known to those skilled in the art, and can be tailored for passage through the gastrointestinal tract directly into the blood stream. Alternatively, the compound can be incorporated and the microspheres, or composite of microspheres, implanted for slow release over a period of time ranging from days to months. See, for example, U.S. Pat. Nos. 4,906,474, 4,925,673 and 3,625,214, and Jein, TIPS 19:155-157 (1998), the contents of which are hereby incorporated by reference.

[0330] The concentration of drug can be adjusted, the pH of the solution buffered and the isotonicity adjusted to be compatible with intravenous injection, as is well known in the art.

[0331] The compounds of the disclosure can be formulated as a sterile solution or suspension, in suitable vehicles, well known in the art. The pharmaceutical compositions can be sterilized by conventional, well-known sterilization techniques, or can be sterile filtered. The resulting aqueous solutions can be packaged for use as is, or lyophilized, the lyophilized preparation being combined with a sterile solution prior to administration. Suitable formulations and additional carriers are described in Remington “The Science and Practice of Pharmacy” (20th Ed., Lippincott Williams & Wilkins, Baltimore MD), the teachings of which are incorporated by reference in their entirety herein.

[0332] The agents or their pharmaceutically acceptable salts can be provided alone or in combination with one or more other agents or with one or more other forms. For example, a formulation can comprise one or more agents in particular proportions, depending on the relative potencies of each agent and the intended indication. For example, in compositions for targeting two different host targets, and where potencies are similar, about a 1:1 ratio of agents can be used. The two forms can be formulated together, in the same dosage unit e.g., in one cream, suppository, tablet, capsule, aerosol spray, or packet of powder to be dissolved in a beverage; or each form can be formulated in a separate unit, e.g., two creams, two suppositories, two tablets, two capsules, a tablet and a liquid for dissolving the tablet, two aerosol sprays, or a packet of powder and a liquid for dissolving the powder, etc.

[0333] The teen “pharmaceutically acceptable salt” means those salts which retain the biological effectiveness and properties of the agents used in the present disclosure, and which are not biologically or otherwise undesirable.

[0334] Typical salts are those of the inorganic ions, such as, for example, sodium, potassium, calcium, magnesium ions, and the like. Such salts include salts with inorganic or organic acids, such as hydrochloric acid, hydrobromic acid, phosphoric acid, nitric acid, sulfuric acid, methanesulfonic acid, p toluenesulfonic acid, acetic acid, fumaric acid, succinic acid, lactic acid, mandelic acid, malic acid, citric acid, tartaric acid or maleic acid. In addition, if the agent(s) contain a carboxyl group or other acidic group, it can be converted into a pharmaceutically acceptable addition salt with inorganic or organic bases. Examples of suitable bases include sodium hydroxide, potassium hydroxide, ammonia, cyclohexylamine, dicyclohexyl-amine, ethanolamine, diethanolamine, triethanolamine, and the like.

[0335] A pharmaceutically acceptable ester or amide refers to those which retain biological effectiveness and properties of the agents used in the present disclosure, and which are not biologically or otherwise undesirable. Typical esters include ethyl, methyl, isobutyl, ethylene glycol, and the like. Typical amides include unsubstituted amides, alkyl amides, dialkyl amides, and the like.

[0336] In some embodiments, an agent can be administered in combination with one or more other compounds, forms, and/or agents, e.g., as described above. Pharmaceutical compositions with one or more other active agents can be formulated to comprise certain molar ratios. For example, molar ratios of about 99:1 to about 1:99 of a first active agent to the other active agent can be used. In some subset of the embodiments, the range of molar ratios of a first active agent: other active agents are selected from about 80:20 to about 20:80; about 75:25 to about 25:75, about 70:30 to about 30:70, about 66:33 to about 33:66, about 60:40 to about 40:60; about 50:50; and about 90:10 to about 10:90. The molar ratio of a first active:other active agents can be about 1:9, and in some embodiments can be about 1:1. The two agents, forms and/or compounds can be formulated together, in the same dosage unit e.g., in one cream, suppository, tablet, capsule, or packet of powder to be dissolved in a beverage; or each agent, form, and/or compound can be formulated in separate units, e.g., two creams, suppositories, tablets, two capsules, a tablet and a liquid for dissolving the tablet, an aerosol spray a packet of powder and a liquid for dissolving the powder, etc.

[0337] If necessary or desirable, the agents and/or combinations of agents can be administered with still other agents. The choice of agents that can be co-administered with the agents and/or combinations of agents of the instant disclosure can depend, at least in part, on the condition being treated. Agents of particular use in the formulations of the present disclosure include, for example, any agent having a therapeutic effect for hyperammonemia, including, e.g., drugs used to treat hyperammonemia.

[0338] The agent(s) (or pharmaceutically acceptable salts, esters or amides thereof) can be administered per se or in the form of a pharmaceutical composition wherein the active agent(s) is in an admixture or mixture with one or more pharmaceutically acceptable carriers. A pharmaceutical composition, as used herein, can be any composition prepared for administration to a subject. Pharmaceutical compositions for use in accordance with the present disclosure can be formulated in conventional manner using one or more physiologically acceptable carriers, comprising excipients, diluents, and/or auxiliaries, e.g., which facilitate processing of the active agents into preparations that can be administered. Proper formulation can depend at least in part upon the route of administration chosen. The agent(s) useful in the present disclosure, or pharmaceutically acceptable salts, esters, or amides thereof, can be delivered to a subject using a number of routes or modes of administration, including oral, buccal, topical, rectal, transdermal, transmucosal, subcutaneous, intravenous, and intramuscular applications, as well as by inhalation.

[0339] For oral administration, the agents can be formulated readily by combining the active agent(s) with pharmaceutically acceptable carriers well known in the art. Such carriers enable the agents of the disclosure to be formulated as tablets, including chewable tablets, pills, dragees, capsules, lozenges, hard candy, liquids, gels, syrups, slurries, powders, suspensions, elixirs, wafers, and the like, for oral ingestion by a subject to be treated. Such formulations can comprise pharmaceutically acceptable carriers including solid diluents or fillers, sterile aqueous media and various non-toxic organic solvents. A solid carrier can be one or more substances which can also act as diluents, flavoring agents, solubilizers, lubricants, suspending agents, binders, preservatives, tablet disintegrating agents, or an encapsulating material. In powders, the carrier generally is a finely divided solid which is a mixture with the finely divided active component. In tablets, the active component generally is mixed with the carrier having the necessary binding capacity in suitable proportions and compacted in the shape and size desired. The powders and tablets preferably contain from about one (1) to about seventy (70) percent of the active compound. Suitable carriers include but are not limited to magnesium carbonate, magnesium stearate, talc, sugar, lactose, pectin, dextrin, starch, gelatin, tragacanth, methylcellulose, sodium carboxymethylcellulose, a low melting wax, cocoa butter, and the like. Generally, the agents of the disclosure can be included at concentration levels ranging from about 0.5%, about 5%, about 10%, about 20%, or about 30% to about 50%, about 60%, about 70%, about 80% or about 90% by weight of the total composition of oral dosage forms, in an amount sufficient to provide a desired unit of dosage.

[0340] Aqueous suspensions for oral use can contain agent(s) of this disclosure with pharmaceutically acceptable excipients, such as a suspending agent (e.g., methyl cellulose), a wetting agent (e.g., lecithin, lysolecithin and/or a long-chain fatty alcohol), as well as coloring agents, preservatives, flavoring agents, and the like.

[0341] In some embodiments, oils or non-aqueous solvents can be used to bring the agents into solution, due to, for example, the presence of large lipophilic moieties. Alternatively, emulsions, suspensions, or other preparations, for example, liposomal preparations, can be used. With respect to liposomal preparations, any known methods for preparing liposomes for treatment of a condition can be used. See, for example, Bangham et al., J. Mol. Biol. 23: 238-252 (1965) and Szoka et al., Proc. Natl Acad. Sci. USA 75: 4194-4198 (1978), incorporated herein by reference. Ligands can also be attached to the liposomes to direct these compositions to particular sites of action. Agents of this disclosure can also be integrated into foodstuffs, e.g., cream cheese, butter, salad dressing, or ice cream to facilitate solubilization, administration, and/or compliance in certain subject populations.

[0342] Pharmaceutical preparations for oral use can be obtained as a solid excipient, optionally grinding a resulting mixture, and processing the mixture of granules, after adding suitable auxiliaries, if desired, to obtain tablets or dragee cores. Suitable excipients are, in particular, fillers such as sugars, including lactose, sucrose, mannitol, or sorbitol; flavoring elements, cellulose preparations such as, for example, maize starch, wheat starch, rice starch, potato starch, gelatin, gum tragacanth, methyl cellulose, hydroxypropylmethyl cellulose, sodium carboxymethylcellulose, and/or polyvinyl pyrrolidone (PVP). If desired, disintegrating agents can be added, such as the cross linked polyvinyl pyrrolidone, agar, or alginic acid or a salt thereof such as sodium alginate. The agents can also be formulated as a sustained release preparation.

[0343] Dragee cores can be provided with suitable coatings. For this purpose, concentrated sugar solutions can be used, which can optionally contain gum arabic, talc, polyvinyl pyrrolidone, carbopol gel, polyethylene glycol, and/or titanium dioxide, lacquer solutions, and suitable organic solvents or solvent mixtures. Dyestuffs or pigments can be added to the tablets or dragee coatings for identification or to characterize different combinations of active agents.

[0344] Pharmaceutical preparations that can be used orally include push fit capsules made of gelatin, as well as soft, sealed capsules made of gelatin and a plasticizer, such as glycerol or sorbitol. The push fit capsules can contain the active ingredients in admixture with filler such as lactose, binders such as starches, and/or lubricants such as talc or magnesium stearate and, optionally, stabilizers. In soft capsules, the active agents can be dissolved or suspended in suitable liquids, such as fatty oils, liquid paraffin, or liquid polyethylene glycols. In addition, stabilizers can be added. All formulations for oral administration should be in dosages suitable for administration.

[0345] Other forms suitable for oral administration include liquid form preparations including emulsions, syrups, elixirs, aqueous solutions, aqueous suspensions, or solid form preparations which are intended to be converted shortly before use to liquid form preparations. Emulsions can be prepared in solutions, for example, in aqueous propylene glycol solutions or can contain emulsifying agents, for example, such as lecithin, sorbitan monooleate, or acacia. Aqueous solutions can be prepared by dissolving the active component in water and adding suitable colorants, flavors, stabilizers, and thickening agents. Aqueous suspensions can be prepared by dispersing the finely divided active component in water with viscous material, such as natural or synthetic gums, resins, methylcellulose, sodium carboxymethylcellulose, and other well-known suspending agents. Suitable fillers or carriers with which the compositions can be administered include agar, alcohol, fats, lactose, starch, cellulose derivatives, polysaccharides, polyvinylpyrrolidone, silica, sterile saline and the like, or mixtures thereof used in suitable amounts. Solid form preparations include solutions, suspensions, and emulsions, and can contain, in addition to the active component, colorants, flavors, stabilizers, buffers, artificial and natural sweeteners, dispersants, thickeners, solubilizing agents, and the like.

[0346] A syrup or suspension can be made by adding the active compound to a concentrated, aqueous solution of a sugar, e.g., sucrose, to which can also be added any accessory ingredients. Such accessory ingredients can include flavoring, an agent to retard crystallization of the sugar or an agent to increase the solubility of any other ingredient, e.g., as a polyhydric alcohol, for example, glycerol or sorbitol.

[0347] When formulating compounds of the disclosure for oral administration, it can be desirable to utilize gastroretentive formulations to enhance absorption from the gastrointestinal (GI) tract. A formulation which is retained in the stomach for several hours can release compounds of the disclosure slowly and provide a sustained release that can be preferred in some embodiments of the disclosure. Disclosure of such gastro-retentive formulations are found in Klausner E. A., et al., Pharm. Res. 20, 1466-73 (2003); Hoffman, A. et al., Int. J. Pharm. 11, 141-53 (2004), Streubel, A., et al. Expert Opin. Drug Deliver. 3, 217-3, and Chavanpatil, M. D. et al., Int. J. Pharm. (2006). Expandable, floating and bioadhesive techniques can be utilized to maximize absorption of the compounds of the disclosure.

[0348] The compounds of the disclosure can be formulated for parenteral administration (e.g., by injection, for example, bolus injection or continuous infusion) and can be presented in unit dose form in ampoules, pre-filled syringes, small volume infusion or in multi-dose containers with an added preservative. The compositions can take such forms as suspensions, solutions, or emulsions in oily or aqueous vehicles, for example, solutions in aqueous polyethylene glycol.

[0349] For injectable formulations, the vehicle can be chosen from those known in art to be suitable, including aqueous solutions or oil suspensions, or emulsions, with sesame oil, corn oil, cottonseed oil, or peanut oil, as well as elixirs, mannitol, dextrose, or a sterile aqueous solution, and similar pharmaceutical vehicles. The formulation can also comprise polymer compositions which are biocompatible, biodegradable, such as poly(lactic-co-glycolic) acid. These materials can be made into micro or nanospheres, loaded with drug and further coated or derivatized to provide superior sustained release performance. Vehicles suitable for periocular or intraocular injection include, for example, suspensions of therapeutic agent in injection grade water, liposomes and vehicles suitable for lipophilic substances. Other vehicles for periocular or intraocular injection are well known in the art.

[0350] In some embodiments, the composition is formulated in accordance with routine procedures as a pharmaceutical composition adapted for intravenous administration to human beings. Typically, compositions for intravenous administration are solutions in sterile isotonic aqueous buffer. Where necessary, the composition can also include a solubilizing agent and a local anesthetic such as lidocaine to ease pain at the site of the injection. Generally, the ingredients are supplied either separately or mixed together in unit dosage form, for example, as a dry lyophilized powder or water free concentrate in a hermetically sealed container such as an ampoule or sachette indicating the quantity of active agent. Where the composition is to be administered by infusion, it can be dispensed with an infusion bottle containing sterile pharmaceutical grade water or saline. Where the composition is administered by injection, an ampoule of sterile water for injection or saline can be provided so that the ingredients can be mixed prior to administration.

[0351] When administration is by injection, the active compound can be formulated in aqueous solutions, specifically in physiologically compatible buffers such as Hanks solution, Ringer's solution, or physiological saline buffer. The solution can contain formulatory agents such as suspending, stabilizing and/or dispersing agents. Alternatively, the active compound can be in powder form for constitution with a suitable vehicle, e.g., sterile pyrogen-free water, before use. In some embodiments, the pharmaceutical composition does not comprise an adjuvant or any other substance added to enhance the immune response stimulated by the peptide. In some embodiments, the pharmaceutical composition comprises a substance that inhibits an immune response to the peptide. Methods of formulation are known in the art, for example, as disclosed in Remington's Pharmaceutical Sciences, latest edition, Mack Publishing Co., Easton P.

[0352] In addition to the formulations described previously, the agents can also be formulated as a depot preparation. Such long acting formulations can be administered by implantation or transcutaneous delivery (for example, subcutaneously or intramuscularly), intramuscular injection or use of a transdermal patch. Thus, for example, the agents can be formulated with suitable polymeric or hydrophobic materials (for example, as an emulsion in an acceptable oil) or ion exchange resins, or as sparingly soluble derivatives, for example, as a sparingly soluble salt.

[0353] In some embodiments, pharmaceutical compositions comprising one or more agents of the present disclosure exert local and regional effects when administered topically or injected at or near particular sites of infection. Direct topical application, e.g., of a viscous liquid, solution, suspension, dimethylsulfoxide (DMSO)-based solutions, liposomal formulations, gel, jelly, cream, lotion, ointment, suppository, foam, or aerosol spray, can be used for local administration, to produce for example, local and/or regional effects. Pharmaceutically appropriate vehicles for such formulation include, for example, lower aliphatic alcohols, polyglycols (e.g., glycerol or polyethylene glycol), esters of fatty acids, oils, fats, silicones, and the like. Such preparations can also include preservatives (e.g., p-hydroxybenzoic acid esters) and/or antioxidants (e.g., ascorbic acid and tocopherol). See also Dermatological Formulations: Percutaneous absorption, Barry (Ed.), Marcel Dekker Incl, 1983.

[0354] Pharmaceutical compositions of the present disclosure can contain a cosmetically or dermatologically acceptable carrier. Such carriers are compatible with skin, nails, mucous membranes, tissues and/or hair, and can include any conventionally used cosmetic or dermatological carrier meeting these requirements. Such carriers can be readily selected by one of ordinary skill in the art. In formulating skin ointments, an agent or combination of agents of the instant disclosure can be formulated in an oleaginous hydrocarbon base, an anhydrous absorption base, a water-in-oil absorption base, an oil-in-water water-removable base and/or a water-soluble base. Examples of such carriers and excipients include, but are not limited to, humectants (e.g., urea), glycols (e.g., propylene glycol), alcohols (e.g., ethanol), fatty acids (e.g., oleic acid), surfactants (e.g., isopropyl myristate and sodium lauryl sulfate), pyrrolidones, glycerol monolaurate, sulfoxides, terpenes (e.g., menthol), amines, amides, alkanes, alkanols, water, calcium carbonate, calcium phosphate, various sugars, starches, cellulose derivatives, gelatin, and polymers such as polyethylene glycols.

[0355] Ointments and creams can, for example, be formulated with an aqueous or oily base with the addition of suitable thickening and/or gelling agents. Lotions can be formulated with an aqueous or oily base and can in general also containing one or more emulsifying agents, stabilizing agents, dispersing agents, suspending agents, thickening agents, or coloring agents. The construction and use of transdermal patches for the delivery of pharmaceutical agents is well known in the art. See, e.g., U.S. Pat. Nos. 5,023,252, 4,992,445 and 5,001,139. Such patches can be constructed for continuous, pulsatile, or on demand delivery of pharmaceutical agents.

[0356] Lubricants which can be used to form pharmaceutical compositions and dosage forms of the disclosure include, but are not limited to, calcium stearate, magnesium stearate, mineral oil, light mineral oil, glycerin, sorbitol, mannitol, polyethylene glycol, other glycols, stearic acid, sodium lauryl sulfate, talc, hydrogenated vegetable oil (e.g., peanut oil, cottonseed oil, sunflower oil, sesame oil, olive oil, corn oil, and soybean oil), zinc stearate, ethyl oleate, ethyl laureate, agar, or mixtures thereof. Additional lubricants include, for example, a syloid silica gel, a coagulated aerosol of synthetic silica, or mixtures thereof. A lubricant can optionally be added, in an amount of less than about 1 weight percent of the pharmaceutical composition.

[0357] The compositions according to the present disclosure can be in any form suitable for topical application, including aqueous, aqueous-alcoholic or oily solutions, lotion or serum dispersions, aqueous, anhydrous or oily gels, emulsions obtained by dispersion of a fatty phase in an aqueous phase (O/W or oil in water) or, conversely, (W/O or water in oil), microemulsions or alternatively microcapsules, microparticles or lipid vesicle dispersions of ionic and/or nonionic type. These compositions can be prepared according to conventional methods. Other than the agents of the disclosure, the amounts of the various constituents of the compositions according to the disclosure are those conventionally used in the art. These compositions in particular constitute protection, treatment or care creams, milks, lotions, gels or foams for the face, for the hands, for the body and/or for the mucous membranes, or for cleansing the skin. The compositions can also consist of solid preparations constituting soaps or cleansing bars.

[0358] Compositions of the present disclosure can also contain adjuvants common to the cosmetic and dermatological fields, such as hydrophilic or lipophilic gelling agents, hydrophilic or lipophilic active agents, preserving agents, antioxidants, solvents, fragrances, fillers, sunscreens, odor-absorbers and dyestuffs. The amounts of these various adjuvants are those conventionally used in the fields considered and, for example, are from about 0.01% to about 20% of the total weight of the composition. Depending on their nature, these adjuvants can be introduced into the fatty phase, into the aqueous phase and/or into the lipid vesicles.

[0359] In some embodiments, ocular viral infections can be effectively treated with ophthalmic solutions, suspensions, ointments or inserts comprising an agent or combination of agents of the present disclosure. Eye drops can be prepared by dissolving the active ingredient in a sterile aqueous solution such as physiological saline, buffering solution, etc., or by combining powder compositions to be dissolved before use. Other vehicles can be chosen, as is known in the art, including but not limited to: balance salt solution, saline solution, water soluble polyethers such as polyethyene glycol, polyvinyls, such as polyvinyl alcohol and povidone, cellulose derivatives such as methylcellulose and hydroxypropyl methylcellulose, petroleum derivatives such as mineral oil and white petrolatum, animal fats such as lanolin, polymers of acrylic acid such as carboxypolymethylene gel, vegetable fats such as peanut oil and polysaccharides such as dextrans, and glycosaminoglycans such as sodium hyaluronate. If desired, additives ordinarily used in the eye drops can be added. Such additives include isotonizing agents (e.g., sodium chloride, etc.), buffer agent (e.g., boric acid, sodium monohydrogen phosphate, sodium dihydrogen phosphate, etc.), preservatives (e.g., benzalkonium chloride, benzethonium chloride, chlorobutanol, etc.), thickeners (e.g., saccharide such as lactose, mannitol, maltose, etc.; e.g., hyaluronic acid or its salt such as sodium hyaluronate, potassium hyaluronate, etc.; e.g., mucopolysaccharide such as chondroitin sulfate, etc.; e.g., sodium polyacrylate, carboxyvinyl polymer, crosslinked polyacrylate, polyvinyl alcohol, polyvinyl pyrrolidone, methyl cellulose, hydroxy propyl methylcellulose, hydroxyethyl cellulose, carboxymethyl cellulose, hydroxy propyl cellulose or other agents known to those skilled in the art).

[0360] The solubility of the components of the present compositions can be enhanced by a surfactant or other appropriate co-solvent in the composition. Such cosolvents include polysorbate 20, 60, and 80, Pluronic F68, F-84 and P-103, cyclodextrin, or other agents known to those skilled in the art. Such co-solvents can be employed at a level of from about 0.0 1% to 2% by weight.

[0361] The compositions of the disclosure can be packaged in multidose form. Preservatives can be preferred to prevent microbial contamination during use. Suitable preservatives include: benzalkonium chloride, thimerosal, chlorobutanol, methyl paraben, propyl paraben, phenylethyl alcohol, edetate disodium, sorbic acid, Onamer M, or other agents known to those skilled in the art. In the prior art ophthalmic products, such preservatives can be employed at a level of from 0.004% to 0.02%. In the compositions of the present application the preservative, preferably benzalkonium chloride, can be employed at a level of from 0.001% to less than 0.01%, e.g., from 0.001% to 0.008%, preferably about 0.005% by weight. It has been found that a concentration of benzalkonium chloride of 0.005% can be sufficient to preserve the compositions of the present disclosure from microbial attack.

[0362] In some embodiments, the agents of the present disclosure are delivered in soluble rather than suspension form, which allows for more rapid and quantitative absorption to the sites of action. In general, formulations such as jellies, creams, lotions, suppositories and ointments can provide an area with more extended exposure to the agents of the present disclosure, while formulations in solution, e.g., sprays, provide more immediate, short-term exposure.

[0363] In some embodiments relating to topical/local application, the pharmaceutical compositions can include one or more penetration enhancers. For example, the formulations can comprise suitable solid or gel phase carriers or excipients that increase penetration or help delivery of agents or combinations of agents of the disclosure across a permeability barrier, e.g., the skin. Many of these penetration-enhancing compounds are known in the art of topical formulation, and include, e.g., water, alcohols (e.g., terpenes like methanol, ethanol, 2-propanol), sulfoxides (e.g., dimethyl sulfoxide, decylmethyl sulfoxide, tetradecylmethyl sulfoxide), pyrrolidones (e.g., 2-pyrrolidone, N-methyl-2-pyrrolidone, N-(2-hydroxyethyl)pyrrolidone), laurocapram, acetone, dimethylacetamide, dimethylformamide, tetrahydrofurfuryl alcohol, L-a-amino acids, anionic, cationic, amphoteric or nonionic surfactants (e.g., isopropyl myristate and sodium lauryl sulfate), fatty acids, fatty alcohols (e.g., oleic acid), amines, amides, clofibric acid amides, hexamethylene lauramide, proteolytic enzymes, a-bisabolol, d-limonene, urea and N,N-diethyl-m-toluamide, and the like. Additional examples include humectants (e.g., urea), glycols (e.g., propylene glycol and polyethylene glycol), glycerol monolaurate, alkanes, alkanols, ORGELASE, calcium carbonate, calcium phosphate, various sugars, starches, cellulose derivatives, gelatin, and/or other polymers. In some embodiments, the pharmaceutical compositions can include one or more such penetration enhancers.

[0364] In some embodiments, the pharmaceutical compositions for local/topical application can include one or more antimicrobial preservatives such as quaternary ammonium compounds, organic mercurials, p-hydroxy benzoates, aromatic alcohols, chlorobutanol, and the like.

[0365] In some embodiments, the pharmaceutical compositions can be orally- or rectally delivered solutions, suspensions, ointments, enemas and/or suppositories comprising an agent or combination of agents of the present disclosure.

[0366] In some embodiments, the pharmaceutical compositions can be aerosol solutions, suspensions or dry powders comprising an agent or combination of agents of the present disclosure. The aerosol can be administered through the respiratory system or nasal passages. For example, one skilled in the art can recognize that a composition of the present disclosure can be suspended or dissolved in an appropriate carrier, e.g., a pharmaceutically acceptable propellant, and administered directly into the lungs using a nasal spray or inhalant. For example, an aerosol formulation comprising an agent can be dissolved, suspended or emulsified in a propellant or a mixture of solvent and propellant, e.g., for administration as a nasal spray or inhalant. Aerosol formulations can contain any acceptable propellant under pressure, such as a cosmetically or dermatologically or pharmaceutically acceptable propellant, as conventionally used in the art.

[0367] An aerosol formulation for nasal administration is generally an aqueous solution designed to be administered to the nasal passages in drops or sprays. Nasal solutions can be similar to nasal secretions in that they are generally isotonic and slightly buffered to maintain a pH of about 5.5 to about 6.5, although pH values outside of this range can additionally be used. Antimicrobial agents or preservatives can also be included in the formulation.

[0368] An aerosol formulation for inhalations and inhalants can be designed so that the agent or combination of agents of the present disclosure is carried into the respiratory tree of the subject when administered by the nasal or oral respiratory route. Inhalation solutions can be administered, for example, by a nebulizer. Inhalations or insufflations, comprising finely powdered or liquid drugs, can be delivered to the respiratory system as a pharmaceutical aerosol of a solution or suspension of the agent or combination of agents in a propellant, e.g., to aid in disbursement. Propellants can be liquefied gases, including halocarbons, for example, fluorocarbons such as fluorinated chlorinated hydrocarbons, hydrochlorofluorocarbons, and hydrochlorocarbons, as well as hydrocarbons and hydrocarbon ethers.

[0369] Halocarbon propellants useful in the present disclosure include fluorocarbon propellants in which all hydrogens are replaced with fluorine, chlorofluorocarbon propellants in which all hydrogens are replaced with chlorine and at least one fluorine, hydrogen-containing fluorocarbon propellants, and hydrogen-containing chlorofluorocarbon propellants. Halocarbon propellants are described in Johnson, U.S. Pat. No. 5,376,359; Byron et al., U.S. Pat. No. 5,190,029; and Purewal et al., U.S. Pat. No. 5,776,434. Hydrocarbon propellants useful in the disclosure include, for example, propane, isobutane, n-butane, pentane, isopentane and neopentane. A blend of hydrocarbons can also be used as a propellant. Ether propellants include, for example, dimethyl ether as well as the ethers. An aerosol formulation of the disclosure can also comprise more than one propellant. For example, the aerosol formulation can comprise more than one propellant from the same class, such as two or more fluorocarbons; or more than one, more than two, more than three propellants from different classes, such as a fluorohydrocarbon and a hydrocarbon. Pharmaceutical compositions of the present disclosure can also be dispensed with a compressed gas, e.g., an inert gas such as carbon dioxide, nitrous oxide or nitrogen.

[0370] Aerosol formulations can also include other components, for example, ethanol, isopropanol, propylene glycol, as well as surfactants or other components such as oils and detergents. These components can serve to stabilize the formulation and/or lubricate valve components.

[0371] The aerosol formulation can be packaged under pressure and can be formulated as an aerosol using solutions, suspensions, emulsions, powders and semisolid preparations. For example, a solution aerosol formulation can comprise a solution of an agent of the disclosure in (substantially) pure propellant or as a mixture of propellant and solvent. The solvent can be used to dissolve the agent and/or retard the evaporation of the propellant. Solvents useful in the disclosure include, for example, water, ethanol and glycols. Any combination of suitable solvents can be use, optionally combined with preservatives, antioxidants, and/or other aerosol components.

[0372] An aerosol formulation can also be a dispersion or suspension. A suspension aerosol formulation can comprise a suspension of an agent or combination of agents of the instant disclosure. Dispersing agents useful in the disclosure include, for example, sorbitan trioleate, oleyl alcohol, oleic acid, lecithin and corn oil. A suspension aerosol formulation can also include lubricants, preservatives, antioxidant, and/or other aerosol components.

[0373] An aerosol formulation can similarly be formulated as an emulsion. An emulsion aerosol formulation can include, for example, an alcohol such as ethanol, a surfactant, water and a propellant, as well as an agent or combination of agents of the disclosure. The surfactant used can be nonionic, anionic or cationic. One example of an emulsion aerosol formulation comprises, for example, ethanol, surfactant, water and propellant. Another example of an emulsion aerosol formulation comprises, for example, vegetable oil, glyceryl monostearate and propane.

[0374] The compounds of the disclosure can be formulated for administration as suppositories. A low melting wax, such as a mixture of triglycerides, fatty acid glycerides, Witepsol S55 (trademark of Dynamite Nobel Chemical, Germany), or cocoa butter is first melted and the active component is dispersed homogeneously, for example, by stirring. The molten homogeneous mixture is then poured into convenient sized molds, allowed to cool, and to solidify.

[0375] The compounds of the disclosure can be formulated for vaginal administration. Pessaries, tampons, creams, gels, pastes, foams or sprays containing in addition to the active ingredient such carriers as are known in the art to be appropriate.

[0376] It is envisioned additionally, that the compounds of the disclosure can be attached releasably to biocompatible polymers for use in sustained release formulations on, in or attached to inserts for topical, intraocular, periocular, or systemic administration. The controlled release from a biocompatible polymer can be utilized with a water soluble polymer to form an instillable formulation, as well. The controlled release from a biocompatible polymer, such as for example, PLGA microspheres or nanospheres, can be utilized in a formulation suitable for intra ocular implantation or injection for sustained release administration, as well any suitable biodegradable and biocompatible polymer can be used.

[0377] In one aspect of the disclosure, the subject's carrier status of any of the genetic variation risk variants described herein, or genetic variants identified via other analysis methods within the genes or regulatory loci that are identified by the CNVs or SNVs described herein, can be used to help determine whether a particular treatment modality, such as any one of the above, or a combination thereof, should be administered. Whether a treatment option such as any of the above mentioned treatment options is administered can be determined based on the presence or absence of a particular genetic variation risk variant in the individual, or by monitoring expression of genes that are associated with the variants of the present disclosure. Expression levels and/or mRNA levels can thus be determined before and during treatment to monitor its effectiveness. Alternatively, or concomitantly, the status with respect to a genetic variation, and or genotype and/or haplotype status of at least one risk variant for LOAD presented herein can be determined before and during treatment to monitor its effectiveness. It can also be appreciated by those skilled in the art that aberrant expression levels of a gene impacted by a CNV or other mutations found as a consequence of targeted sequencing of the CNV-identified gene can be assayed or diagnostically tested for by measuring the polypeptide expression level of said aberrantly expressed gene. In another embodiment, aberrant expression levels of a gene may result from a CNV impacting a DNA sequence (e.g., transcription factor binding site) that regulates a gene whose aberrant expression level is involved in or causes LOAD, or other mutations found as a consequence of targeted sequencing of the CNV-identified gene regulatory sequence, can be assayed or diagnostically tested for by measuring the polypeptide expression level of the gene involved in or causative of LOAD. In some embodiments, a specific CNV mutation within a gene, or other specific mutations found upon targeted sequencing of a CNV-identified gene found to be involved in or causative of LOAD, may cause an aberrant structural change in the expressed polypeptide that results from said gene mutations and the altered polypeptide structure(s) can be assayed via various methods know to those skilled in the art.

[0378] Alternatively, biological networks or metabolic pathways related to the genes within, or associated with, the genetic variations described herein can be monitored by determining mRNA and/or polypeptide levels. This can be done for example, by monitoring expression levels of polypeptides for several genes belonging to the network and/or pathway in nucleic acid samples taken before and during treatment. Alternatively, metabolites belonging to the biological network or metabolic pathway can be determined before and during treatment. Effectiveness of the treatment is determined by comparing observed changes in expression levels/metabolite levels during treatment to corresponding data from healthy subjects.

[0379] In some embodiments, the genetic variations described herein and/or those subsequently found (e.g., via other genetic analysis methods such as sequencing) via targeted analysis of those genes initially identified by the genetic variations described herein, can be used to prevent adverse effects associated with a therapeutic agent, such as during clinical trials. For example, individuals who are carriers of at least one at-risk genetic variation can be more likely to respond negatively to a therapeutic agent, such as an immunosuppressive agent. For example, carriers of certain genetic variants may be more likely to show an adverse response to the therapeutic agent. In some embodiments, one or more of the genetic variations employed during clinical trials for a given therapeutic agent can be used in a companion diagnostic test that is administered to the patient prior to administration of the therapeutic agent to determine if the patient is likely to have a favorable or an adverse response to the therapeutic agent.

[0380] The genetic variations described herein can be used for determining whether a subject is administered a pharmaceutical agent, such as a urea cycle agent. Certain combinations of variants, including those described herein, but also combinations with other risk variants for LOAD, can be suitable for one selection of treatment options, while other variant combinations can be suitable for selection of other treatment options. Such combinations of variants can include one variant, two variants, three variants, or four or more variants, as needed to determine with clinically reliable accuracy the selection of treatment module. In another embodiment, information from testing for the genetic variations described herein, or other rare genetic variations in or near the genes described herein, may be combined with information from other types of testing for selection of treatment options.

### Kits

[0381] Kits useful in the methods of the disclosure comprise components useful in any of the methods described herein, including for example, primers for nucleic acid amplification, hybridization probes for detecting genetic variation, or other marker detection, restriction enzymes, nucleic acid probes, optionally labeled with suitable labels, allele-specific oligonucleotides, antibodies that bind to an altered polypeptide encoded by a nucleic acid of the disclosure as described herein or to a wild type polypeptide encoded by a nucleic acid of the disclosure as described herein, means for amplification of genetic variations or fragments thereof, means for analyzing the nucleic acid sequence of nucleic acids comprising genetic variations as described herein, means for analyzing the amino acid sequence of a polypeptide encoded by a genetic variation, or a nucleic acid associated with a genetic variation, etc. The kits can for example, include necessary buffers, nucleic acid primers for amplifying nucleic acids, and reagents for allele-specific detection of the fragments amplified using such primers and necessary enzymes (e.g., DNA polymerase). Additionally, kits can provide reagents for assays to be used in combination with the methods of the present disclosure, for example, reagents for use with other screening assays for LOAD.

[0382] In some embodiments, the disclosure pertains to a kit for assaying a nucleic acid sample from a subject to detect the presence of a genetic variation, wherein the kit comprises reagents necessary for selectively detecting at least one particular genetic variation in the genome of the individual. In some embodiments, the disclosure pertains to a kit for assaying a nucleic acid sample from a subject to detect the presence of at least one particular allele of at least one polymorphism associated with a genetic variation in the genome of the subject. In some embodiments, the reagents comprise at least one contiguous oligonucleotide that hybridizes to a fragment of the genome of the individual comprising at least genetic variation. In some embodiments, the reagents comprise at least one pair of oligonucleotides that hybridize to opposite strands of a genomic segment obtained from a subject, wherein each oligonucleotide primer pair is designed to selectively amplify a fragment of the genome of the individual that includes at least one genetic variation, or a fragment of a genetic variation. Such oligonucleotides or nucleic acids can be designed using the methods described herein. In some embodiments, the kit comprises one or more labeled nucleic acids capable of allele-specific detection of one or more specific polymorphic markers or haplotypes with a genetic variation, and reagents for detection of the label. In some embodiments, a kit for detecting SNP markers can comprise a detection oligonucleotide probe, that hybridizes to a segment of template DNA containing a SNP polymorphism to be detected, an enhancer oligonucleotide probe, detection probe, primer and/or an endonuclease, for example, as described by Kutyavin et al., (Nucleic Acid Res. 34:e128 (2006)). In other embodiments, the kit can contain reagents for detecting SNVs and/or CNVs.

[0383] In some embodiments, the DNA template is amplified by any means of the present disclosure, prior to assessment for the presence of specific genetic variations as described herein. Standard methods well known to the skilled person for performing these methods can be utilized, and are within scope of the disclosure. In one such embodiment, reagents for performing these methods can be included in the reagent kit.

[0384] In a further aspect of the present disclosure, a pharmaceutical pack (kit) is provided, the pack comprising a therapeutic agent and a set of instructions for administration of the therapeutic agent to humans screened for one or more variants of the present disclosure, as disclosed herein. The therapeutic agent can be a small molecule drug, an antibody, a peptide, an antisense or RNAi molecule, or other therapeutic molecules as described herein. In some embodiments, an individual identified as a non-carrier of at least one variant of the present disclosure is instructed to take the therapeutic agent. In one such embodiment, an individual identified as a non-carrier of at least one variant of the present disclosure is instructed to take a prescribed dose of the therapeutic agent. In some embodiments, an individual identified as a carrier of at least one variant of the present disclosure is instructed not to take the therapeutic agent. In some embodiments, an individual identified as a carrier of at least one variant of the present disclosure is instructed not to take a prescribed dose of the therapeutic agent. In some embodiments, an individual identified as a carrier of at least one variant of the present disclosure is instructed to take an agent that ameliorates hyperammonemia.

[0385] Also provided herein are articles of manufacture, comprising a probe that hybridizes with a region of human chromosome as described herein and can be used to detect a polymorphism described herein. For example, any of the probes for detecting polymorphisms or genetic variations described herein can be combined with packaging material to generate articles of manufacture or kits. The kit can include one or more other elements including: instructions for use; and other reagents such as a label or an agent useful for attaching a label to the probe. Instructions for use can include instructions for screening applications of the probe for making a diagnosis, prognosis, or theranosis to LOAD in a method described herein. Other instructions can include instructions for attaching a label to the probe, instructions for performing in situ analysis with the probe, and/or instructions for obtaining a nucleic acid sample to be analyzed from a subject. In some cases, the kit can include a labeled probe that hybridizes to a region of human chromosome as described herein.

[0386] The kit can also include one or more additional reference or control probes that hybridize to the same chromosome or another chromosome or portion thereof that can have an abnormality associated with a particular endophenotype. A kit that includes additional probes can further include labels, e.g., one or more of the same or different labels for the probes. In other embodiments, the additional probe or probes provided with the kit can be a labeled probe or probes. When the kit further includes one or more additional probe or probes, the kit can further provide instructions for the use of the additional probe or probes. Kits for use in self-testing can also be provided. Such test kits can include devices and instructions that a subject can use to obtain a nucleic acid sample (e.g., buccal cells, blood) without the aid of a health care provider. For example, buccal cells can be obtained using a buccal swab or brush, or using mouthwash.

[0387] Kits as provided herein can also include a mailer (e.g., a postage paid envelope or mailing pack) that can be used to return the nucleic acid sample for analysis, e.g., to a laboratory. The kit can include one or more containers for the nucleic acid sample, or the nucleic acid sample can be in a standard blood collection vial. The kit can also include one or more of an informed consent form, a test requisition form, and instructions on how to use the kit in a method described herein. Methods for using such kits are also included herein. One or more of the forms (e.g., the test requisition form) and the container holding the nucleic acid sample can be coded, for example, with a bar code for identifying the subject who provided the nucleic acid sample.

[0388] In some embodiments, an in vitro screening test can comprise one or more devices, tools, and equipment configured to collect a nucleic acid sample from an individual. In some embodiments of an in vitro screening test, tools to collect a nucleic acid sample can include one or more of a swab, a scalpel, a syringe, a scraper, a container, and other devices and reagents designed to facilitate the collection, storage, and transport of a nucleic acid sample. In some embodiments, an in vitro screening test can include reagents or solutions for collecting, stabilizing, storing, and processing a nucleic acid sample.

[0389] Such reagents and solutions for nucleotide collecting, stabilizing, storing, and processing are well known by those of skill in the art and can be indicated by specific methods used by an in vitro screening test as described herein. In some embodiments, an in vitro screening test as disclosed herein, can comprise a microarray apparatus and reagents, a flow cell apparatus and reagents, a multiplex nucleotide sequencer and reagents, and additional hardware and software necessary to assay a nucleic acid sample for certain genetic markers and to detect and visualize certain genetic markers.

[0390] The present disclosure further relates to kits for using antibodies in the methods described herein. This includes, but is not limited to, kits for detecting the presence of a variant polypeptide in a test nucleic acid sample. One preferred embodiment comprises antibodies such as a labeled or labelable antibody and a compound or agent for detecting variant polypeptides in a nucleic acid sample, means for determining the amount or the presence and/or absence of variant polypeptide in the nucleic acid sample, and means for comparing the amount of variant polypeptide in the nucleic acid sample with a standard, as well as instructions for use of the kit. In certain embodiments, the kit further comprises a set of instructions for using the reagents comprising the kit.

### Computer-Implemented Aspects

[0391] As understood by those of ordinary skill in the art, the methods and information described herein (genetic variation association with LOAD) can be implemented, in all or in part, as computer executable instructions on known computer readable media. For example, the methods described herein can be implemented in hardware. Alternatively, the method can be implemented in software stored in, for example, one or more memories or other computer readable medium and implemented on one or more processors. As is known, the processors can be associated with one or more controllers, calculation units and/or other units of a computer system, or implanted in firmware as desired. If implemented in software, the routines can be stored in any computer readable memory such as in RAM, ROM, flash memory, a magnetic disk, a laser disk, or other storage medium, as is also known. Likewise, this software can be delivered to a computing device via any known delivery method including, for example, over a communication channel such as a telephone line, the Internet, a wireless connection, etc., or via a transportable medium, such as a computer readable disk, flash drive, etc.

[0392] More generally, and as understood by those of ordinary skill in the art, the various steps described above can be implemented as various blocks, operations, tools, modules and techniques which, in turn, can be implemented in hardware, firmware, software, or any combination of hardware, firmware, and/or software. When implemented in hardware, some or all of the blocks, operations, techniques, etc. can be implemented in, for example, a custom integrated circuit (IC), an application specific integrated circuit (ASIC), a field programmable logic array (FPGA), a programmable logic array (PLA), etc.

[0393] Results from such genotyping can be stored in a data storage unit, such as a data carrier, including computer databases, data storage disks, or by other convenient data storage means. In certain embodiments, the computer database is an object database, a relational database or a post-relational database. Data can be retrieved from the data storage unit using any convenient data query method.

[0394] When implemented in software, the software can be stored in any known computer readable medium such as on a magnetic disk, an optical disk, or other storage medium, in a RAM or ROM or flash memory of a computer, processor, hard disk drive, optical disk drive, tape drive, etc. Likewise, the software can be delivered to a user or a computing system via any known delivery method including, for example, on a computer readable disk or other transportable computer storage mechanism.

[0395] The steps of the claimed methods can be operational with numerous other general purpose or special purpose computing system environments or configurations. Examples of well-known computing systems, environments, and/or configurations that can be suitable for use with the methods or system of the claims include, but are not limited to, personal computers, server computers, hand-held or laptop devices, multiprocessor systems, microprocessor-based systems, set top boxes, programmable consumer electronics, network PCs, minicomputers, mainframe computers, distributed computing environments that include any of the above systems or devices, and the like.

[0396] The steps of the claimed method and system can be described in the general context of computer-executable instructions, such as program modules, being executed by a computer. Generally, program modules include routines, programs, objects, components, and/or data structures that perform particular tasks or implement particular abstract data types. The methods and apparatus can also be practiced in distributed computing environments where tasks are performed by remote processing devices that are linked through a communications network. In both integrated and distributed computing environments, program modules can be located in both local and remote computer storage media including memory storage devices. Numerous alternative embodiments could be implemented, using either current technology or technology developed after the filing date of this application, which would still fall within the scope of the claims defining the disclosure.

[0397] While the risk evaluation system and method, and other elements, have been described as preferably being implemented in software, they can be implemented in hardware, firmware, etc., and can be implemented by any other processor. Thus, the elements described herein can be implemented in a standard multi-purpose CPU or on specifically designed hardware or firmware such as an application-specific integrated circuit (ASIC) or other hard-wired device as desired. When implemented in software, the software routine can be stored in any computer readable memory such as on a magnetic disk, a laser disk, or other storage medium, in a RAM or ROM of a computer or processor, in any database, etc. Likewise, this software can be delivered to a user or a screening system via any known or desired delivery method including, for example, on a computer readable disk or other transportable computer storage mechanism or over a communication channel, for example, a telephone line, the internet, or wireless communication. Modifications and variations can be made in the techniques and structures described and illustrated herein without departing from the spirit and scope of the present disclosure.

[0398] Unless otherwise explained, all technical and scientific terms used herein have the same meaning as commonly understood by one of ordinary skill in the art to which this disclosure belongs. The following references contain embodiments of the methods and compositions that can be used herein: The Merck Manual of Diagnosis and Therapy, 18th Edition, published by Merck Research Laboratories, 2006 (ISBN 0-911910-18-2); Benjamin Lewin, Genes IX, published by Jones & Bartlett Publishing, 2007 (ISBN-13: 9780763740634); Kendrew et al., (eds.), The Encyclopedia of Molecular Biology, published by Blackwell Science Ltd., 1994 (ISBN 0-632-02182-9); and Robert A. Meyers (ed.), Molecular Biology and Biotechnol ogy: a Comprehensive Desk Reference, published by VCH Publishers, Inc., 1995 (ISBN 1-56081-569-8).

[0399] Standard procedures of the present disclosure are described, e.g., in Maniatis et al., Molecular Cloning: A Laboratory Manual, Cold Spring Harbor Laboratory Press, Cold Spring Harbor, N.Y., USA (1982); Sambrook et al., Molecular Cloning: A Laboratory Manual (2 ed.), Cold Spring Harbor Laboratory Press, Cold Spring Harbor, N.Y., USA (1989); Davis et al., Basic Methods in Molecular Biology, Elsevier Science Publishing, Inc., New York, USA (1986); or Methods in Enzymology: Guide to Molecular Cloning Techniques Vol. 152, S. L. Berger and A. R. Kimmerl (eds.), Academic Press Inc., San Diego, USA (1987)). Current Protocols in Molecular Biology (CPMB) (Fred M. Ausubel, et al., ed., John Wiley and Sons, Inc.), Current Protocols in Protein Science (CPPS) (John E. Coligan, et al., ed., John Wiley and Sons, Inc.), Current Protocols in Immunology (CPI) (John E. Coligan, et al., ed. John Wiley and Sons, Inc.), Current Protocols in Cell Biology (CPCB) (Juan S. Bonifacino et al., ed., John Wiley and Sons, Inc.), Culture of Animal Cells: A Manual of Basic Technique by R. Ian Freshney, Publisher: Wiley-Liss; 5th edition (2005), and Animal Cell Culture Methods (Methods in Cell Biology, Vol. 57, Jennie P. Mather and David Barnes editors, Academic Press, 1st edition, 1998), which are all incorporated by reference herein in their entireties.

[0400] It should be understood that the following examples should not be construed as being limiting to the particular methodology, protocols, and compositions, etc., described herein and, as such, can vary. The following terms used herein is for the purpose of describing particular embodiments only, and is not intended to limit the scope of the embodiments disclosed herein.

[0401] Disclosed herein are molecules, materials, compositions, and components that can be used for, can be used in conjunction with, can be used in preparation for, or are products of methods and compositions disclosed herein. It is understood that when combinations, subsets, interactions, groups, etc. of these materials are disclosed and while specific reference of each various individual and collective combinations and permutation of these molecules and compounds cannot be explicitly disclosed, each is specifically contemplated and described herein. For example, if a nucleotide or nucleic acid is disclosed and discussed and a number of modifications that can be made to a number of molecules including the nucleotide or nucleic acid are discussed, each and every combination and permutation of nucleotide or nucleic acid and the modifications that are possible are specifically contemplated unless specifically indicated to the contrary. This concept applies to all aspects of this application including, but not limited to, steps in methods of making and using the disclosed molecules and compositions. Thus, if there are a variety of additional steps that can be performed it is understood that each of these additional steps can be performed with any specific embodiment or combination of embodiments of the disclosed methods, and that each such combination is specifically contemplated and should be considered disclosed.

[0402] Those skilled in the art can recognize, or be able to ascertain using no more than routine experimentation, many equivalents to the specific embodiments of the method and compositions described herein. Such equivalents are intended to be encompassed by the following claims.

[0403] It is understood that the disclosed methods and compositions are not limited to the particular methodology, protocols, and reagents described as these can vary. It is also to be understood that the terminology used herein is for the purpose of describing particular embodiments only, and is not intended to limit the scope of the present disclosure which can be limited only by the appended claims.

[0404] Unless defined otherwise, all technical and scientific terms used herein have the meanings that would be commonly understood by one of skill in the art in the context of the present specification.

[0405] It should be noted that as used herein and in the appended claims, the singular forms “a,” “an,” and “the” include plural reference unless the context clearly dictates otherwise. Thus, for example, reference to “a nucleotide” includes a plurality of such nucleotides; reference to “the nucleotide” is a reference to one or more nucleotides and equivalents thereof known to those skilled in the art, and so forth.

[0406] The term “and/or” shall in the present context be understood to indicate that either or both of the items connected by it are involved. While preferred embodiments of the present disclosure have been shown and described herein, it can be obvious to those skilled in the art that such embodiments are provided by way of example only. Numerous variations, changes, and substitutions can now occur to those skilled in the art without departing from the disclosure. It should be understood that various alternatives to the embodiments of the disclosure described herein can be employed in practicing the disclosure. It is intended that the following claims define the scope of the disclosure and that methods and structures within the scope of these claims and their equivalents be covered thereby.

### EXAMPLES

### Example 1—Standard CNV Analysis

[0407] The data presented in herein was generated on the basis of a comparison of copy number variants (CNVs) identified in 2 cohorts: 1,000 Normal individuals (Normal Variation Engine—NVE); 100 Late-Onset Alzheimer's Disease (LOAD) cases, which are samples obtained from the Oxford Project to Investigate Memory and Ageing (OPTIMA) cohort (University of Oxford, UK). All OPTIMA LOAD cases were diagnosed with AD on the basis of autopsy findings, as opposed to clinical suspicion in living individuals.

Genomic DNA sample hybridization—NVE and LOAD cohorts

[0408] Genomic DNA samples from individuals within the Normal cohort (NVE ‘test’ subjects) and from the LOAD cohort (LOAD ‘test’ subjects) were hybridized against a single, sex-matched reference individual as follows. Reference DNA samples were labeled with Cy5 and test subject DNA samples were labeled with Cy3. After labeling, samples were combined and co-hybridized to Agilent 1M feature oligonucleotide microarrays, design ID 021529 (Agilent Product Number G4447A) using standard conditions (array Comparative Genomic Hybridization—aCGH). Post-hybridization, arrays were scanned at 2 μm resolution, using Agilent's DNA microarray scanner, generating tiff images for later analysis.

[0409] All tiff images were analyzed using Agilent Feature Extraction (FE) software, with the following settings:
[0410] Human Genome Freeze: hg18:NCB136:March2006
[0411] FE version: 10.7.3.1
[0412] Grid/design file: 021529DF20091001
[0413] Protocol: CGH_107_Sep09

[0414] This procedure generates a variety of output files, one of which is a text-tab delimited file, containing ˜1,000,000 rows of data, each corresponding to a specific feature on the array. This *.txt file was used to perform CNV calling using DNAcopy, an open-source software package implemented in R via BioConductor (bioconductor.org/packages/release/bioc/html/DNAcopy.html). Losses or gains were determined according to a threshold log 2ratio, which was set at −/+0.35. In other words, all losses with a log 2ratio value <=−0.35 were counted, as were all gains with a log 2ratio >_+0.35. All log 2ratio values were determined according to Cy3/Cy5 (Test/Reference). A minimum probe threshold for CNV-calling was set at 2 (2 consecutive probes were sufficient to call a CNV). A CNV list was thus generated for each individual in the 2 cohorts.

[0415] There was a total of 161,508 CNVs in the NVE cohort of 1,000 individuals (an average of 162 CNVs per individual). Using custom scripts, these CNVs (many of which appeared in multiple individuals) were ‘merged’ into a master list (NVE-master) of non-redundant CNV-subregions, according to the presence or absence of the CNV-subregion in individuals within the cohort. Using this approach, the NVE-master list has 13,918 distinct CNV-subregions, some of which are uniquely present in a single individual and some of which are present in multiple individuals. For example, consider 3 individuals within the NVE cohort with the following hypothetical CNVs:
[0416] Chr1:1-100,000;
[0417] Chr1:10, 001-100,000;
[0418] Chr1:1-89,999;

[0419] In the master list, these would be merged into 3 distinct CNV subregions, as follows:

| | | |
|---|---|---|
| CNV-subregion 1 | Chr1: 1-10,000 | Patients A, C |
| CNV-subregion 2 | Chr1: 10,001-89,999 | Patients A, B, C |
| CNV-subregion 3 | Chr90,000: 1-100,000 | Patients A, B |

[0420] There was a total of 16,051 CNVs in the LOAD cohort of 100 individuals (an average of 161 CNVs per individual). Using custom scripts, these CNVs (many of which appeared in multiple individuals) were ‘merged’ into a master list (LOAD-master) of non-redundant CNV-subregions, according to the presence or absence of the CNV-subregion in individuals within the cohort. Using this approach, the LOAD-master list has 3,388 distinct CNV-subregions, some of which are uniquely present in a single individual and some of which are present in multiple individuals.

[0421] CNV-subregions of interest were obtained after: Annotation using custom designed scripts in order to attach to each CNV region relevant information regarding overlap with known genes and exons; a calculation of the odds ratio (OR) for each CNV-subregion, according to the following formula:

$$OR = ( LOAD / ( 100 - LOAD ) ) / ( NVE / ( 1000 - NVE ) )$$

where: LOAD=number of LOAD individuals with CNV-subregion of interest and NVE=number of NVE individuals with CNV-subregion of interest

[0422] As an illustrative example, consider the CNV subregion that is the subject of this application, namely chr2:211070190-211076620 (NCBI36/hg18) in Table 1, which is found in 1 individual in the NVE cohort and 3 individuals in the LOAD cohort. The OR is:

(3/(100−3))/(1/(1000−1))=30.90 (to 2 decimal places)

[0423] Note that, by convention, if NVE=0, it is set to 1, in order to avoid dealing with infinities. This has the effect of artificially lowering OR values in cases where none are seen in the NVE.

[0424] Note that in instances wherein the same CNV is detected in multiple individuals, the CNV subregion will be equivalent to the originally detected CNV. Similarly, if a CNV is detected in only one affected individual (e.g., 1 LOAD case) and there are no overlapping CNVs found in the NVE cohort, then the CNV subregion will also be equivalent to the originally detected CNV. This was the situation for all the CNVs reported in Table 1. Therefore, p-values and ORs were simply reported in Table 1, rather than in a second table in which CNV subregions would have been reported.

### Example 2—Single Probe CNV Analysis

[0425] In addition to automated CNV calling using the DNAcopy algorithm, CNVs were ascertained from a Single Probe database consisting of CGH microarray experiments on 1,000 Normal subjects (controls) and 100 LOAD cases. The Single Probe database consists of 1 million data points for each CGH experiment, in an indexed MySQL database (db). Thus, for the 1,100 experiments, there are a total of 1.1 billion data points. Furthermore, for each probe, the standard deviation (stdev) of the ratio reported by the probe was calculated. The stdev for each probe were analyzed according to gender because some probes may have subtle homology to ChrX (less often ChrY), such that ratios between male and female experiments are subtly different. The stdev analysis facilitated the removal of ‘noisy’ probes from further analysis (see further below for a discussion of what may cause ‘noise’).

[0426] Single Probe analysis allows for the identification of CNVs that affect only one probe on the array (e.g., see Table 1). Note that the distance between probes on the array averages to 3Kb (3Gb genome size/1 million probes), such that, even a CNV of 6Kb may affect only one probe.

[0427] Conversely, a CNV of 100 bp could also be detected in this manner. However, such an analysis also allows for the detection of CNVs affecting 2 or more probes, some of which are missed by automated calling via DNAcopy (e.g., see Table 1, chr13:99,956,726-99,957,786, which is a 2-probe het loss reported by Agilent probes A_16_P40071581 and A_16_P02848281).

[0428] One issue with calling CNVs on the basis of the behavior of a single probe is that some probes are ‘noisy’. There are two main reasons why a probe may exhibit ‘noise’:

[0429] The probe itself may not yield high signals of Cy3, Cy5 or both. The weaker the Cy dye signals, the greater the noise inherent in a probe. In our database, there is a good correlation between high stdev and low Cy dye signal intensity;

[0430] The probe (average length 60 bp) may overlie a common population variant (e.g., single nucleotide variant), such that those DNA from individuals harboring such a variant will hybridize less well to the probe than DNA that is wild-type in sequence.

[0431] These factors were taken into account when considering whether a single-probe CNV was worthy of consideration. Only probes with low stdev and which did not overlie a variant that was common in the population were taken forward for further analysis. This analysis was based on manual assessment as well as using in house developed scripts to search for variants in the region of the probe.

### Example 3—Targeted Analysis of CNVs in UCD/HA Genes

[0432] Based on the statistically significant finding of 3 LOAD cases with a CPS1 deletion (Table 1, SEQ ID 3; FIG. 1) and the hypothesis that hyperammonemia may be a contributing factor in causing Alzheimer's, we focused our CNV analyses (single-probe or otherwise) on genes that are relevant to ammonia metabolism (urea cycle or other genes). For example, a frequently used resource for rare genetic disorders is the Online Mendelian Inheritance in Man (OMIM): omim.org. To this end, the following algorithm was implemented:

[0433] A list of urea cycle disorder (UCD) genes was generated (e.g., see PubMed PMIDs 20301396 and 25735860), see Table 8. A list of hyperammonemia (HA) genes was generated (e.g., by searching OMIM and UCSC transcript annotation for “ammonia” or “hyperammonemia”), see Table 9 (other genes linked to “ammonia” or “hyperammonemia” that are not reported in Table 8). A non-redundant (nr) list of genes comprising both lists (UCD+HA) was generated (i.e., genes in Table 8 plus Table 9). The nr list of UCD+HA genes was used to generate a file of CNVs (standard+single-probe), from the total list of all CNVs found in this study (100 LOAD+1,000 NVE), which were located within a region 250kb upstream and 250kb downstream of a UCD/HA gene. Note that Tables 1-3 may also include genes whose location is within 250kb of a UCD/HA gene but are not relevant to either UCD or HA (e.g., see SEQ ID 23 in Table 1, where the TSPAN7 gene was directly impacted by a CNV gain but the potentially relevant UCD/HA gene OTC is adjacent to this CNV. Hence, some genes cited in Tables 1-3 do not appear in Tables 8 or 9.

[0434] Only CNVs found in at least one LOAD case were retained. For each CNV (standard+single-probe), Fisher's Exact Test (FET) was used to calculate p-values by comparing numbers of the relevant CNV in cases (LOAD) and control subjects (NVE). Only CNVs with a p-value <0.1 were retained.

[0435] It is well known to those skilled in the art that genetic variants (SNVs, CNVs, etc.) do not need to impact an exon in order to impact the expression of a given gene. Several genome-wide experiments have been performed and reported in the public databases that assist one in determining the potential relevance of a genetic variant. These databases include, but are not limited to, the ENCODE data sets [PMID 22955616, ENCODE Project Consortium Nature 2012 Sep. 6; 489(7414):57-74; PMID 29126249, Davis C et al. Nucleic Acids Res. 2018 Jan. 4; 46(D1):D794-D801] and the GeneCards GeneHancer data sets [PMID 27322403, Stelzer G et al. Curr Protoc Bioinformatics. 2016 Jun. 20; 54:1.30.1-1.30.33; PMID 28605766, Fishilevich S et al. Database (Oxford). 2017 Jan. 1; 2017:bax028]. Examples of annotation from these public resources are shown in FIGS. 2-4, 8, 12, and 13.

### Example 4—Analysis of Frequencies of a CPS1 Deletion Using Publicly Available Data

[0436] While Table 1 presents the full list of CNVs (standard or based on single-probe analysis) relevant to UCD/HA genes, particular focus has been placed on the 3-probe intronic deletion affecting CPS1, which was found in 3/100 LOAD cases versus 1/1,000 NVE samples.

[0437] Further support for disease-associated variants, such as the CPS1 deletion, can be obtained using publicly available data. These include, but are not limited to: 1,000 Genomes Project Phase 3 (1KG Ph3), see PubMed PMID 26432245; Genome Aggregation Database (gnomAD) for structural variants (SV), see PubMed PMID 32461654; Autism database called MSSNG (research.mss.ng) that includes genetic data on unaffected family members of autism patients, see PubMed PMID 32317787); and Database of Genomic Variants (DGV), see PubMed PMID 24174537.

[0438] Table 7 contains a statistical analysis of the frequencies of the 3-probe CPS1 deletion seen in Population Bio's proprietary database (PBio Data), as well as other population databases. Genome coordinates of the aCGH detected deletion in different genome freezes is as follows:
[0439] hg18: chr2:211,070,190-211,076,620
[0440] hg19: chr2:211,361,945-211,368,375
[0441] hg38: chr2:210,497,221-210,503,651

[0442] Below is a list of the data sources:
[0443] gnomAD: gnomad.broadinstitute.org/variant/DEL_2_26674?dataset=gnomadsv_r2_1

[0444] 1,000 genomes, phase 3 data: genome-euro.ucsc.edu/cgi-bin/hgc?hgsid=257297933 ht6Q6jUmfsyJJcriAkYpbgIZcueG&c=chr2&1=2 1136 1944&r=2 11368375 &o=211360862&t=211368609&g=tgpPhase3&i=%2D %2F %3CCNO %3E Database of genomic variants: genome-euro.ucsc.edu/cgi-bin/hgc?hgsid=257303105 tddEbMm4LnGWfbbECciYjos6OAmb&c=chr2&1=211360856&r=21136861 0&o=211360856&t=211368610&g=dgvGold&i=gssvL69036 MSSNG autism database: research.mss.ng

[0445] The results in Table 7 show corroborating statistical analyses for the CPS1 deletion (PBio data); for comparison, the p-value (0.00273) and OR (30.90) originally reported in Table 1 (SEQ ID 3) are also reported in Table 7. The various association tests with publicly available data had p-values of 0.00049-0.03485 and ORs of 5.93-39.59, thereby providing further support for the CPS1 deletion first identified in our cohorts of 100 LOAD cases vs. 1,000 NVE controls.

[0446] Those skilled in the art will note that the precise size of the deletion differs between the one described by Population Bio and that described by the other data sources. This is because the one identified by Population Bio is defined on the basis of Agilent probes involved in the deletion, while the deletion in the other data sources is based on whole genome sequencing analysis which may provide greater accuracy for deletion endpoints. This is illustrated in FIG. 2, which demonstrates the extent of the deletion reported by all the different data sources (data not shown for the MSSNG deletion, but it is essentially equivalent to the other public data, see genome coordinates in Table 7). As would be expected if the aCGH detected CPS1 deletion is the same as reported by WGS methods, the genome coordinates of the deletion from the public data do not extend to the ‘next’ Agilent probe (see FIG. 3 where 5 Agilent probes are displayed but only the middle 3 Agilent probes lie within the WGS detected deletion).

[0447] In summary, FIG. 1 illustrates the observed CNV (aCGH data) in 3/100 LOAD cases and FIGS. 2-4 illustrate the position of the CNV in the context of the gene CPS1, and, in particular, a transcription factor binding site, as well as providing evidence for the functional significance of the deletion, which overlaps a regulatory element that interacts with a promoter element (exon 1) of the CPS1 gene.

### Example 5—Creation of a CPS1 Deletion Assay Using Standard Polymerase Chain Reaction (PCR)

[0448] In order to test whether the CPS1 deletion seen in the LOAD cohort is recurrent (i.e., the deletions are identical in the 3 individuals) and, if so, to facilitate future analysis of larger cohorts for the presence of the CPS1 deletion, we developed a simple PCR-based assay that determines the presence or absence of the deletion, without recourse to a method that uses ratiometric analysis (such as array-based CGH, which is expensive, or other methods such as multiplex ligation dependent amplification—MLPA, which is not as simple).

[0449] Primers were designed to amplify a product, using standard PCR conditions, if and only if the precise CPS1 deletion observed in the aCGH experiments were present in the individual sample being tested. Those skilled in the art will note that this approach converts the detection of a deletion from a ratiometric method (wherein it is necessary to distinguish a signal that is 50% of normal from one that is 100% of normal—namely detection of a 2:1 fold change) to a binary method (wherein the presence of the deletion results in an amplifiable PCR product, while the absence does not) that allows for an unequivocal result.

[0450] The primers (F=forward, R=reverse for detecting the CPS1 deletion, designated as CPS1_del) are as follows (see also Table 6, SEQ IDs 112 and 113):

CPS1_delF
CAGATACTATTTTTGCCAACATGC
CPS1_delR
AGGCAGTGACCCATCAGTATATGT

[0451] The expected PCR product size when deletion is present is 350 bp. When the deletion is absent, these primers will not generate any product, under standard PCR conditions, since they are ˜8 Kb apart in the genome. FIG. 5 demonstrates the presence of the PCR product in a LOAD case with the deletion (Pos. control based on aCGH data), along with an absence of the band in 2 samples without the deletion (Neg. controls 1 and 2 based on aCGH data). FIG. 6 demonstrates that the 3 LOAD cases with the CPS1 deletion (Expt IDs 2693, 2696, and 2719; each run in duplicate) all amplify the same size PCR product, confirming that the deletions are identical in the 3 cases.

### Example 6—Intronic and Intergenic Variants Near UCD/HA Genes

[0452] It is increasingly recognized by those skilled in the art that disease-associated genetic variants (causal or protective) do not need to reside in exons in order to impact the expression of given gene. In fact, regulatory sites (e.g., enhancers and promoters) are frequently located in intronic and intergenic regions and can occur a considerable genomic distance from the gene whose expression they regulate. Large-scale projects such as the Encyclopedia of DNA Elements (ENCODE; e.g., Davis C et al., 2018) and GeneHancer (Fishilevich S et al., 2017) have mapped these regulatory regions on a genome-wide scale, which are available in public databases. Examples of LOAD-associated variants in intronic or intergenic regions of UCD/HA genes are shown in FIGS. 7-13 and are reported in Tables 1 and 10-12.

### Example 7—Targeted Analysis of Other Variants in UCD/HA Genes and CPS1-Relevant Regions

[0453] Based on a methodology (e.g., see U.S. Pat. Nos. 8,862,410 and 10,059,997) for using CNVs first to identify disease-relevant genes and then search for further disease-relevant variants, we modified the approach described in Example 3 to identify associated sequence variants (e.g., SNVs and indels) in HA/UCD genes (see Tables 8 and 9). For this analysis, we used publicly available WGS data from the Alzheimer's Disease Neuroimaging Initiative (ADNI) project. Given the strength of the association (see Tables 1 and 7) for the CPS1 intronic deletion (SEQ IDs 3 and 116 in Table 6, depending on whether the deletion was detected by aCGH or WGS), which overlaps with an enhancer regulatory site (GeneHancer GH02J210503, see FIGS. 3 and 4), we also assessed these regions for variants that may be modulating the expression level of the CPS1 gene.

[0454] ADNI GATK SNV/Indel whole chromosome VCF files were downloaded for all chromosomes, as was a file listing all samples sequenced. Analysis was confined to cases of European (EUR) origin. Comparison data from gnomAD was also restricted to EUR origin, specifically the Non-Finnish European (NFE) subset. A bed file was generated that included the chr, start and stop positions for:
[0455] Table 8 UCD genes
[0456] Table 9 HA genes
[0457] CPS1 intronic deletion (using 1KG Ph3 coordinates)
[0458] GeneHancer Regulatory Element GH02J210503

[0459] In house scripts (including the use of bcftools) were used to extract all variants that lie within the coordinates delineated in the bed file. Multi-allelic variants were split into individual rows. This normalized VCF file was converted into a format suitable as input for the Variant Effect Prediction (VEP) pipeline. After VEP was run, gnomAD 2.1 exome data was queried using ‘bcftools query’ to generate data used for direct comparisons. Final analysis files were created and run through in-house stats scripts to generate final values for Fishers Exact test (FET) p-values and odds ratios (ORs).

[0460] Analysis was restricted to deleterious variants in individuals of EUR origin. All analyses were based on comparisons between numbers of ADNI cases that were heterozygous or homozygous for the variant of interest and gnomAD cases that were either heterozygous or homozygous (using het+hom totals). The ADNI cases were assessed for two subsets: Alzheimer's disease (AD) and mild cognitive impairment (MCI), which is often a precursor condition for AD patients (although not all patients with MCI will develop AD). Variants satisfying the following two criteria were considered of interest: 1) potentially causal variants for which p-values in ADNI AD and/or ADNI MCI cases were <0.05 but >0.05 in ADNI normal (controls), and for which the OR was >1; and 2) potentially protective variants for which p-values in ADNI AD and/or ADNI MCI cases were <0.05 but >0.05 in ADNI normal (controls), and for which the OR was <1.

[0461] Tables 10-12 list the associated sequence variants for the ADNI data sets (AD and MCI subsets). Potentially causal variants (Tables 10 and 11) represent the vast majority of associated variants. Whereas potentially protective variants (2 total) were only found in the MCI subset (Table 12). Only 1 variant (GRCh37/hg19 gnomAD nomenclature: 3-49455323-C-T) is significant in both subsets (AD and MCI) and hence is reported in both Tables 10 and 11.

### Example 8—Treatments for Subjects With UCD and/or HA

[0462] There are multiple treatment options for patients with a UCD or HA. For example, see Ah Mew et al. 2003/2017, Haberle et al. 2019, Soria et al. 2019, and Haberle 2020. Since HA has been linked to AD (Branconnier et al., 1986; Seiler, 2002; Adlimoghaddam et al., 2016; Jin et al., 2018) and we report the presence of UCD and HA variants in LOAD cases (see Tables 1 and 10), it is likely that one or more of these UCD/HA therapies will also benefit AD patients. Table 13 lists FDA-approved therapies that could prove useful in AD patients and Table 14 lists other candidate therapies that are in various stages of drug development (pre-clinical through phase 3). Since mild cognitive impairment (MCI) is often a precursor symptom for those that develop AD, we also report UCD/HA gene variants in ADNI MCI cases that were associated as causal (see Table 11, ORs >1) or protective (see Table 12, ORs <1). While causal variants are typically the focus of association studies, the role of protective variants in modifying disease (e.g., later onset and/or less severe disease course) is increasingly appreciated by those skilled in the art. For example, in AD, protective variants have been reported for the genes APOE (Le Guen Y et al., 2022) and PLCG2 (Solomon S et al., 2022).

[0463] Those skilled in the art think that earlier treatment of AD patients (e.g., in MCI patients who go on to develop AD) may have a greater benefit from therapies for their symptoms (e.g., if hyperammonemia was found as a symptom for AD and/or MCI and/or the patient was found to harbor a deleterious variant in a UCD/HA gene). In addition to a variety of drug treatment approaches (e.g., see Tables 13 and 14), dietary plans (e.g., the Mediterranean diet, see PMID 29734664, Jin et al. Nutrients. 2018 May 4; 10(5):564) and supplements (e.g., medical food brands Milupa UCD 2 and UCD Anamix Junior by Nutricia North America) are additional options for treating hyperammonemia, depending on which UCD/HA gene is impacted. These are typically available as over-the-counter (OTC) treatments and include, but are not limited to: low protein diet, low carbohydrate and high protein and fat diet, medium-chain triglyceride (MCT), sodium pyruvate, essential amino acids, L-arginine, L-citrulline (e.g., Cytolline by Solace Nutrition), D-ribose, uridine, and S-adenosyl-l-methionine. Critical care treatments are sometimes warranted and include, but are not limited to, hemodialysis and liver transplants (e.g., orthotic or cells). Other therapeutic approaches under development include, but are not limited to, nitric oxide (NO) supplementation, mesenchymal stem cells, codon-optimized human OTC mRNA complexed with lipid-based nanoparticles, ammonia consuming bioengineered bacteria (e.g., SYNB 1020 by Synlogic), lactulose, autophagy enhancers, and famesoid X receptor (FXR) agonists. Taurine supplementation (e.g., in the form of homotaurine, which is also known as ALZ-801, Alzhemed, tramiprosate, and Vivimind) is another therapeutic approach under investigation for treatment of AD and/or MCI. Since taurine supplementation has been shown to be beneficial in rodent models for treatment of HA due to acute/chronic liver injury (i.e., a non-genetic cause of HA; e.g., see PMID 28959615, Heidari R et al. Toxicol Rep. 2016 Apr. 13; 3:870 879) as well as taurine deficiency (i.e., a genetic cause of HA; e.g., see see PMID 30862735, Qvartskhava N. et al. Proc Natl Acad Sci USA. 2019 Mar. 26; 116(13):6313-6318), those skilled in the art would infer that AD and/or MCI patients with HA would particularly benefit from taurine supplementation, with or without one or more deleterious UCD/HA variant if they had acute/chronic liver disease. For some patients with AD or at risk of developing AD who are found to have HA, both genetic (presence of one or more deleterious variants in one or more UCD/HA gene) and non-genetic factors (e.g., due to a chronic bacterial infection) may be the reason and the patient would benefit from treatment with a urea cycle agent and an antibiotic. Furthermore, transplant recipients of donor organs (e.g., liver) from individuals with UCD/HA due to a genetic cause may increase the risk of AD and/or MCI in the future. Therefore, it may be useful to screen donor organs for UCD/HA deleterious variants in order to prevent development of AD/MCI in the transplant recipient.

### Example 9—Tables Referenced in This Study (and see Example 12 for Tables 15-18)

TABLE 1
CNVs of interest in this study

| CNV | | | | | | | | | | | | | UCD/HA Gene | |
|---|---|---|---|---|---|---|---|---|---|---|---|---|---|---|
| Analysis | | CNV Start | CNV Stop | CNV | CNV | Normals | LOAD | | | LOAD | RefSeq | Gene | Impacted or | |
| Method | Chr | (hg18) | (hg18) | Size | Type | (n = 1,000) | (n = 100) | p-value | OR | Expt ID | Gene Symbol | Region | Adjacent | SEQ ID |
| single | 1 | 180387776 | 180387835 | 59 | het | 1 | 2 | 0.02311 | 20.39 | 2708 | | Inter. | GLUL | 1 |
| probe | | | | | loss | | | | | | | | | |
| single | 1 | 180387776 | 180387835 | 59 | het | 1 | 2 | 0.02311 | 20.39 | 2770 | | Inter. | GLUL | 1 |
| probe | | | | | loss | | | | | | | | | |
| single | 1 | 180402819 | 180402878 | 59 | het | 0 | 1 | 0.09091 | 30.17 | 2738 | | Inter. | GLUL | 2 |
| probe | | | | | loss | | | | | | | | | |
| std | 2 | 211070190 | 211076620 | 6430 | het | 1 | 3 | 0.00273 | 30.90 | 2693 | CPS1 | Int. | CPS1 | 3 |
| | | | | | loss | | | | | | | | | |
| std | 2 | 211070190 | 211076620 | 6430 | het | 1 | 3 | 0.00273 | 30.90 | 2696 | CPS1 | Int. | CPS1 | 3 |
| | | | | | loss | | | | | | | | | |
| std | 2 | 211070190 | 211076620 | 6430 | het | 1 | 3 | 0.00273 | 30.90 | 2719 | CPS1 | Int. | CPS1 | 3 |
| | | | | | loss | | | | | | | | | |
| single | 2 | 211157863 | 211157922 | 59 | het | 0 | 1 | 0.09091 | 30.17 | 2675 | CPS1 | Int. | CPS1 | 4 |
| probe | | | | | loss | | | | | | | | | |
| single | 2 | 211188302 | 211188361 | 59 | het | 0 | 1 | 0.09091 | 30.17 | 2742 | CPS1 | Int. | CPS1 | 5 |
| probe | | | | | loss | | | | | | | | | |
| std | 6 | 70494075 | 70500457 | 6382 | het | 0 | 1 | 0.09091 | 30.17 | 2713 | LMBRD1 | Int. | LMBRD1 | 6 |
| | | | | | loss | | | | | | | | | |
| single | 6 | 70508442 | 70508501 | 59 | het | 0 | 1 | 0.09091 | 30.17 | 2748 | LMBRD1 | Ex. | LMBRD1 | 7 |
| probe | | | | | loss | | | | | | | | | |
| single | 7 | 65189910 | 65189957 | 47 | hom | 0 | 1 | 0.09091 | 30.17 | 2742 | ASL | Int. | ASL | 8 |
| probe | | | | | loss | | | | | | | | | |
| single | 7 | 95586936 | 95586995 | 59 | het | 0 | 1 | 0.09091 | 30.17 | 2760 | | Inter. | SLC25A13 | 9 |
| probe | | | | | loss | | | | | | | | | |
| std | 8 | 74863205 | 74865354 | 2149 | hom | 0 | 1 | 0.09091 | 30.17 | 2691 | UBE2W | Ex. | TMEM70 | 10 |
| | | | | | loss | | | | | | | | | |
| single | 9 | 132329289 | 132329333 | 44 | gain | 0 | 1 | 0.09091 | 30.17 | 2676 | ASS1 | Ex. | ASS1 | 11 |
| probe | | | | | | | | | | | | | | |
| single | 12 | 108493317 | 108493376 | 59 | het | 0 | 1 | 0.09091 | 30.17 | 2710 | MMAB | Int. | MMAB | 12 |
| probe | | | | | loss | | | | | | | | | |
| single | 13 | 99956726 | 99957786 | 1060 | het | 0 | 1 | 0.09091 | 30.17 | 2736 | PCCA | Int. | PCCA | 13 |
| probe | | | | | loss | | | | | | | | | |
| std | 14 | 22287112 | 22288620 | 1508 | het | 0 | 1 | 0.09091 | 30.17 | 2672 | | Inter. | SLC7A7 | 14 |
| | | | | | loss | | | | | | | | | |
| std | 17 | 6949119 | 6950605 | 1486 | gain | 0 | 1 | 0.09091 | 30.17 | 2758 | ASGR2 | Int. | ACADVL | 15 |
| std | 17 | 17636988 | 17661982 | 24994 | het | 0 | 1 | 0.09091 | 30.17 | 2674 | MIR33B, | Ex. | ATPAF2 | 16 |
| | | | | | loss | | | | | | RAI1, | | | |
| | | | | | | | | | | | SREBF1 | | | |
| std | 19 | 978045 | 996312 | 18267 | het | 0 | 1 | 0.09091 | 30.17 | 2702 | ABCA7, | Ex. | ATP5F1D | 17 |
| | | | | | loss | | | | | | CNN2 | | | |
| single | 23 | 38095453 | 38095512 | 59 | het | 0 | 1 | 0.09091 | 30.17 | 2700 | | Inter. | OTC | 18 |
| probe | | | | | loss | | | | | | | | | |
| single | 23 | 38109666 | 38109725 | 59 | hom | 0 | 1 | 0.09091 | 30.17 | 2764 | OTC | Int. | OTC | 19 |
| probe | | | | | loss | | | | | | | | | |
| std | 23 | 38193273 | 38213781 | 20508 | het | 0 | 1 | 0.09091 | 30.17 | 2732 | | Inter. | OTC | 20 |
| | | | | | loss | | | | | | | | | |
| std | 23 | 38283722 | 38346557 | 62835 | gain | 0 | 1 | 0.09091 | 30.17 | 2687 | TSPAN7 | Ex. | OTC | 21 |
| single | 23 | 38293309 | 38293368 | 59 | gain | 0 | 1 | 0.09091 | 30.17 | 2766 | | Inter. | OTC | 22 |
| probe | | | | | | | | | | | | | | |
| std | 23 | 38370935 | 38516645 | 145710 | gain | 2 | 3 | 0.00637 | 15.43 | 2724 | TSPAN7 | Ex. | OTC | 23 |
| std | 23 | 38370935 | 38516645 | 145710 | gain | 2 | 3 | 0.00637 | 15.43 | 2726 | TSPAN7 | Ex. | OTC | 23 |
| std | 23 | 38370935 | 38516645 | 145710 | gain | 2 | 3 | 0.00637 | 15.43 | 2744 | TSPAN7 | Ex. | OTC | 23 |
| single | 23 | 38396272 | 38396331 | 59 | gain | 0 | 1 | 0.09091 | 30.17 | 2766 | TSPAN7 | Int. | OTC | 24 |
| probe | | | | | | | | | | | | | | |
| std | 23 | 102665128 | 102695017 | 29889 | gain | 0 | 1 | 0.09091 | 30.17 | 2706 | | Inter. | TAFAZZIN | 25 |

[0465] Table 1 lists all CNVs of interest, both standard and those derived on the basis of single probe analysis. The CNVs listed are the original CNVs identified in this study. The column headers in Table 1 are as follows:

[0466] CNV Analysis Method—standard (std) analysis uses the DNAcopy algorithm and single probe analysis uses the custom single probe database; Chr—Chromosome (Chr) harboring the CNV; CNV Start (hg18)—start location of the CNV (NCBI36/hg18 genome coordinates); CNV Stop (hg18)—stop location of the CNV (NCBI36/hg18 genome coordinates); CNV Size—size of the CNV (in the case of CNVs inferred on the basis of a single probe, the size of the relevant Agilent probe is displayed); CNV Type—heterozygous deletion (het loss), homozygous deletion (hom loss), or gain; Nonnals (n=1,000)−in the NVE cohort of 1,000 subjects, the number of normal subjects found with the CNV; LOAD (n=100)−in the LOAD cohort of 100 cases, the number of LOAD cases found with the CNV; p-value—statistical significance using FET (a cutoff of <0.1 was used); OR—odds ratio (OR) value; LOAD Expt ID—Experimental identifier (Expt ID) of the LOAD case whose genome harbors the CNV; RefSeq Gene Symbol—gene symbol used by NCBI's Reference Sequence (RefSeq) database (if blank, the CNV is located in an intergenic region of the genome); Gene Region—lists if the CNV is located in an exonic (Ex.), intronic (Int.), or intergenic (Inter.) region of a gene; UCD/HA Gene Impacted or Adjacent—lists which UCD/HA gene (see Tables 8 and 9) is impacted by the CNV (i.e., is located in an exonic or intronic region) or is adjacent to the CNV (i.e., the CNV is intergenic but a UCD/HA gene is located within 250Kb, see Example 6); SEQ ID—Sequence identification number in the Sequence Listing. All coordinates are based on NCBI36/hg18.

TABLE 2
Genes impacted by exonic or intronic CNVs

| RefSeq | | | | |
|---|---|---|---|---|
| Gene | Gene | NCBI | | |
| Symbol | Alias | Gene ID | Gene Full Name | RefSeq Summary |
| ABCA7 | AD9; | 10347 | ATP-binding cassette | The protein encoded by this gene is a member of the superfamily of ATP- |
| | ABCX; | | sub-family A member | binding cassette (ABC) transporters. ABC proteins transport various |
| | ABCA- | | 7 | molecules across extra- and intra-cellular membranes. ABC genes are |
| | SSN | | | divided into seven distinct subfamilies (ABC1, MDR/TAP, MRP, ALD, |
| | | | | OABP, GCN20, White). This protein is a member of the ABC1 subfamily. |
| | | | | Members of the ABC1 subfamily comprise the only major ABC subfamily |
| | | | | found exclusively in multicellular eukaryotes. This full transporter has |
| | | | | been detected predominantly in myelo-lymphatic tissues with the highest |
| | | | | expression in peripheral leukocytes, thymus, spleen, and bone marrow. |
| | | | | The function of this protein is not yet known; however, the expression |
| | | | | pattern suggests a role in lipid homeostasis in cells of the immune system. |
| | | | | [provided by RefSeq, Jul 2008] |
| ASGR2 | HL-2; | 433 | asialoglycoprotein | This gene encodes a subunit of the asialoglycoprotein receptor. This |
| | HBXBP; | | receptor 2 | receptor is a transmembrane protein that plays a critical role in serum |
| | ASGPR2; | | | glycoprotein homeostasis by mediating the endocytosis and lysosomal |
| | ASGP-R2; | | | degradation of glycoproteins with exposed terminal galactose or N- |
| | CLEC4H2 | | | acetylgalactosamine residues. The asialoglycoprotein receptor may |
| | | | | facilitate hepatic infection by multiple viruses including hepatitis B, and is |
| | | | | also a target for liver-specific drug delivery. The asialoglycoprotein |
| | | | | receptor is a hetero-oligomeric protein composed of major and minor |
| | | | | subunits, which are encoded by different genes. The protein encoded by |
| | | | | this gene is the less abundant minor subunit. Alternatively spliced |
| | | | | transcript variants encoding multiple isoforms have been observed for this |
| | | | | gene. [provided by RefSeq, Jan 2011] |
| ASL | ASAL | 435 | argininosuccinate | This gene encodes a member of the lyase 1 family. The encoded protein |
| | | | lyase | forms a cytosolic homotetramer and primarily catalyzes the reversible |
| | | | | hydrolytic cleavage of argininosuccinate into arginine and fumarate, an |
| | | | | essential step in the liver in detoxifying ammonia via the urea cycle. |
| | | | | Mutations in this gene result in the autosomal recessive disorder |
| | | | | argininosuccinic aciduria, or argininosuccinic acid lyase deficiency. A |
| | | | | nontranscribed pseudogene is also located on the long arm of chromosome |
| | | | | 22. Alternatively spliced transcript variants encoding different isoforms |
| | | | | have been described. [provided by RefSeq, Jul 2008] |
| ASS1 | ASS; | 445 | argininosuccinate | The protein encoded by this gene catalyzes the penultimate step of the |
| | CTLN1 | | synthase 1 | arginine biosynthetic pathway. There are approximately 10 to 14 copies of |
| | | | | this gene including the pseudogenes scattered across the human genome, |
| | | | | among which the one located on chromosome 9 appears to be the only |
| | | | | functional gene for argininosuccinate synthetase. Mutations in the |
| | | | | chromosome 9 copy of this gene cause citrullinemia. Two transcript |
| | | | | variants encoding the same protein have been found for this gene. |
| | | | | [provided by RefSeq, Aug 2012] |
| CNN2 | none | 1265 | calponin 2 | The protein encoded by this gene, which can bind actin, calmodulin, |
| | | | | troponin C, and tropomyosin, may function in the structural organization |
| | | | | of actin filaments. The encoded protein could play a role in smooth muscle |
| | | | | contraction and cell adhesion. Several pseudogenes of this gene have been |
| | | | | identified, and are present on chromosomes 1, 2, 3, 6, 9, 11, 13, 15, 16, 21 |
| | | | | and 22. Alternative splicing results in multiple transcript variants encoding |
| | | | | different isoforms. [provided by RefSeq, Jan 2015] |
| CPS1 | PHN; | 1373 | carbamoyl-phosphate | The mitochondrial enzyme encoded by this gene catalyzes synthesis of |
| | GATD6; | | synthase 1 | carbamoyl phosphate from ammonia and bicarbonate. This reaction is the |
| | CPSASE1 | | | first committed step of the urea cycle, which is important in the removal of |
| | | | | excess urea from cells. The encoded protein may also represent a core |
| | | | | mitochondrial nucleoid protein. Three transcript variants encoding |
| | | | | different isoforms have been found for this gene. The shortest isoform may |
| | | | | not be localized to the mitochondrion. Mutations in this gene have been |
| | | | | associated with carbamoyl phosphate synthetase deficiency, susceptibility |
| | | | | to persistent pulmonary hypertension, and susceptibility to venoocclusive |
| | | | | disease after bone marrow transplantation. [provided by RefSeq, May |
| | | | | 2010] |
| LMBRD1 | NESI; | 55788 | LMBR1 domain | This gene encodes a lysosomal membrane protein that may be involved in |
| | LMBD1; | | containing 1 | the transport and metabolism of cobalamin. This protein also interacts with |
| | MAHCF; | | | the large form of the hepatitis delta antigen and may be required for the |
| | C6orf209 | | | nucleocytoplasmic shuttling of the hepatitis delta virus. Mutations in this |
| | | | | gene are associated with the vitamin B12 metabolism disorder termed, |
| | | | | homocystinuria-megaloblastic anemia complementation type F. [provided |
| | | | | by RefSeq, Oct 2009] |
| MIR33B | MIRN33B; | 693120 | microRNA 33b | microRNAs (miRNAs) are short (20-24 nt) non-coding RNAs that are |
| | mir-33b; | | | involved in post-transcriptional regulation of gene expression in |
| | hsa-mir- | | | multicellular organisms by affecting both the stability and translation of |
| | 33b | | | mRNAs. miRNAs are transcribed by RNA polymerase II as part of capped |
| | | | | and polyadenylated primary transcripts (pri-miRNAs) that can be either |
| | | | | protein-coding or non-coding. The primary transcript is cleaved by the |
| | | | | Drosha ribonuclease III enzyme to produce an approximately 70-nt stem- |
| | | | | loop precursor miRNA (pre-miRNA), which is further cleaved by the |
| | | | | cytoplasmic Dicer ribonuclease to generate the mature miRNA and |
| | | | | antisense miRNA star (miRNA*) products. The mature miRNA is |
| | | | | incorporated into a RNA-induced silencing complex (RISC), which |
| | | | | recognizes target mRNAs through imperfect base pairing with the miRNA |
| | | | | and most commonly results in translational inhibition or destabilization of |
| | | | | the target mRNA. The RefSeq represents the predicted microRNA stem- |
| | | | | loop. [provided by RefSeq, Sep 2009]. |
| MMAB | ATR; cob; | 326625 | metabolism of | This gene encodes a protein that catalyzes the final step in the conversion |
| | cblB; | | cobalamin associated | of vitamin B(12) into adenosylcobalamin (AdoCbl), a vitamin B12- |
| | CFAP23 | | B | containing coenzyme for methylmalonyl-CoA mutase. Mutations in the |
| | | | | gene are the cause of vitamin B12-dependent methylmalonic aciduria |
| | | | | linked to the cblB complementation group. Alternatively spliced transcript |
| | | | | variants have been found. [provided by RefSeq, Apr 2011] |
| OTC | OCTD; | 5009 | ornithine | This nuclear gene encodes a mitochondrial matrix enzyme. The encoded |
| | OTC1; | | transcarbamylase | protein is involved in the urea cycle which functions to detoxify ammonia |
| | OTCD; | | | into urea for excretion. Mutations in this enzyme lead to ornithine |
| | OTCase | | | transcarbamylase deficiency, which causes hyperammonemia. [provided |
| | | | | by RefSeq, May 2022] |
| PCCA | none | 5095 | propionyl-CoA | The protein encoded by this gene is the alpha subunit of the heterodimeric |
| | | | carboxylase subunit | mitochondrial enzyme Propionyl-CoA carboxylase. PCCA encodes the |
| | | | alpha | biotin-binding region of this enzyme. Mutations in either PCCA or PCCB |
| | | | | (encoding the beta subunit) lead to an enzyme deficiency resulting in |
| | | | | propionic acidemia. Multiple transcript variants encoding different |
| | | | | isoforms have been found for this gene. [provided by RefSeq, May 2010] |
| RAI1 | SMS; | 10743 | retinoic acid induced | This gene is located within the Smith-Magenis syndrome region on |
| | SMCR | | 1 | chromosome 17. It is highly similar to its mouse counterpart and is |
| | | | | expressed at high levels mainly in neuronal tissues. The protein encoded |
| | | | | by this gene includes a polymorphic polyglutamine tract in the N-terminal |
| | | | | domain. Expression of the mouse counterpart in neurons is induced by |
| | | | | retinoic acid. This gene is associated with both the severity of the |
| | | | | phenotype and the response to medication in schizophrenic patients. |
| | | | | [provided by RefSeq, Jul 2008] |
| SREBF1 | HMD; | 6720 | sterol regulatory | This gene encodes a basic helix-loop-helix-leucine zipper (bHLH-Zip) |
| | IFAP2; | | element binding | transcription factor that binds to the sterol regulatory element-1 (SRE1), |
| | SREBP1; | | transcription factor 1 | which is a motif that is found in the promoter of the low density |
| | bHLHd1 | | | lipoprotein receptor gene and other genes involved in sterol biosynthesis. |
| | | | | The encoded protein is synthesized as a precursor that is initially attached |
| | | | | to the nuclear membrane and endoplasmic reticulum. Following cleavage, |
| | | | | the mature protein translocates to the nucleus and activates transcription. |
| | | | | This cleaveage is inhibited by sterols. This gene is located within the |
| | | | | Smith-Magenis syndrome region on chromosome 17. Alternative promoter |
| | | | | usage and splicing result in multiple transcript variants, including SREBP- |
| | | | | 1a and SREBP-1c, which correspond to RefSeq transcript variants 2 and 3, |
| | | | | respectively. [provided by RefSeq, Nov 2017] |
| TSPAN7 | A15; | 7102 | tetraspanin 7 | The protein encoded by this gene is a member of the transmembrane 4 |
| | MXS1; | | | superfamily, also known as the tetraspanin family. Most of these members |
| | CD231; | | | are cell-surface proteins that are characterized by the presence of four |
| | MRX58; | | | hydrophobic domains. The proteins mediate signal transduction events that |
| | CCG-B7; | | | play a role in the regulation of cell development, activation, growth and |
| | TM4SF2; | | | motility. This encoded protein is a cell surface glycoprotein and may have |
| | XLID58; | | | a role in the control of neurite outgrowth. It is known to complex with |
| | TALLA-1; | | | integrins. This gene is associated with X-linked cognitive disability and |
| | TM4SF2b; | | | neuropsychiatric diseases such as Huntington's chorea, fragile X syndrome |
| | DXS1692E | | | and myotonic dystrophy. [provided by RefSeq, Jul 2008] |
| UBE2W | UBC16; | 55284 | ubiquitin conjugating | This gene encodes a nuclear-localized ubiquitin-conjugating enzyme (E2) |
| | UBC-16 | | enzyme E2 W | that, along with ubiquitin-activating (E1) and ligating (E3) enzymes, |
| | | | | coordinates the addition of a ubiquitin moiety to existing proteins. The |
| | | | | encoded protein promotes the ubiquitination of Fanconi anemia |
| | | | | complementation group proteins and may be important in the repair of |
| | | | | DNA damage. There is a pseudogene for this gene on chromosome 1. |
| | | | | Alternative splicing results in multiple transcript variants. [provided by |
| | | | | RefSeq, Aug 2012] |

[0467] For all genes listed in Table 1 (namely, those relevant to CNVs of interest), Table 2 represents a non-redundant list of the genes impacted by exonic or intronic CNVs. The column headers in Table 2 are as follows: RefSeq Gene Symbol—official HGNC-provided gene symbol used by NCBI's Reference Sequence (RefSeq) database, which is based on the HUGO Gene Nomenclature Committee (HGNC) wherein HUGO refers to the Human Genome Organization; Gene Alias—list of previously used gene symbols (entries with none have no gene aliases reported in the HGNC database); NCBI Gene ID—NCBI's unique gene identifier number; Gene Full Name—official HGNC-provided full name for the gene; RefSeq Summary—RefSeq-provided summary of the gene's function and/or biology.

TABLE 3
Non-redundant list of transcript variants for
each gene impacted by an exonic or intronic CNV

| RefSeq | | | |
|---|---|---|---|
| Gene | RefSeq Accession | | |
| Symbol | Number | Transcript Definition | SEQ ID |
| ABCA7 | NM_019112 | Homo sapiens ATP binding cassette subfamily A | 26 |
| | | member 7 (ABCA7), mRNA. | |
| ASGR2 | NM_001181 | Homo sapiens asialoglycoprotein receptor 2 | 27 |
| | | (ASGR2), transcript variant 1, mRNA. | |
| ASGR2 | NM_001201352 | Homo sapiens asialoglycoprotein receptor 2 | 28 |
| | | (ASGR2), transcript variant 4, mRNA. | |
| ASGR2 | NM_080912 | Homo sapiens asialoglycoprotein receptor 2 | 29 |
| | | (ASGR2), transcript variant H2′, mRNA. | |
| ASGR2 | NM_080913 | Homo sapiens asialoglycoprotein receptor 2 | 30 |
| | | (ASGR2), transcript variant 2, mRNA. | |
| ASGR2 | NM_080914 | Homo sapiens asialoglycoprotein receptor 2 | 31 |
| | | (ASGR2), transcript variant 3, mRNA. | |
| ASL | NM_000048 | Homo sapiens argininosuccinate lyase (ASL), | 32 |
| | | transcript variant 2, mRNA. | |
| ASL | NM_001024943 | Homo sapiens argininosuccinate lyase (ASL), | 33 |
| | | transcript variant 1, mRNA. | |
| ASL | NM_001024944 | Homo sapiens argininosuccinate lyase (ASL), | 34 |
| | | transcript variant 3, mRNA. | |
| ASL | NM_001024946 | Homo sapiens argininosuccinate lyase (ASL), | 35 |
| | | transcript variant 4, mRNA. | |
| ASS1 | NM_000050 | Homo sapiens argininosuccinate synthase 1 (ASS1), | 36 |
| | | transcript variant 1, mRNA. | |
| ASS1 | NM_054012 | Homo sapiens argininosuccinate synthase 1 (ASS1), | 37 |
| | | transcript variant 2, mRNA. | |
| CNN2 | NM_001303499 | Homo sapiens calponin 2 (CNN2), transcript variant | 38 |
| | | 3, mRNA. | |
| CNN2 | NM_001303501 | Homo sapiens calponin 2 (CNN2), transcript variant | 39 |
| | | 4, mRNA. | |
| CNN2 | NM_004368 | Homo sapiens calponin 2 (CNN2), transcript variant | 40 |
| | | 1, mRNA. | |
| CNN2 | NM_201277 | Homo sapiens calponin 2 (CNN2), transcript variant | 41 |
| | | 2, mRNA. | |
| CPS1 | NM_001122633 | Homo sapiens carbamoyl-phosphate synthase 1, | 42 |
| | | mitochondrial (CPS1), transcript variant 1, mRNA; | |
| | | nuclear gene for mitochondrial product. | |
| CPS1 | NM_001369256 | Homo sapiens carbamoy1-phosphate synthase 1 | 43 |
| | | (CPS1), transcript variant 4, mRNA; nuclear gene for | |
| | | mitochondrial product. | |
| CPS1 | NM_001369257 | Homo sapiens carbamoyl-phosphate synthase 1 | 44 |
| | | (CPS1), transcript variant 5, mRNA; nuclear gene for | |
| | | mitochondrial product. | |
| CPS1 | NM_001875 | Homo sapiens carbamoyl-phosphate synthase 1, | 45 |
| | | mitochondrial (CPS1), transcript variant 2, mRNA; | |
| | | nuclear gene for mitochondrial product. | |
| CPS1 | NR_161225 | Homo sapiens carbamoyl-phosphate synthase 1 | 46 |
| | | (CPS1), transcript variant 6, non-coding RNA. | |
| CPS1 | NR_163592 | Homo sapiens carbamoyl-phosphate synthase 1 | 47 |
| | | (CPS1), transcript variant 3, non-coding RNA. | |
| LMBRD1 | NM_001363722 | Homo sapiens LMBR1 domain containing 1 | 48 |
| | | (LMBRD1), transcript variant 2, mRNA. | |
| LMBRD1 | NM_001367271 | Homo sapiens LMBR1 domain containing 1 | 49 |
| | | (LMBRD1), transcript variant 3, mRNA. | |
| LMBRD1 | NM_001367272 | Homo sapiens LMBR1 domain containing 1 | 50 |
| | | (LMBRD1), transcript variant 4, mRNA | |
| LMBRD1 | NM_018368 | Homo sapiens LMBR1 domain containing 1 | 51 |
| | | (LMBRD1), mRNA. | |
| MIR33B | NR_030361 | Homo sapiens microRNA 33b (MIR33B), | 52 |
| | | microRNA. | |
| MMAB | NM_052845 | Homo sapiens metabolism of cobalamin associated B | 53 |
| | | (MMAB), transcript variant 1, mRNA. | |
| MMAB | NR_038118 | Homo sapiens metabolism of cobalamin associated B | 54 |
| | | (MMAB), transcript variant 2, non-coding RNA. | |
| OTC | NM_000531 | Homo sapiens ornithine transcarbamylase (OTC), | 55 |
| | | transcript variant 1, mRNA; nuclear gene for | |
| | | mitochondrial product. | |
| PCCA | NM_000282 | Homo sapiens propionyl-CoA carboxylase subunit | 56 |
| | | alpha (PCCA), transcript variant 1, mRNA; nuclear | |
| | | gene for mitochondrial product. | |
| PCCA | NM_001127692 | Homo sapiens propionyl-CoA carboxylase subunit | 57 |
| | | alpha (PCCA), transcript variant 2, mRNA; nuclear | |
| | | gene for mitochondrial product. | |
| PCCA | NM_001178004 | Homo sapiens propionyl-CoA carboxylase subunit | 58 |
| | | alpha (PCCA), transcript variant 3, mRNA; nuclear | |
| | | gene for mitochondrial product. | |
| PCCA | NM_001352605 | Homo sapiens propionyl-CoA carboxylase subunit | 59 |
| | | alpha (PCCA), transcript variant 4, mRNA; nuclear | |
| | | gene for mitochondrial product. | |
| PCCA | NM_001352606 | Homo sapiens propionyl-CoA carboxylase subunit | 60 |
| | | alpha (PCCA), transcript variant 5, mRNA; nuclear | |
| | | gene for mitochondrial product. | |
| PCCA | NM_001352607 | Homo sapiens propionyl-CoA carboxylase subunit | 61 |
| | | alpha (PCCA), transcript variant 6, mRNA; nuclear | |
| | | gene for mitochondrial product. | |
| PCCA | NM_001352608 | Homo sapiens propionyl-CoA carboxylase subunit | 62 |
| | | alpha (PCCA), transcript variant 7, mRNA; nuclear | |
| | | gene for mitochondrial product. | |
| PCCA | NM_001352609 | Homo sapiens propionyl-CoA carboxylase subunit | 63 |
| | | alpha (PCCA), transcript variant 8, mRNA; nuclear | |
| | | gene for mitochondrial product. | |
| PCCA | NM_001352610 | Homo sapiens propionyl-CoA carboxylase subunit | 64 |
| | | alpha (PCCA), transcript variant 9, mRNA; nuclear | |
| | | gene for mitochondrial product. | |
| PCCA | NM_001352611 | Homo sapiens propionyl-CoA carboxylase subunit | 65 |
| | | alpha (PCCA), transcript variant 10, mRNA; nuclear | |
| | | gene for mitochondrial product | |
| PCCA | NM_001352612 | Homo sapiens propionyl-CoA carboxylase subunit | 66 |
| | | alpha (PCCA), transcript variant 11, mRNA; nuclear | |
| | | gene for mitochondrial product. | |
| PCCA | NR_148027 | Homo sapiens propionyl-CoA carboxylase subunit | 67 |
| | | alpha (PCCA), transcript variant 12, non-coding | |
| | | RNA. | |
| PCCA | NR_148028 | Homo sapiens propionyl-CoA carboxylase subunit | 68 |
| | | alpha (PCCA), transcript variant 13, non-coding | |
| | | RNA. | |
| PCCA | NR_148029 | Homo sapiens propionyl-CoA carboxylase subunit | 69 |
| | | alpha (PCCA), transcript variant 14, non-coding | |
| | | RNA. | |
| PCCA | NR_148030 | Homo sapiens propionyl-CoA carboxylase subunit | 70 |
| | | alpha (PCCA), transcript variant 15, non-coding | |
| | | RNA. | |
| PCCA | NR_148031 | Homo sapiens propionyl-CoA carboxylase subunit | 71 |
| | | alpha (PCCA), transcript variant 16, non-coding | |
| | | RNA | |
| RAI1 | NM_030665 | Homo sapiens retinoic acid induced 1 (RAI1), | 72 |
| | | mRNA. | |
| SREBF1 | NM_001005291 | Homo sapiens sterol regulatory element binding | 73 |
| | | transcription factor 1 (SREBF1), transcript variant 1, | |
| | | mRNA. | |
| SREBF1 | NM_001321096 | Homo sapiens sterol regulatory element binding | 74 |
| | | transcription factor 1 (SREBF1), transcript variant 3, | |
| | | mRNA. | |
| SREBF1 | NM_001388385 | Homo sapiens sterol regulatory element binding | 75 |
| | | transcription factor 1 (SREBF1), transcript variant 4, | |
| | | mRNA. | |
| SREBF1 | NM_001388386 | Homo sapiens sterol regulatory element binding | 76 |
| | | transcription factor 1 (SREBF1), transcript variant 5, | |
| | | mRNA. | |
| SREBF1 | NM_001388387 | Homo sapiens sterol regulatory element binding | 77 |
| | | transcription factor 1 (SREBF1), transcript variant 6, | |
| | | mRNA. | |
| SREBF1 | NM_001388388 | Homo sapiens sterol regulatory element binding | 78 |
| | | transcription factor 1 (SREBF1), transcript variant 7, | |
| | | mRNA. | |
| SREBF1 | NM_001388389 | Homo sapiens sterol regulatory element binding | 79 |
| | | transcription factor 1 (SREBF1), transcript variant 8, | |
| | | mRNA. | |
| SREBF1 | NM_001388390 | Homo sapiens sterol regulatory element binding | 80 |
| | | transcription factor 1 (SREBF1), transcript variant 9, | |
| | | mRNA. | |
| SREBF1 | NM_001388391 | Homo sapiens sterol regulatory element binding | 81 |
| | | transcription factor 1 (SREBF1), transcript variant | |
| | | 10, mRNA. | |
| SREBF1 | NM_001388392 | Homo sapiens sterol regulatory element binding | 82 |
| | | transcription factor 1 (SREBF1), transcript variant | |
| | | 11, mRNA. | |
| SREBF1 | NM_001388393 | Homo sapiens sterol regulatory element binding | 83 |
| | | transcription factor 1 (SREBF1), transcript variant | |
| | | 12, mRNA. | |
| SREBF1 | NM_001388394 | Homo sapiens sterol regulatory element binding | 84 |
| | | transcription factor 1 (SREBF1), transcript variant | |
| | | 13, mRNA. | |
| SREBF1 | NM_004176 | Homo sapiens sterol regulatory element binding | 85 |
| | | transcription factor 1 (SREBF1), transcript variant 2, | |
| | | mRNA. | |
| SREBF1 | NR_170943 | Homo sapiens sterol regulatory element binding | 86 |
| | | transcription factor 1 (SREBF1), transcript variant | |
| | | 14, non-coding RNA. | |
| SREBF1 | NR_170944 | Homo sapiens sterol regulatory element binding | 87 |
| | | transcription factor 1 (SREBF1), transcript variant | |
| | | 15, non-coding RNA. | |
| SREBF1 | NR_170945 | Homo sapiens sterol regulatory element binding | 88 |
| | | transcription factor 1 (SREBF1), transcript variant | |
| | | 16, non-coding RNA. | |
| SREBF1 | NR_170990 | Homo sapiens sterol regulatory element binding | 89 |
| | | transcription factor 1 (SREBF1), transcript variant | |
| | | 17, non-coding RNA. | |
| TSPAN7 | NM_004615 | Homo sapiens tetraspanin 7 (TSPAN7), mRNA. | 90 |
| UBE2W | NM_001001481 | Homo sapiens ubiquitin-conjugating enzyme E2W | 91 |
| | | (putative) (UBE2W), transcript variant 1, mRNA. | |
| UBE2W | NM_{——}001271015 | Homo sapiens ubiquitin-conjugating enzyme E2W | 92 |
| | | (putative) (UBE2W), transcript variant 3, mRNA. | |
| UBE2W | NM_018299 | Homo sapiens ubiquitin-conjugating enzyme E2W | 93 |
| | | (putative) (UBE2W), transcript variant 2, mRNA. | |
| UBE2W | NR_073119 | Homo sapiens ubiquitin-conjugating enzyme E2W | 94 |
| | | (putative) (UBE2W), transcript variant 4, non-coding | |
| | | RNA. | |
| UBE2W | NR_073120 | HHomo sapiens ubiquitin-conjugating enzyme E2W | 95 |
| | | (putative) (UBE2W), transcript variant 5, non-coding | |
| | | RNA. | |
| UBE2W | NR_073121 | Homo sapiens ubiquitin-conjugating enzyme E2W | 96 |
| | | (putative) (UBE2W), transcript variant 6, non-coding | |
| | | RNA. | |

[0468] For all genes listed in Table 1, Table 3 represents a non-redundant list of the transcript variants for each gene impacted by an exonic or intronic CNV. The column headers in Table 3 are as follows: RefSeq Gene Symbol—official HGNC-provided gene symbol used by NCBI's Reference Sequence (RefSeq) database; RefSeq Accession Number—all presently known transcript variants for each gene in Table 2 are listed (hence Table 3 has more entries than Table 2); Transcript Definition—brief description of the type (e.g., mRNA or non-coding RNA) and number of the transcript variant; SEQ ID—Sequence identification number in the Sequence Listing.

TABLE 4
Non-redundant list of UCD/HA genes that are adjacent (within 250 Kb) to an intergenic CNV

| RefSeq | | NCBI | | |
|---|---|---|---|---|
| Gene | Gene | Gene | | |
| Symbol | Alias | ID | Gene Full Name | Gene Summary |
| GLUL | GS; | 2752 | glutamate- | The protein encoded by this gene belongs to the |
| | GLNS; | | ammonia ligase | glutamine synthetase family. It catalyzes the synthesis |
| | PIG43; | | | of glutamine from glutamate and ammonia in an ATP- |
| | PIG59 | | | dependent reaction. This protein plays a role in |
| | | | | ammonia and glutamate detoxification, acid-base |
| | | | | homeostasis, cell signaling, and cell proliferation. |
| | | | | Glutamine is an abundant amino acid, and is important |
| | | | | to the biosynthesis of several amino acids, pyrimidines, |
| | | | | and purines. Mutations in this gene are associated with |
| | | | | congenital glutamine deficiency, and overexpression of |
| | | | | this gene was observed in some primary liver cancer |
| | | | | samples. There are six pseudogenes of this gene found |
| | | | | on chromosomes 2, 5, 9, 11, and 12. Alternative |
| | | | | splicing results in multiple transcript variants. |
| | | | | [provided by RefSeq, Dec 2014] |
| OTC | OCTD; | 5009 | ornithine | This nuclear gene encodes a mitochondrial matrix |
| | OTC1; | | transcarbamylase | enzyme. The encoded protein is involved in the urea |
| | OTCD; | | | cycle which functions to detoxify ammonia into urea |
| | OTCase | | | for excretion. Mutations in this enzyme lead to |
| | | | | ornithine transcarbamylase deficiency, which causes |
| | | | | hyperammonemia. [provided by RefSeq, May 2022] |
| SLC25A13 | CTLN2; | 10165 | solute carrier | This gene is a member of the mitochondrial carrier |
| | NICCD; | | family 25 | family. The encoded protein contains four EF-hand |
| | CITRIN; | | member 13 | Ca(2 +) binding motifs in the N-terminal domain, and |
| | ARALAR2 | | | localizes to mitochondria. The protein catalyzes the |
| | | | | exchange of aspartate for glutamate and a proton across |
| | | | | the inner mitochondrial membrane, and is stimulated |
| | | | | by calcium on the external side of the inner |
| | | | | mitochondrial membrane. Mutations in this gene result |
| | | | | in citrullinemia, type II. Multiple transcript variants |
| | | | | encoding different isoforms have been found for this |
| | | | | gene. [provided by RefSeq, May 2009] |
| SLC7A7 | LPI; | 9056 | solute carrier | The protein encoded by this gene is the light subunit of |
| | LAT3; | | family 7 member | a cationic amino acid transporter. This sodium- |
| | MOP-2; | | 7 | independent transporter is formed when the light |
| | Y + LAT1; | | | subunit encoded by this gene dimerizes with the heavy |
| | y + LAT-1 | | | subunit transporter protein SLC3A2. This transporter is |
| | | | | found in epithelial cell membranes where it transfers |
| | | | | cationic and large neutral amino acids from the cell to |
| | | | | the extracellular space. Defects in this gene are a cause |
| | | | | of lysinuric protein intolerance (LPI). Alternative |
| | | | | splicing results in multiple transcript variants. |
| | | | | [provided by RefSeq, Jul 2011] |
| TAFAZZIN | EFE; TAZ; | 6901 | tafazzin, | This gene encodes a protein that is expressed at high |
| | BTHS; | | phospholipid- | levels in cardiac and skeletal muscle. Mutations in this |
| | EFE2; | | lysophospholipid | gene have been associated with a number of clinical |
| | G4.5; | | transacylase | disorders including Barth syndrome, dilated |
| | Taz1; | | | cardiomyopathy (DCM), hypertrophic DCM, |
| | CMD3A; | | | endocardial fibroelastosis, and left ventricular |
| | LVNCX | | | noncompaction (LVNC). Multiple transcript variants |
| | | | | encoding different isoforms have been described. A |
| | | | | long form and a short form of each of these isoforms is |
| | | | | produced; the short form lacks a hydrophobic leader |
| | | | | sequence and may exist as a cytoplasmic protein rather |
| | | | | than being membrane-bound. Other alternatively |
| | | | | spliced transcripts have been described but the full- |
| | | | | length nature of all these transcripts is not known. |
| | | | | [provided by RefSeq, Jul 2008] |

[0469] For all intergenic CNVs listed in Table 1 (i.e., those with no gene listed in the RefSeq Gene Symbol column), Table 4 represents a non-redundant list of the UCD/HA genes that are adjacent (within 250 Kb) to an intergenic CNV. The column headers in Table 4 are as follows: RefSeq Gene Symbol-official HGNC-provided gene symbol used by NCBI's Reference Sequence (RefSeq) database, which is based on the HUGO Gene Nomenclature Committee (HGNC) wherein HUGO refers to the Human Genome Organization; Gene Alias—list of previously used gene symbols (entries with none have no gene aliases reported in the HGNC database); NCBI Gene ID—NCBI's unique gene identifier number; Gene Full Name—official HGNC-provided full name for the gene; RefSeq Summary—RefSeq-provided summary of the gene's function and/or biology.

TABLE 5
Non-redundant list of the transcript variants for each UCD/HA gene
adjacent to an intergenic CNV for all genes listed in Table 4.

| RefSeq | | | |
|---|---|---|---|
| Gene | RefSeq Accession | | |
| Symbol | Number | Transcript Definition | SEQ ID |
| GLUL | NM_001033044 | Homo sapiens glutamate-ammonia ligase (GLUL), | 97 |
| | | transcript variant 2, mRNA. | |
| GLUL | NM_001033056 | Homo sapiens glutamate-ammonia ligase (GLUL), | 98 |
| | | transcript variant 3, mRNA. | |
| GLUL | NM_002065 | Homo sapiens glutamate-ammonia ligase (GLUL), | 99 |
| | | transcript variant 1, mRNA. | |
| OTC | NM_000531 | Homo sapiens ornithine transcarbamylase (OTC), | 55 |
| | | transcript variant 1, mRNA; nuclear gene for | |
| | | mitochondrial product. | |
| SLC25A13 | NM_001160210 | Homo sapiens solute carrier family 25 member 13 | 100 |
| | | (SLC25A13), transcript variant 1, mRNA; nuclear | |
| | | gene for mitochondrial product. | |
| SLC25A13 | NM_014251 | Homo sapiens solute carrier family 25 member 13 | 101 |
| | | (SLC25A13), transcript variant 2, mRNA; nuclear | |
| | | gene for mitochondrial product. | |
| SLC25A13 | NR_027662 | Homo sapiens solute carrier family 25 member 13 | 102 |
| | | (SLC25A13), transcript variant 3, non-coding RNA. | |
| SLC7A7 | NM_001126105 | Homo sapiens solute carrier family 7 member 7 | 103 |
| | | (SLC7A7), transcript variant 2, mRNA. | |
| SLC7A7 | NM_001126106 | Homo sapiens solute carrier family 7 member 7 | 104 |
| | | (SLC7A7), transcript variant 3, mRNA. | |
| SLC7A7 | NM_003982 | Homo sapiens solute carrier family 7 member 7 | 105 |
| | | (SLC7A7), transcript variant 1, mRNA. | |
| TAFAZZIN | NM_000116 | Homo sapiens tafazzin, phospholipid- | 106 |
| | | lysophospholipid transacylase (TAFAZZIN), | |
| | | transcript variant 1, mRNA. | |
| TAFAZZIN | NM_001303465 | Homo sapiens tafazzin, phospholipid- | 107 |
| | | lysophospholipid transacylase (TAFAZZIN), | |
| | | transcript variant 5, mRNA. | |
| TAFAZZIN | NM_181311 | Homo sapiens tafazzin, phospholipid- | 108 |
| | | lysophospholipid transacylase (TAFAZZIN), | |
| | | transcript variant 2, mRNA. | |
| TAFAZZIN | NM_181312 | Homo sapiens tafazzin, phospholipid- | 109 |
| | | lysophospholipid transacylase (TAFAZZIN), | |
| | | transcript variant 3, mRNA. | |
| TAFAZZIN | NM_181313 | Homo sapiens tafazzin, phospholipid- | 110 |
| | | lysophospholipid transacylase (TAFAZZIN), | |
| | | transcript variant 4, mRNA. | |
| TAFAZZIN | NR_024048 | Homo sapiens tafazzin, phospholipid- | 111 |
| | | lysophospholipid transacylase (TAFAZZIN), | |
| | | transcript variant 6, non-coding RNA. | |

[0470] For all genes listed in Table 4, Table 5 represents a non-redundant list of the transcript variants for each UCD/HA gene adjacent to an intergenic CNV. The column headers in Table 5 are as follows: RefSeq Gene Symbol—official HGNC-provided gene symbol used by NCBI's Reference Sequence (RefSeq) database; RefSeq Accession Number—all presently known transcript variants for each gene in Table 4 are listed; Transcript Definition—brief description of the type (e.g., mRNA or non-coding RNA) and number of the transcript variant; SEQ ID—Sequence identification number in the Sequence Listing.

TABLE 6
Relevant sequence information for the
CPS1 deletion reported in Table 1

| | | PCR Primer | |
|---|---|---|---|
| | Sequence | Sequence | SEQ |
| Sequence Name | Item | (5′ to 3′) | ID |
| CPS1_delF | PCR | CAGATACTATTT | 112 |
| | primer | TTGCCAACATGC | |
| CPS1_delR | PCR | AGGCAGTGACCC | 113 |
| | primer | ATCAGTATATGT | |
| CPS1_POS_98_F* | Sanger | n/a | 114 |
| | sequence | | |
| CPS1_POS_98_R* | Sanger | n/a | 115 |
| | sequence | | |
| CPS1_del_PBio | aCGH data | n/a | 3 |
| CPS1_del_1KG_Ph3 | WGS data | n/a | 116 |

*POS_98 is deletion-positive LOAD case Expt ID 2693 (see FIG. 1 and Table 1)

[0471] Table 6 lists the relevant sequence information for the CPS1 deletion reported in Table 1 (SEQ ID 3, also listed in Table 6). This includes the PCR primer sequences used to develop a CPS1 deletion assay, Sanger sequence data (experiments were performed to verify the deletion breakpoints), and the CPS1 deletion reported in a public database (IKG Ph3 refers to the 1000 genomes project Phase 3 data, the deletion ID is esv3594156, see Table 7 for further details). The column headers in Table 6 are as follows: Sequence Name—name of sequence; Sequence Item—type and/or source of the sequence information; PCR Primer Sequence (5′ to 3′)—sequences for the PCR primers; SEQ ID—Sequence identification number in the Sequence Listing.

TABLE 7
Statistical analysis for the prevalence of the deletion affecting an intron of CPS1

| | | Genome | | Normals | | LOAD | | | | | |
|---|---|---|---|---|---|---|---|---|---|---|---|
| Statistical | Deletion | Coordinates | Size | Cohort | Normals | Cohort | LOAD | | | OR | OR |
| Comparison | ID | (GRCh37/hg19) | (bp) | Size | Positive | Size | Positive | p-value | OR | LCL | UCL |
| LOAD (EUR) | PBio_Data | chr2: 211361945- | 6,430 | 1,000 | 1 | 100 | 3 | 0.00273 | 30.90 | 3.18 | 299.90 |
| vs. NVE | | 211368375 | | | | | | | | | |
| (EUR) | | | | | | | | | | | |
| LOAD (EUR) | esv3594156 | chr2: 211360864- | 7,745 | 2,504 | 2 | 100 | 3 | 0.00052 | 38.69 | 6.39 | 234.23 |
| vs. 1 KG Ph 3 | | 211368609 | | | | | | | | | |
| (all) | | | | | | | | | | | |
| LOAD (EUR) | esv3594156 | chr2: 211360864- | 7,745 | 500 | 2 | 100 | 3 | 0.03485 | 7.70 | 1.27 | 46.70 |
| vs. 1 KG Ph 3 | | 211368609 | | | | | | | | | |
| (EUR) | | | | | | | | | | | |
| LOAD (EUR) | DEL_2_26674 | chr2: 211360860- | 7,750 | 3,812 | 19 | 100 | 3 | 0.01754 | 6.17 | 1.80 | 21.21 |
| vs. gnomAD | | 211368610 | | | | | | | | | |
| (EUR, all) | | | | | | | | | | | |
| LOAD (EUR) | DEL_2_26674 | chr2: 211360860- | 7,750 | 3,663 | 19 | 100 | 3 | 0.01943 | 5.93 | 1.73 | 20.38 |
| vs. gnomAD | | 211368610 | | | | | | | | | |
| (EUR, non- | | | | | | | | | | | |
| neuro) | | | | | | | | | | | |
| LOAD (EUR) | DEL_2_26674 | chr2: 211360860- | 7,750 | 1,660 | 6 | 100 | 3 | 0.01164 | 8.53 | 2.10 | 34.61 |
| vs. gnomAD | | 211368610 | | | | | | | | | |
| (EUR, | | | | | | | | | | | |
| controls) | | | | | | | | | | | |
| LOAD (EUR) | NA | chr2: 211360861- | 7,749 | 6,079 | 17 | 100 | 3 | 0.00384 | 11.03 | 3.18 | 38.25 |
| vs. MSSNG | | 211368610 | | | | | | | | | |
| (unaffected) | | | | | | | | | | | |
| LOAD (EUR) | gssvL69036 | chr2: 211360857- | 7,753 | 2,562 | 2 | 100 | 3 | 0.00049 | 39.59 | 6.54 | 239.65 |
| vs. DGV Gold | | 211368610 | | | | | | | | | |
| Standard* | | | | | | | | | | | |

*Overlaps with 1 KG Ph 3 (all)

[0472] Table 7 demonstrates statistical analysis for the prevalence of the deletion affecting an intron of CPS1 in different databases (including Population Bio's proprietary database). This deletion is observed in other population databases but at lower frequency than observed in our LOAD cohort. Using Fisher's Exact Test (FET, two-tailed), Table 7 shows a p-value of <0.05 for all comparison categories, suggesting that the observed increase in frequency of the CPS1 deletion (SEQ ID 3) in LOAD samples is significant (see also Example 4).

[0473] Abbreviations/definitions for Table 7: NVE—normal variation engine, which is a Population Bio (PBio) proprietary database of copy number variation in normal individuals; LOAD—Late-Onset Alzheimer's Disease, which are samples from the OPTIMA cohort; IKG—1,000 Genomes Project (see PubMed PMID 26432245); gnomAD—Genome Aggregation Database (see PubMed PMID 32461654); MSSNG—Autism database (research.mss.ng and see PubMed PMID 32317787); DGV—Database of Genomic Variants (see PubMed PMID 24174537). The gnomAD structural variant (SV) calls are generated from a set of whole genome sequenced (WGS) samples that largely overlaps those used in gnomAD v2.1 variant (e.g., SNVs, indels) database. The current SV release includes 10,847 (allele number=21,694) unrelated subjects, of which 3,812 have European (EUR) ancestry. gnomAD SVs v2.1 (non-neuro): Only samples from individuals who were not ascertained for having a neurological condition in a neurological case/control study; 8,342 unrelated subjects, of which 3,663 have EUR ancestry. gnomAD SVs v2.1 (controls): Only samples from individuals who were not designated as a case in a case/control study of common disease; 5,192 unrelated subjects, of which 1,660 have EUR ancestry.

[0474] The column headers in Table 7 are as follows: Statistical Comparison—which groups of cases (with LOAD) and controls (aka normal subjects) are being compared; Deletion ID—name attributed to the deletion in the relevant database; Genomic Coordinates (GRCh3 7/hg 19)—deletion extent (start and stop positions) in hg19 coordinates; Size—deletion size in base pairs (bp); Nonnals Cohort Size—Total number of normal (unaffected) subjects in the cohort that were evaluated for the deletion; Nonnals Positive-Number of unaffected individuals with the deletion; LOAD Cohort Size—Total number of LOAD (affected) cases in the cohort that were evaluated for the deletion; LOAD Positive—Number of affected individuals with the deletion; p-value—measure of statistical significance using FET; OR—odds ratio, a measure of effect size; OR LCL—odds ratio, lower confidence limit (95%); OR UCL—odds ratio, upper confidence limit (95%).

TABLE 8
Non-redundant list of UCD genes only

| RefSeq | | | | | | | | Gene Start − | Gene Stop + |
|---|---|---|---|---|---|---|---|---|---|
| Gene | | | Disease | Disease Name | | Gene Start | Gene Stop | 250 Kb | 250 Kb |
| Symbol | Gene Full Name | OMIM | Model | (OMIM) | Chr | (hg18) | (hg18) | (hg18) | (hg18) |
| ARG1 | arginase 1 | 207800, | AR | Argininemia | 6 | 131833665 | 131947165 | 131583665 | 132197165 |
| | | 608313 | | | | | | | |
| ASL | argininosuccinate | 207900, | AR | Argininosuccinic | 7 | 65178222 | 65197119 | 64928222 | 65447119 |
| | lyase | 608310 | | aciduria | | | | | |
| ASS1 | argininosuccinate | 215700, | AR | Citrullinemia | 9 | 132310169 | 132366482 | 132060169 | 132616482 |
| | synthase 1 | 603470 | | | | | | | |
| CPS1 | aarbamoyl- | 237300, | AR | Carbamoylphosphate | 2 | 211050651 | 211252076 | 210800651 | 211502076 |
| | phosphate | 608307 | | synthetase I deficiency | | | | | |
| | synthase 1 | | | | | | | | |
| NAGS | N- | 237310, | AR | N-acetylglutamate | 17 | 39437516 | 39441962 | 39187516 | 39691962 |
| | acetylglutamate | 608300 | | synthase deficiency | | | | | |
| | synthase | | | | | | | | |
| OTC | ornithine | 300461, | XLR | Ornithine | X | 38096783 | 38165643 | 37846783 | 38415643 |
| | transcarbamylase | 311250 | | transcarbamylase | | | | | |
| | | | | deficiency | | | | | |
| SLC25A13 | solute carrier | 603859, | AR | Citrullinemia, type II, | 7 | 95587468 | 95789395 | 95337468 | 96039395 |
| | family 25 | 605814 | | neonatal-onset; | | | | | |
| | member 13 | | | Citrullinemia, adult- | | | | | |
| | | | | onset type II | | | | | |
| SLC25A15 | solute carrier | 238970, | AR | Hyperornithinemia- | 13 | 40261548 | 40284596 | 40011548 | 40534596 |
| | family 25 | 603861 | | hyperammonemia- | | | | | |
| | member 15 | | | homocitrullinemia | | | | | |
| | | | | syndrome | | | | | |

[0475] Table 8 presents the non-redundant list of UCD genes only. The column headers in Table 8 are as follows: RefSeq Gene Symbol—gene symbol used by NCBI's Reference Sequence (RefSeq) database; Gene Full Name—official HGNC-provided full name for the gene; OMIM—OMIM (Online Mendelian Inheritance in Man) entry numbers for the gene and phenotype; Disease Model—indicates if inheritance is autosomal dominant (AD), autosomal recessive (AR), or X-linked recessive (XLR); Disease Name (OMIM)—name of the type of UCD as listed in OMIM; Chr—chromosome that harbors the UCD gene; Gene Start (hg18)—genome position corresponding to the start of the gene (based on human assembly NCBI 36/hg18); Gene Stop (hg18)—genome position corresponding to the end (stop) of the gene (based on human assembly NCBI 36/hg18); Gene Start—250 Kb (hg18)—genome position corresponding to the start of the gene (based on human assembly NCBI 36/hg18) minus 250 Kb; Gene Stop+250 Kb (hg18)-genome position corresponding to the end (stop) of the gene (based on human assembly NCBI 36/hg18) plus 250 Kb.

TABLE 9
Non-redundant list of other HA genes not listed in Table 8

| RefSeq | | | | | | | | Gene Start − | Gene Stop + |
|---|---|---|---|---|---|---|---|---|---|
| Gene | | | Disease | Disease Name | | Gene Start | Gene Stop | 250 Kb | 250 Kb |
| Symbol | Gene Full Name | OMIM | Model | (OMIM) | Chr | (hg18) | (hg18) | (hg18) | (hg18) |
| ACADM | acyl-CoA | 607008, | AR | Acyl-CoA | 1 | 75962704 | 76025848 | 75712704 | 76275848 |
| | dehydrogenase | 201450 | | dehydrogenase, | | | | | |
| | medium chain | | | medium chain, | | | | | |
| | | | | deficiency of | | | | | |
| ACADVL | acyl-CoA | 609575, | AR | VLCAD | 17 | 7061168 | 7069309 | 6811168 | 7319309 |
| | dehydrogenase very | 201475 | | deficiency | | | | | |
| | long chain | | | | | | | | |
| ALDH18A1 | aldehyde | 138250, | AR | Cutis laxa, | 10 | 97355688 | 97406458 | 97105688 | 97656458 |
| | dehydrogenase 18 | 219150 | | autosomal | | | | | |
| | family member A1 | | | recessive, type | | | | | |
| | | | | IIIA | | | | | |
| AMT | aminomethyltransferase | 238310, | AR | Glycine | 3 | 49429215 | 49435122 | 49179215 | 49685122 |
| | | 605899 | | encephalopathy | | | | | |
| ATP5F1D | ATP synthase F1 | 603150, | AR | Mitochondrial | 19 | 1192745 | 1195824 | 942745 | 1445824 |
| | subunit delta | 618120 | | complex V | | | | | |
| | | | | (ATP synthase) | | | | | |
| | | | | deficiency | | | | | |
| ATPAF2 | ATP synthase | 608918, | AR | Mitochondrial | 17 | 17821448 | 17883248 | 17571448 | 18133248 |
| | mitochondrial F1 | 604273 | | complex V | | | | | |
| | complex assembly | | | (ATP synthase) | | | | | |
| | factor 2 | | | deficiency, | | | | | |
| | | | | nuclear type 1 | | | | | |
| CA5A | carbonic anhydrase | 114761, | AR | Carbonic | 16 | 86472653 | 86527687 | 86222653 | 86777687 |
| | 5A | 615751 | | anydrase VA | | | | | |
| | | | | deficiency | | | | | |
| CPT1A | carnitine | 255120, | AR | CPT deficiency, | 11 | 68278664 | 68368454 | 68028664 | 68618454 |
| | palmitoyltransferase | 600528 | | hepatic, type IA | | | | | |
| | 1A | | | | | | | | |
| CPT2 | carnitine | 600650, | AR | CPT II | 1 | 53435052 | 53452457 | 53185052 | 53702457 |
| | palmitoyltransferase | 608836 | | deficiency, | | | | | |
| | 2 | | | infantile | | | | | |
| CYC1 | cytochrome c1 | 123980, | AR | Mitochondrial | 8 | 145221930 | 145224416 | 144971930 | 145474416 |
| | | 615453 | | complex III | | | | | |
| | | | | deficiency, | | | | | |
| | | | | nuclear type 6 | | | | | |
| DLAT | dihydrolipoamide S- | 608770, | AR | Pyruvate | 11 | 111401342 | 111440338 | 111151342 | 111690338 |
| | acetyltransferase | 245348 | | dehydrogenase | | | | | |
| | | | | E2 deficiency | | | | | |
| ETFA | electron transfer | 608053, | AR | Glutaric | 15 | 74267951 | 74391126 | 74017951 | 74641126 |
| | flavoprotein subunit | 231680 | | acidemia IIA | | | | | |
| | alpha | | | | | | | | |
| ETFB | electron transfer | 130410, | AR | Glutaric | 19 | 56540235 | 56561454 | 56290235 | 56811454 |
| | flavoprotein subunit | 231680 | | acidemia IIB | | | | | |
| | beta | | | | | | | | |
| ETFDH | electron transfer | 231675, | AR | Glutaric | 4 | 159812570 | 159851344 | 159562570 | 160101344 |
| | flavoprotein | 231680 | | acidemia IIC | | | | | |
| | dehydrogenase | | | | | | | | |
| FBXL4 | F-box and leucine | 605654, | AR | Mitochondrial | 6 | 99423132 | 99502603 | 99173132 | 99752603 |
| | rich repeat protein 4 | 615471 | | DNA depletion | | | | | |
| | | | | syndrome 13 | | | | | |
| | | | | (encephalomyopathic | | | | | |
| | | | | type) | | | | | |
| FH | fumarate hydratase | 136850, | AR | Fumarase | 1 | 239727434 | 239749722 | 239477434 | 239999722 |
| | | 606812 | | deficiency | | | | | |
| GLUD1 | glutamate | 138130, | AD | Hyperinsulinism- | 10 | 88799939 | 88844580 | 88549939 | 89094580 |
| | dehydrogenase 1 | 606762 | | hyperammonemia | | | | | |
| | | | | syndrome | | | | | |
| GLUL | glutamate-ammonia | 138290, | AR | Glutamine | 1 | 180613856 | 180627964 | 180363856 | 180877964 |
| | ligase | 610015 | | deficiency, | | | | | |
| | | | | congenital | | | | | |
| HADHA | hydroxyacyl-CoA | 600890, | AR | Mitochondrial | 2 | 26267008 | 26321044 | 26017008 | 26571044 |
| | dehydrogenase | 609015 | | trifunctional | | | | | |
| | trifunctional | | | protein | | | | | |
| | multienzyme | | | deficiency | | | | | |
| | complex subunit | | | | | | | | |
| | alpha | | | | | | | | |
| HADHB | hydroxyacyl-CoA | 143450, | AR | Trifunctional | 2 | 26319542 | 26366837 | 26069542 | 26616837 |
| | dehydrogenase | 609015 | | protein | | | | | |
| | trifunctional | | | deficiency | | | | | |
| | multienzyme | | | | | | | | |
| | complex subunit beta | | | | | | | | |
| HLCS | holocarboxylase | 253270, | AR | Holocarboxylase | 21 | 37042797 | 37284406 | 36792797 | 37534406 |
| | synthetase | 609018 | | synthetase | | | | | |
| | | | | deficiency | | | | | |
| HMGCL | 3-hydroxy-3- | 246450, | AR | HMG-CoA lyase | 1 | 24000962 | 24037697 | 23750962 | 24287697 |
| | methylglutaryl-CoA | 613898 | | deficiency | | | | | |
| | lyase | | | | | | | | |
| IVD | isovalery1-CoA | 243500, | AR | Isovaleric | 15 | 38484978 | 38515438 | 38234978 | 38765438 |
| | dehydrogenase | 607036 | | acidemia | | | | | |
| LMBRD1 | LMBR1 domain | 612625, | AR | Methylmalonic | 6 | 70439370 | 70633849 | 70189370 | 70883849 |
| | containing 1 | 277380 | | aciduria and | | | | | |
| | | | | homocystinuria, | | | | | |
| | | | | cblF type | | | | | |
| MCCC1 | methylcrotonoyl- | 210200, | AR | 3- | 3 | 184215700 | 184316557 | 183965700 | 184566557 |
| | CoA carboxylase 1 | 609010 | | Methylcrotonyl- | | | | | |
| | | | | CoA | | | | | |
| | | | | carboxylase 1 | | | | | |
| | | | | deficiency | | | | | |
| MCCC2 | methylcrotonoyl- | 210210, | AR | 3- | 5 | 70911114 | 70990289 | 70661114 | 71240289 |
| | CoA carboxylase 2 | 609014 | | Methylcrotonyl- | | | | | |
| | | | | CoA | | | | | |
| | | | | carboxylase 2 | | | | | |
| | | | | deficiency | | | | | |
| MCEE | methylmalonyl-CoA | 608419, | AR | Methylmalonyl- | 2 | 71190322 | 71210877 | 70940322 | 71460877 |
| | epimerase | 251120 | | CoA epimerase | | | | | |
| | | | | deficiency | | | | | |
| MLYCD | malonyl-CoA | 606761, | AR | Malonyl-CoA | 16 | 82490221 | 82542551 | 82240221 | 82792551 |
| | decarboxylase | 248360 | | decarboxylase | | | | | |
| | | | | deficiency | | | | | |
| MMAA | metabolism of | 251100, | AR | Methylmalonic | 4 | 146739644 | 146800635 | 146489644 | 147050635 |
| | cobalamin associated | 607481 | | aciduria, vitamin | | | | | |
| | A | | | B12-responsive | | | | | |
| MMAB | metabolism of | 607568, | AR | Methylmalonic | 12 | 108475903 | 108495768 | 108225903 | 108745768 |
| | cobalamin associated | 251110 | | aciduria, vitamin | | | | | |
| | B | | | B12-responsive, | | | | | |
| | | | | cblB type | | | | | |
| MMACHC | metabolism of | 609831, | AR | Methylmalonic | 1 | 45738559 | 45751641 | 45488559 | 46001641 |
| | cobalamin associated | 277400 | | aciduria and | | | | | |
| | C | | | homocystinuria, | | | | | |
| | | | | cblC type | | | | | |
| MMADHC | metabolism of | 611935, | AR | Homocystinuria, | 2 | 150134397 | 150152538 | 149884397 | 150402538 |
| | cobalamin associated | 277410 | | cblD type, | | | | | |
| | D | | | variant 1; | | | | | |
| | | | | Methylmalonic | | | | | |
| | | | | aciduria and | | | | | |
| | | | | homocystinuria, | | | | | |
| | | | | cblD type; | | | | | |
| | | | | Methylmalonic | | | | | |
| | | | | aciduria, cblD | | | | | |
| | | | | type, variant 2 | | | | | |
| MMUT | methylmalonyl-CoA | 251000, | AR | Methylmalonic | 6 | 49506032 | 49538925 | 49256032 | 49788925 |
| | mutase | 609058 | | aciduria, mut(0) | | | | | |
| | | | | type | | | | | |
| OAT | ornithine | 258870, | AR | Gyrate atrophy | 10 | 126075862 | 126097535 | 125825862 | 126347535 |
| | aminotransferase | 613349 | | of choroid and | | | | | |
| | | | | retina with or | | | | | |
| | | | | without | | | | | |
| | | | | ornithinemia | | | | | |
| PC | pyruvate carboxylase | 266150, | AR | Pyruvate | 11 | 66372464 | 66482433 | 66122464 | 66732433 |
| | | 608786 | | carboxylase | | | | | |
| | | | | deficiency | | | | | |
| PCCA | propionyl-CoA | 232050, | AR | Propionicacidemia | 13 | 99539270 | 99980692 | 99289270 | 100230692 |
| | carboxylase subunit | 606054 | | | | | | | |
| | alpha | | | | | | | | |
| PCCB | propionyl-CoA | 232000, | AR | Propionicacidemia | 3 | 137451872 | 137539428 | 137201872 | 137789428 |
| | carboxylase subunit | 606054 | | | | | | | |
| | beta | | | | | | | | |
| PDHA1 | pyruvate | 300502, | XLD | Pyruvate | X | 19271932 | 19289757 | 19021932 | 19539757 |
| | dehydrogenase E1 | 312170 | | dehydrogenase | | | | | |
| | subunit alpha 1 | | | E1-alpha | | | | | |
| | | | | deficiency | | | | | |
| SLC22A5 | solute carrier family | 212140, | AR | Carnitine | 5 | 131733301 | 131759204 | 131483301 | 132009204 |
| | 22 member 5 | 603377 | | deficiency, | | | | | |
| | | | | systemic | | | | | |
| | | | | primary | | | | | |
| SLC25A20 | solute carrier family | 613698, | AR | Carnitine- | 3 | 48869363 | 48911341 | 48619363 | 49161341 |
| | 25 member 20 | 212138 | | acylcarnitine | | | | | |
| | | | | translocase | | | | | |
| | | | | deficiency | | | | | |
| SLC25A42 | solute carrier family | 610823, | AR | Metabolic crises, | 19 | 19035803 | 19084839 | 18785803 | 19334839 |
| | 25 member 42 | 618416 | | recurrent, with | | | | | |
| | | | | variable | | | | | |
| | | | | encephalomyopathic | | | | | |
| | | | | features and | | | | | |
| | | | | neurologic | | | | | |
| | | | | regression | | | | | |
| SLC7A7 | solute carrier family | 222700, | AR | Lysinuric | 14 | 22312271 | 22368869 | 22062271 | 22618869 |
| | 7 member 7 | 603593 | | protein | | | | | |
| | | | | intolerance | | | | | |
| TAFAZZIN | tafazzin, | 300394, | XLR | Barth syndrome | X | 153293054 | 153303259 | 153043054 | 153553259 |
| | phospholipid- | 302060 | | | | | | | |
| | lysophospholipid | | | | | | | | |
| | transacylase | | | | | | | | |
| TANGO2 | transport and golgi | 616830, | AR | Metabolic | 22 | 18384537 | 18434687 | 18134537 | 18684687 |
| | organization 2 | 616878 | | encephalomyopathic | | | | | |
| | homolog | | | crises, | | | | | |
| | | | | recurrent, with | | | | | |
| | | | | rhabdomyolysis, | | | | | |
| | | | | cardiac | | | | | |
| | | | | arrhythmias, and | | | | | |
| | | | | neurodegeneration | | | | | |
| TMEM70 | transmembrane | 612418, | AR | Mitochondrial | 8 | 75047226 | 75057572 | 74797226 | 75307572 |
| | protein 70 | 614052 | | complex V | | | | | |
| | | | | (ATP synthase) | | | | | |
| | | | | deficiency, | | | | | |
| | | | | nuclear type 2 | | | | | |
| TUFM | Tu translation | 602389, | AR | Combined | 16 | 28761233 | 28765170 | 28511233 | 29015170 |
| | elongation factor, | 610678 | | oxidative | | | | | |
| | mitochondrial | | | phosphorylation | | | | | |
| | | | | deficiency 4 | | | | | |
| UQCRC2 | ubiquinol- | 191329, | AR | Mitochondrial | 16 | 21872110 | 21902482 | 21622110 | 22152482 |
| | cytochrome c | 615160 | | complex III | | | | | |
| | reductase core | | | deficiency, | | | | | |
| | protein 2 | | | nuclear type 5 | | | | | |
| YARS2 | tyrosyl-tRNA | 610957, | AR | Myopathy, lactic | 12 | 32771691 | 32800098 | 32521691 | 33050098 |
| | synthetase 2 | 613561 | | acidosis, and | | | | | |
| | | | | sideroblastic | | | | | |
| | | | | anemia 2 | | | | | |

[0476] Table 9 presents the non-redundant list of other HA genes (i.e., those not listed in Table 8). The column headers in Table 9 are as follows: RefSeq Gene Symbol—gene symbol used by NCBI's Reference Sequence (RefSeq) database; Gene Full Name—official HGNC-provided full name for the gene; OMIM-OMIM entry numbers for the gene and phenotype; Disease Model—indicates if inheritance is autosomal dominant (AD), autosomal recessive (AR), X-linked dominant (XLD), or X-linked recessive (XLR); Disease Name (OMIM)—name of the type of UCD as listed in OMIM; Chr—chromosome that harbors the UCD gene; Gene Start (hg18)—genome position corresponding to the start of the gene (based on human assembly NCBI 36/hg 18); Gene Stop (hg18)—genome position corresponding to the end (stop) of the gene (based on human assembly NCBI 36/hg18); Gene Start—250 Kb (hg18)—genome position corresponding to the start of the gene (based on human assembly NCBI 36/hg18) minus 250 Kb; Gene Stop+250 Kb (hg18)—genome position corresponding to the end (stop) of the gene (based on human assembly NCBI 36/hg18) plus 250 Kb.

TABLE 10
Variants identified in ADNI's WGS data assessed in the subset of Alzheimer's disease (AD) cases (causal variants (OR > 1))

| | | | | | gnomAD | gnomAD | AD | AD | | | | | | | |
|---|---|---|---|---|---|---|---|---|---|---|---|---|---|---|---|
| Analysis | | Position | | | Total | Positive | Total | Positive | | | OR | OR | RefSeq | Gene | SEQ |
| Category | Chr | (hg19) | REF | ALT | [symbol] | [symbol] | [symbol] | [symbol] | p-value | OR | LCL | UCL | Gene Symbol | Region | ID |
| HA | 1 | 45974696 | A | G | 56,596 | 3 | 177 | 1 | 0.01241 | 107.18 | 11.10 | 1035.45 | MMACHC | Ex. | 117 |
| HA | 2 | 26437421 | G | A | 56,801 | 3 | 177 | 1 | 0.01237 | 107.57 | 11.14 | 1039.20 | HADHA | Ex. | 118 |
| HA | 2 | 150438722 | C | A | 56,827 | 13 | 177 | 1 | 0.04261 | 24.83 | 3.23 | 190.85 | MMADHC | Ex. | 119 |
| CPS1 del | 2 | 211361375 | CTACA | C | 7,707 | 0 | 177 | 1 | 0.02245 | 131.01 | 5.32 | 3227.24 | CPS1 | Int. | 120 |
| CPS1 del | 2 | 211362642 | A | ATC | 6,746 | 1 | 174 | 2 | 0.00185 | 78.43 | 7.08 | 869.11 | CPS1 | Int. | 121 |
| CPS1 del | 2 | 211363902 | G | T | 7,710 | 12 | 177 | 2 | 0.03818 | 7.33 | 1.63 | 33.00 | CPS1 | Int. | 122 |
| CPS1 del | 2 | 211367103 | AT | A | 7,083 | 22 | 80 | 2 | 0.02900 | 8.23 | 1.90 | 35.60 | CPS1 | Int. | 123 |
| CPS1 del | 2 | 211367235 | T | TTA | 7,219 | 1 | 177 | 1 | 0.04729 | 41.01 | 2.55 | 658.35 | CPS1 | Int. | 124 |
| GH02J210503 | 2 | 211369053 | C | A | 7,715 | 1 | 177 | 1 | 0.04436 | 43.83 | 2.73 | 703.59 | CPS1 | Int. | 125 |
| HA | 3 | 48929487 | G | A | 56,878 | 1 | 177 | 1 | 0.00619 | 323.16 | 20.13 | 5187.29 | SLC25A20 | Ex. | 126 |
| HA | 3 | 49455323 | C | T | 56,774 | 2 | 177 | 1 | 0.00930 | 161.28 | 14.56 | 178687 | AMT | Ex. | 127 |
| HA | 3 | 136016902 | G | A | 56,873 | 184 | 177 | 3 | 0.02078 | 5.31 | 1.68 | 16.78 | PCCB | Ex. | 128 |
| HA | 3 | 136046050 | G | A | 56,720 | 2 | 177 | 1 | 0.00930 | 161.13 | 14.54 | 1785.18 | PCCB | Ex. | 129 |
| HA | 3 | 136048854 | A | G | 56,810 | 5 | 177 | 1 | 0.01849 | 64.55 | 7.50 | 555.36 | PCCB | Ex. | 130 |
| HA | 3 | 182740282 | G | T | 56,824 | 10 | 177 | 1 | 0.03363 | 32.28 | 4.11 | 253.52 | MCCC1 | Ex. | 131 |
| HA | 4 | 146576485 | C | T | 56,869 | 4 | 177 | 1 | 0.01542 | 80.77 | 8.98 | 726.32 | MMAA | Ex. | 132 |
| HA | 6 | 49403267 | C | T | 56,816 | 12 | 177 | 1 | 0.03963 | 26.90 | 3.48 | 207.96 | MMUT | Ex. | 133 |
| HA | 6 | 99374800 | C | G | 56,769 | 10 | 177 | 1 | 0.03367 | 32.25 | 4.11 | 253.28 | FBXL4 | Ex. | 134 |
| UCD | 7 | 65554101 | A | G | 56,656 | 16 | 177 | 2 | 0.00143 | 40.46 | 9.23 | 177.28 | ASL | Ex. | 135 |
| UCD | 7 | 95813678 | C | A | 56,846 | 12 | 177 | 1 | 0.03961 | 26.91 | 3.48 | 208.07 | SLC25A13 | Ex. | 136 |
| HA | 11 | 66618208 | T | C | 56,321 | 1 | 175 | 1 | 0.00619 | 323.68 | 20.16 | 5195.77 | PC | Ex. | 137 |
| HA | 11 | 111896242 | G | A | 56,265 | 9 | 177 | 1 | 0.03092 | 35.52 | 4.48 | 281.82 | DLAT | Ex. | 138 |
| HA | 11 | 111916647 | G | A | 56,728 | 33,119 | 177 | 118 | 0.02668 | 1.43 | 1.04 | 1.95 | DLAT | Ex. | 139 |
| HA | 11 | 111921965 | A | G | 56,687 | 10 | 177 | 1 | 0.03371 | 32.20 | 4.10 | 252.91 | DLAT | Ex. | 140 |
| HA | 14 | 23243579 | C | T | 56,804 | 2 | 177 | 1 | 0.00929 | 161.37 | 14.57 | 1787.82 | SLC7A7 | Ex. | 141 |
| HA | 16 | 28855653 | G | A | 56,851 | 1 | 177 | 1 | 0.00620 | 323.01 | 20.12 | 5184.83 | TUFM | Ex. | 142 |
| HA | 16 | 83940677 | C | T | 56,645 | 3 | 177 | 1 | 0.01240 | 107.28 | 11.10 | 1036.34 | MLYCD | Ex. | 143 |
| HA | 16 | 83948709 | T | A | 56,648 | 7 | 177 | 1 | 0.02465 | 45.97 | 5.63 | 375.64 | MLYCD | Ex. | 144 |
| HA | 16 | 83948889 | A | G | 56,461 | 1 | 177 | 1 | 0.00624 | 320.80 | 19.99 | 5149.26 | MLYCD | Ex. | 145 |
| HA | 17 | 7125598 | G | C | 56,850 | 3 | 177 | 1 | 0.01236 | 107.66 | 11.14 | 1040.10 | ACADVL | Ex. | 146 |
| UCD | 17 | 42084765 | C | G | 56,479 | 7 | 177 | 1 | 0.02472 | 45.84 | 5.61 | 374.52 | NAGS | Ex. | 147 |
| UCD | 17 | 42084825 | C | A | 56,384 | 3 | 177 | 1 | 0.01246 | 106.78 | 11.05 | 1031.57 | NAGS | Ex. | 148 |
| HA | 21 | 38132112 | C | T | 56,883 | 9 | 177 | 1 | 0.03059 | 35.91 | 4.52 | 284.92 | HLCS | Ex. | 149 |

[symbol]

indicates data missing or illegible when filed

[0477] Table 10 lists variants identified in publicly available WGS data reported by ADNI. Variants were assessed in the subset of Alzheimer's disease (AD) cases and were compared to publicly available gnomAD population data for the statistical analyses. Only causal variants (OR>1) are reported. The column headers in Table 10 are as follows: Analysis Category—four categories were assessed: CPS1 del are variants that overlap with SEQ IDs 3 (see Table 1) or 116 (see Table 6); GH02J210503 are variants that overlap with CPS1 GeneHancer enhancer GH02J210503 (e.g., see FIGS. 3 and 4); HA are variants that overlap with HA genes (see Table 9); UCD are variants that overlap with UCD genes (see Table 8); Chr—Chromosome (Chr) harboring the variant; Position (hg19)—genome location of the variant (NCBI37/hg19 genome coordinates); REF—allele found in the Reference (REF) human genome assembly; ALT—alternate (ALT) allele found in the gnomAD subjects or AD cases; gnomAD Total Subjects—total number of gnomAD (v2.1) WES subjects assessed for the variant; gnomAD Positive Subjects—number of gnomAD (v2.1) WES subjects with the variant; AD Total Cases—total number of AD cases in the ADNI WGS data assessed for the variant; AD Positive Cases—number of AD cases in the ADNI WGS data with the variant; p-value-statistical significance using FET (a cutoff of <0.05 was used); OR—odds ratio (OR) value; OR LCL-odds ratio, lower confidence limit (95%); OR UCL—odds ratio, upper confidence limit (95%); RefSeq Gene Symbol—gene symbol used by NCBI's Reference Sequence (RefSeq) database; Gene Region—lists if the variant is located in an exonic (Ex.) or intronic (Int.) region of a gene; SEQ ID—Sequence identification number in the Sequence Listing.

TABLE 11
Variants identified in ADNI's WGS data assessed in the subset of mild cognitively impaired (MCI) cases (causal variants (OR > 1))

| | | | | | gnomAD | gnomAD | MCI | MCI | | | | | | | |
|---|---|---|---|---|---|---|---|---|---|---|---|---|---|---|---|
| Analysis | | Position | | | Total | Positive | Total | Positive | | | OR | OR | RefSeq | Gene | |
| Category | Chr | (hg19) | REF | ALT | Subjects | [symbol] | Cases | [symbol] | p-value | OR | LCL | UCL | Gene Symbol | Region | SEQ ID |
| HA | 1 | 53675699 | A | G | 56,787 | 1 | 342 | 1 | 0.01194 | 166.53 | 10.39 | 2667.95 | CPT2 | Ex. | 150 |
| HA | 1 | 53676305 | C | T | 56,799 | 2 | 342 | 1 | 0.01785 | 83.28 | 7.53 | 920.64 | CPT2 | Ex. | 151 |
| HA | 1 | 53676401 | T | G | 56,777 | 100 | 342 | 3 | 0.02424 | 5.02 | 1.58 | 15.89 | CPT2 | Ex. | 152 |
| HA | 1 | 53676688 | T | C | 56,836 | 6 | 342 | 1 | 0.04113 | 27.78 | 3.33 | 231.34 | CPT2 | Ex. | 153 |
| HA | 2 | 26455041 | C | G | 56,777 | 1 | 342 | 1 | 0.01194 | 166.50 | 10.39 | 2667.48 | HADHA | Ex. | 154 |
| CPS1 del | 2 | 211365470 | C | T | 7,706 | 0 | 342 | 1 | 0.04250 | 67.70 | 2.75 | 1665.01 | CPS1 | Int. | 155 |
| CPS1 del | 2 | 211365748 | A | G | 7,707 | 5 | 342 | 2 | 0.03281 | 9.06 | 1.75 | 46.87 | CPS1 | Int. | 156 |
| CPS1 del | 2 | 211367441 | C | A | 7,691 | 4 | 342 | 2 | 0.02419 | 11.30 | 2.06 | 61.93 | CPS1 | Int. | 157 |
| UCD | 2 | 211454831 | G | A | 56,638 | 77 | 342 | 3 | 0.01253 | 6.50 | 2.04 | 20.70 | CPS1 | Ex. | 158 |
| UCD | 2 | 211507223 | T | A | 56,730 | 0 | 342 | 1 | 0.00599 | 498.36 | 20.27 | 12255.94 | CPS1 | Ex. | 159 |
| UCD | 2 | 211527868 | C | T | 56,845 | 0 | 342 | 1 | 0.00598 | 499.37 | 20.31 | 12280.78 | CPS1 | Ex. | 160 |
| HA | 3 | 49455323 | C | T | 56,774 | 2 | 342 | 1 | 0.01786 | 83.24 | 7.53 | 920.23 | AMT | Ex. | 127 |
| HA | 3 | 182788881 | C | T | 56,873 | 1 | 342 | 1 | 0.01192 | 166.78 | 10.41 | 2671.99 | MCCC1 | Ex. | 161 |
| HA | 4 | 159611545 | G | A | 56,848 | 0 | 342 | 1 | 0.00598 | 499.40 | 20.31 | 12281.43 | ETFDH | Ex. | 162 |
| HA | 4 | 159616692 | T | C | 56,792 | 1 | 342 | 1 | 0.01194 | 166.54 | 10.40 | 2668.18 | ETFDH | Ex. | 163 |
| UCD | 7 | 95761141 | G | A | 56,660 | 7 | 342 | 1 | 0.04701 | 23.73 | 2.91 | 193.43 | SLC25A13 | Ex. | 164 |
| UCD | 7 | 95818665 | G | A | 56,860 | 1 | 342 | 1 | 0.01192 | 166.74 | 10.41 | 2671.38 | SLC25A13 | Ex. | 165 |
| HA | 10 | 97376235 | A | T | 35,695 | 1 | 342 | 1 | 0.01889 | 104.67 | 6.53 | 1677.01 | ALDH18A1 | Ex. | 166 |
| HA | 10 | 126091623 | A | T | 56,351 | 3 | 342 | 1 | 0.02391 | 55.08 | 5.71 | 530.87 | OAT | Ex. | 167 |
| HA | 11 | 66617482 | G | A | 56,704 | 0 | 342 | 1 | 0.00600 | 498.14 | 20.26 | 12250.32 | PC | Ex. | 168 |
| HA | 11 | 111899575 | C | A | 56,881 | 1 | 342 | 1 | 0.01192 | 166.80 | 10.41 | 2672.36 | DLAT | Ex. | 169 |
| HA | 11 | 111930627 | A | C | 52,799 | 4 | 342 | 1 | 0.03177 | 38.71 | 4.31 | 347.21 | DLAT | Ex. | 170 |
| HA | 12 | 109998857 | C | T | 56,461 | 2 | 340 | 1 | 0.01785 | 83.27 | 7.53 | 920.57 | MMAB | Ex. | 171 |
| HA | 12 | 110011282 | C | G | 50,227 | 2 | 342 | 1 | 0.02015 | 73.64 | 6.66 | 814.11 | MMAB | Ex. | 172 |
| HA | 13 | 100861707 | G | C | 56,851 | 6 | 342 | 1 | 0.04112 | 27.78 | 3.34 | 231.40 | PCCA | Ex. | 173 |
| HA | 15 | 76578804 | A | C | 56,771 | 3 | 342 | 1 | 0.02374 | 55.49 | 5.76 | 534.83 | ETFA | Ex. | 174 |
| HA | 15 | 76603710 | G | A | 30,861 | 26 | 341 | 2 | 0.03734 | 7.00 | 1.65 | 29.60 | ETFA | Ex. | 175 |
| HA | 17 | 7126099 | A | C | 56,816 | 1 | 342 | 1 | 0.01193 | 166.61 | 10.40 | 2669.31 | ACADVL | Ex. | 176 |
| HA | 17 | 7127359 | C | T | 56,856 | 5 | 342 | 1 | 0.03534 | 33.34 | 3.89 | 286.17 | ACADVL | Ex. | 177 |
| HA | 17 | 17924457 | G | A | 56,505 | 4 | 342 | 1 | 0.02972 | 41.42 | 4.62 | 371.58 | ATPAF2 | Ex. | 178 |
| UCD | 17 | 42084786 | A | T | 56,510 | 1 | 342 | 1 | 0.01200 | 165.72 | 10.34 | 2654.93 | NAGS | Ex. | 179 |
| UCD | 17 | 42085014 | C | G | 50,285 | 2 | 342 | 1 | 0.02013 | 73.73 | 6.67 | 815.05 | NAGS | Ex. | 180 |
| UCD | 17 | 42085026 | G | A | 50,261 | 1 | 342 | 1 | 0.01347 | 147.39 | 9.20 | 2361.34 | NAGS | Ex. | 181 |
| HA | 19 | 19218779 | C | T | 56,600 | 59 | 342 | 3 | 0.00625 | 8.48 | 2.65 | 27.19 | SLC25A42 | Ex. | 182 |
| HA | 19 | 51857610 | A | G | 56,344 | 1 | 341 | 1 | 0.01200 | 165.71 | 10.34 | 2654.94 | ETFB | Ex. | 183 |

[symbol]

indicates data missing or illegible when filed

[0478] Table 11 lists variants identified in publicly available WGS data reported by ADNI. Variants were assessed in the subset of mild cognitively impaired (MCI) cases and were compared to publicly available gnomAD population data for the statistical analyses. Only causal variants (OR>1) are reported. The column headers in Table 11 are as follows: Analysis Category—four categories were assessed (but only three were found with relevant variants, none were found for the GH02J210503 category): CPS1 del are variants that overlap with SEQ IDs 3 (see Table 1) or 116 (see Table 6); GH02J210503 are variants that overlap with CPS1 GeneHancer enhancer GH02J210503 (e.g., see FIGS. 3 and 4); HA are variants that overlap with HA genes (see Table 9); UCD are variants that overlap with UCD genes (see Table 8); Chr-Chromosome (Chr) harboring the variant; Position (hg 19)—genome location of the variant (NCBI37/hg 19 genome coordinates); REF—allele found in the Reference (REF) human genome assembly; ALT—alternate (ALT) allele found in the gnomAD subjects or MCI cases; gnomAD Total Subjects—total number of gnomAD (v2.1) WES subjects assessed for the variant; gnomAD Positive Subjects—number of gnomAD (v2.1) WES subjects with the variant; MCI Total Cases—total number of MCI cases in the ADNI WGS data assessed for the variant; MCI Positive Cases—number of MCI cases in the ADNI WGS data with the variant; p-value—statistical significance using FET (a cutoff of <0.05 was used); OR—odds ratio (OR) value; OR LCL—odds ratio, lower confidence limit (95%); OR UCL—odds ratio, upper confidence limit (95%); RefSeq Gene Symbol—gene symbol used by NCBI's Reference Sequence (RefSeq) database; Gene Region—lists if the variant is located in an exonic (Ex.) or intronic (Int.) region of a gene; SEQ ID-Sequence identification number in the Sequence Listing.

TABLE 12
Variants identified in ADNI's WGS data assessed in the subset of mild cognitively impaired (MCI) cases (protective variants (OR < 1))

| | | | | | | gnomAD | MCI | MCI | | | | | RefSeq | | |
|---|---|---|---|---|---|---|---|---|---|---|---|---|---|---|---|
| Analysis | | Position | | | gnomAD | Positive | Total | Positive | | | OR | OR | Gene | Gene | SEQ |
| Category | Chr | (hg19) | REF | ALT | Total | Subjects | Cases | Cases | p-value | OR | LCL | UCL | Symbol | Region | ID |
| CPS1 del | 2 | 211364167 | A | T | 7696 | 103 | 342 | 0 | 0.02302 | 0.11 | 0.01 | 1.73 | CPS1 | Int. | 184 |
| CPS1 del | 2 | 211367151 | AAGAG | A | 7008 | 202 | 342 | 3 | 0.02666 | 0.30 | 0.09 | 0.94 | CPS1 | Int. | 185 |

[0479] Table 12 lists variants identified in publicly available WGS data reported by ADNI. Variants were assessed in the subset of mild cognitively impaired (MCI) cases and were compared to publicly available gnomAD population data for the statistical analyses. Only protective variants (OR<1) are reported. The column headers in Table 12 are as follows: Analysis Category—four categories were assessed (but only one, CPS1 del, was found with relevant variants): CPS1 del are variants that overlap with SEQ IDs 3 (see Table 1) or 116 (see Table 6); GH02J210503 are variants that overlap with CPS1 GeneHancer enhancer GH02J210503 (e.g., see FIGS. 3 and 4); HA are variants that overlap with HA genes (see Table 9); UCD are variants that overlap with UCD genes (see Table 8); Chr—Chromosome (Chr) harboring the variant; Position (hg19)—genome location of the variant (NCBI37/hg19 genome coordinates); REF—allele found in the Reference (REF) human genome assembly; ALT—alternate (ALT) allele found in the gnomAD subjects or MCI cases; gnomAD Total Subjects—total number of gnomAD (v2.1) WES subjects assessed for the variant; gnomAD Positive Subjects—number of gnomAD (v2.1) WES subjects with the variant; MCI Total Cases—total number of MCI cases in the ADNI WGS data assessed for the variant; MCI Positive Cases—number of MCI cases in the ADNI WGS data with the variant; p-value—statistical significance using FET (a cutoff of <0.05 was used); OR—odds ratio (OR) value; OR LCL—odds ratio, lower confidence limit (95%); OR UCL—odds ratio, upper confidence limit (95%); RefSeq Gene Symbol—gene symbol used by NCBI's Reference Sequence (RefSeq) database; Gene Region—lists if the variant is located in an exonic (Ex.) or intronic (Int.) region of a gene; SEQ ID—Sequence identification number in the Sequence Listing.

TABLE 13
FDA-approved compounds available for treatment of UCDs

| | Brand | | |
|---|---|---|---|
| Drug Name | Name | Manufacturer/Sponser | UCD Gene Target(s) |
| carglumic acid | Carbaglu | Recordati Rare Diseases | NAGS |
| glycerol phenylbutyrate | Ravicti | Horizon Therapeutics | ARG1, ASS1, CPS1, OTC, |
| | | (Hyperion Therapeutics), | SLC25A13, SLC25A15 |
| | | Immedica Pharma | |
| sodium phenylacetate and sodium | Ammonul | Bausch Health, Ucyclyd | ARG1, ASS1, CPS1, NAGS, OTC |
| benzoate | | Pharma | |
| | Ucephan | Immunex (Braun Medical) | ARG1, ASS1, CPS1, NAGS, OTC |
| sodium phenylbutyrate | Buphenyl | Horizon Therapeutics | ASS1, CPS1, OTC, SLC25A15 |
| | | (Hyperion Therapeutics) | |
| | Ammonaps | Immedica Pharma | ASS1, CPS1, OTC |
| | Pheburane | Eurocept, Lucane Pharma, | ASS1, CPS1, OTC |
| | | Orpharma, Proveca | |
| | Olpruva | Acer Therapeutics/Relief | ASS1, CPS1, OTC |
| | | Therapeutics | |
| sodium benzoate | generic | various | multiple |

[0480] Table 13 lists FDA-approved compounds available for treatment of UCDs. The column headers in Table 13 are as follows: Drug Name—the generic name of the drug; Brand Name—brand name(s) of the drugs; Manufacturer/Sponsor—pharmaceutical companies that market the drug (including former developers or manufacturers); UCD Gene Target(s)—gene symbols for the UCD(s) that are treatable with a given drug. Multiple formulations can be found for a given compound, such as taste-masked sodium phenylbutyrate (Olpruva/OLPRUVA™).

TABLE 14
Therapeutic approaches in development for treatment of UCDs

| | | | | Sponsor/ | | |
|---|---|---|---|---|---|---|
| Experimental | | Clinical | Other | Responsible | | UCD Gene |
| Therapies | Approach | Trial ID | Study ID | Party | Phase* | Target(s) |
| AEB1102 | enzyme | NCT03378531 | CAEB1102-102A | Aglea | Phase 2 | ARG1 |
| (pegzilarginase) | replacement | | | Biotherapeutics | | |
| | | NCT03921541 | CAEB1102-300A | | Phase 3 | |
| ARCT-810 | mRNA | NCT04416126 | ARCT- 810-01 | Arcturus | Phase 1b | OTC |
| | | | | Therapeutics | | |
| | | NCT04442347 | ARCT- 810-02 | | Phase 1b | |
| | | NCT05526066 | ARCT- 810-03 | | Phase 2 | |
| BB-OTC | enzyme | | | Enlivex | Pre- | OTC |
| | replacement | | | Therapeutics | clinical | |
| DTX301 | gene therapy | NCT05345171 | DTX301-CL301, | Ultragenyx | Phase 3 | OTC |
| | (AAV8) | | 2020-003384-25 | Pharmaceutical | | |
| KB-195 | microbiome | NCT03933410 | K020-218 | Kaleido | Phase 2 | all UCD |
| | metabolic | | | Biosciences | | |
| P-OTC-101 | gene therapy | | | Poseida | Pre- | OTC |
| | | | | Therapeutics | clinical | |
| PRX-OTC | enzyme | | | Roivant | Pre- | OTC |
| | replacement | | | Sciences | clinical | |
| | | | | (PhaseRx | | |
| | | | | asset) | | |
| SEL-313 | gene therapy | | | Selecta Bio | Pre- | OTC |
| | | | | | clinical | |
| SG328 | fusogen | | | Sana | Pre- | OTC |
| | | | | Biotechnology | clinical | |
| P-OTC-101 | gene therapy | | | Poseida | Pre- | OTC |
| | | | | Therapeutics | clinical | |

[0481] Table 14 lists therapeutic approaches in development for treatment of UCDs. The column headers in Table 14 are as follows: Experimental Therapies—name of therapy in development; Approach—type of therapeutic approach; Clinical Trial ID—ClinicalTrials.gov identifier; Other Study ID—Other study identifier; Sponsor/Responsible Party—pharmaceutical company that is the sponsor or responsible party; Phase—clinical trial phase (development stage) for the study; UCD Gene Target(s)—gene symbols for the UCD(s) that are treatable with a given drug.

### Example 10—Figures Referenced in this Study

[0482] FIG. 1 represents an example of an aCGH-detected 3-probe intronic deletion that impacts the UCD gene CPS1. The deletion was observed in 3/100 LOAD cases and 1/1,000 Normal (NVE) subjects. All 4 deletions appear to be identical, with a genomic span of 6,430 bp. Genome coordinates of the deletion are: hg18, chr2:211070190-211076620; hg19, chr2:211361945-211368375. Log 2 ratios for the y-axes (4 data tracks) report deletions as negatively shifted probes. Genome coordinates for the x-axis are based on the NCBI36/hg18 freeze.

[0483] FIG. 2 represents an example of the extent of the CPS1 intronic deletion compared to different public data sources for CNVs/SVs in the UCSC genome browser. The deletion reported by Population Bio (CPS1_del_PBio) is defined by the location of 3 aCGH probes (see FIG. 1). The deletion reported in other data sources (1KG Ph3 labeled as CPS1 del_1KG_Ph3, DGV_Gold labeled as gssvL69036, and gnomAD labeled as DEL_2_26674) is based on analysis of WGS data, which allows (in this instance) for a more accurate delineation of the endpoints. Five aCGH probes are shown (central 3 mapping to the deletion plus 1 flanking on each side). The endpoints of the WGS mapped deletion do not extend to the flanking probes, which confirms the aCGH data. Genome coordinates are based on the NCBI36/hg18 freeze.

[0484] FIG. 3 represents an example of UCSC genome browser regulatory site annotations that are encompassed by, or overlap with, the CPS1 deletion detected in 3 LOAD cases. Displayed are the 3 Agilent probes (identified by dashed lines and are the same 3 aCGH probes shown in FIG. 1), CNV/SV public data (DGV GS, 1KG Ph3, and gnomAD) that is also shown in FIG. 2, and regulatory site annotation from two public data sources: ENCODE transcription factor binding sites; GeneHancer mapping of enhancer and promoter sites. This demonstrates that the deletion overlaps an enhancer regulatory element (GH02J210503) with a functional role for expression of the CPS1 gene. Genome coordinates are based on the GRCh37/hg 19 freeze.

[0485] FIG. 4 represents an example of UCSC genome browser regulatory site annotations for the full extent of the CPS1 gene (zoomed out view of FIG. 3, the intronic deletion is demarcated by the pair of vertical dashed lines). Besides GeneHancer enhancer GH02J210503, the location of 5 other promoter/enhancer elements are shown. Also displayed are the interactions between GeneHancer regulatory elements and genes (Double Elite), which shows that enhancer GH02J210503 (located in an intron of CPS1) interacts with CPS1 promoter GH02J210475.

[0486] FIG. 5 represents an example of a PCR assay designed to detect the CPS1 intronic deletion (see FIG. 1 and FIG. 2). Shown is a 1% agarose gel with a PCR product band (350 bp in size) obtained for a positive (Pos.) control genomic DNA sample (i.e., from a subject known to harbor the CPS1 deletion) using PCR primers CPS1_delF and CPS1delR (see Table 6). No PCR product is observed for two different negative (Neg.) control genomic DNA samples, thereby demonstrating the specificity of the DNA assay to detect the CPS1 deletion.

[0487] FIG. 6 represents an example of a PCR assay used to validate the aCGH-detected CPS1 deletion found in 3 LOAD cases (see FIG. 1). Each of the 3 positive LOAD samples (Expt IDs 2693, 2696, and 2719) was run in duplicate (lanes 1-6 after the DNA ladder) on a 2% agarose gel. Two negative controls (samples known not to harbor the deletion on the basis of aCGH, lanes 7 and 8) are also shown, plus a non-template control (NTC) wherein the assay was run with no input DNA. This demonstrates that all 3 LOAD samples yield a positive product at the expected size of 350 bp (see FIG. 5).

[0488] FIG. 7 shows examples of aCGH-detected CNVs nearby UCD gene OTC (gene locations are shown at the top) in 5 LOAD cases (all female). The CNVs (a deletion in track 1, a duplication in track 2, and an identical duplication in tracks 3-5) are also nearby or directly impact the TSPAN7 gene. Log 2 ratios for the y-axes (5 tracks) report deletions as negatively shifted probes and duplications as positively shifted probes. Genome coordinates for the x-axis are based on the NCBI36/hg18 freeze. See Table 1 for the NCBI36/hg18 genome coordinates of the CNVs.

[0489] FIG. 8 represents examples of aCGH-detected CNVs (deletion and duplication) compared to public data sources for CNVs/SVs (DGV GS and gnomAD SV) in the UCSC genome browser. Two aCGH-detected CNVs (see FIG. 7) were confirmed in the gnomAD SV database: DEL_X_185726 corresponds to the deletion found in 1 LOAD case (Expt ID 2732); DUP_X_52986 corresponds to the duplication found in 3 LOAD cases (Expt IDs 2724, 2726, and 2744). The duplication found in LOAD case Expt ID 2687 is not found in public CNV/SV data sources. Genome coordinates are based on the GRCh37/hg 19 freeze. See Table 1 for the NCBI36/hg18 genome coordinates of the CNVs.

[0490] FIG. 9 represents an example of an aCGH-detected 1-probe (Agilent probe A_16 P21444361) intronic deletion that impacts the UCD gene OTC. The deletion was observed in 1/100 LOAD cases and 0/1,000 Normal (NVE) subjects (the dotted vertical line demarcates the 1,000 Normal subjects from the 100 LOAD cases). Genome coordinates for the aCGH probe: hg18, chrX:38109666-38109725; hg19, chrX:38224722-38224781. The y-axis Log 2 ratio reports deletions as negatively shifted probes. The plot demonstrates that (i) the probe is well-behaved (very little noise across 1,100 total aCGH experiments) and (ii) that there exists an individual with a very low log 2 ratio (consistent with a homozygous deletion). This individual is male and thus this result demonstrates that this individual is deleted at this locus (the log 2 ratio is lower than expected for a deletion affecting only one allele, because males only have one Chr X).

[0491] FIG. 10 represents an example of a plot of aCGH data for an individual with the deletion shown in FIG. 9. The probes (dots) in this plot are all from the same LOAD case (Expt ID 2764) and span the OTC gene (located at chrX:38,096,680-38,165,647), demonstrating the deleted probe in the context of the full extent of the gene. Genome coordinates for the x-axis are based on the NCBI36/hg 18 freeze.

[0492] FIG. 11 represents an example of an aCGH-detected 1-probe (Agilent probe A_16 P15364898) intergenic deletion ˜226Kb downstream of HA gene GLUL. The deletion was observed in 2/100 LOAD cases and 1/1,000 Normal (NVE) subjects (the dotted vertical line demarcates the 1,000 Normal subjects from the 100 LOAD cases). Genome coordinates for the aCGH probe: hg18, chr1:180387776-180387835; hg19, chr1:182121153-182121212. The y-axis Log 2 ratio reports deletions as negatively shifted probes.

[0493] FIG. 12 represents an example of UCSC genome browser regulatory site annotations that are immediately adjacent to the intergenic deletion (˜226Kb downstream of the GLUL gene) detected in 2 LOAD cases (see FIG. 11). Displayed are the deletion-reporting aCGH Agilent probe (A_16 P15364898, see FIG. 11), CNV/SV public data (DGV GS and gnomAD), and regulatory site annotation from two public data sources: GeneHancer mapping of enhancer and promoter sites; ENCODE transcription factor binding sites. The 1-probe deletion maps to gnomAD DEL_1_9677, which is immediately adjacent to an enhancer regulatory element (GH01J182142) with a functional role for expression of the GLUL gene. There are numerous ENCODE transcription factor binding sites (bottom track) that map to this enhancer element. Genome coordinates are based on the GRCh37/hg19 freeze.

[0494] FIG. 13 represents an example of UCSC genome browser regulatory site annotations for the full extent of the GLUL gene and downstream region encompassing the intergenic deletion (zoomed out view of FIG. 12, the deletion detected by Agilent probe A16P15364898 and mapping to gnomAD DEL_1_9677). Besides GeneHancer enhancer GH01J182142, the location of 10 other promoter/enhancer elements downstream of the GLUL gene are shown. This demonstrates that enhancer and promoter elements do not need to be contained within the gene whose expression they are regulating and that they can be located far away from the gene.

### Example 11—Exemplary Gene Panels for AD/MCI Risk Prediction Tests

[0495] Typical of complex disorders, multiple deleterious variants distributed across several genes can contribute to AD and/or MCI. Therefore, to efficiently screen for multiple genes/variants, a risk prediction test can be constructed using a gene panel approach. Gene panel tests can be performed using sequencing reagents that only assay the genes in the panel or targeted interpretation of the genes in the panel can be performed using WES or WGS on a subject's genome. In some embodiments, the subject's whole exome or whole genome was previously generated (e.g., as part of the subject's electronic health record) and the gene panel can be assessed using in silico analysis.

[0496] Table 15 contains the subset of UCD/HA genes in which one or more subjects with AD (OPTIMA or ADNI cohorts) and/or MCI (ADNI cohort) had a variant with an OR>5 when compared to normal subjects in private (e.g., NVE) and/or public databases (e.g., DGV and gnomAD). Variants in these genes are reported in Tables 1, 10, or 11. Furthermore, Table 15 contains only the subset of variants (with OR>5) that impact an exon and/or regulatory element region (GeneHancer). For Table 1 variants, regions between the next probe to the left and right of the reporting probe(s) were also assessed for GeneHancer promoters and/or enhancers since the breakpoints of the CNV usually map into these regions. For example, in FIG. 3, the left breakpoint of the CPS1 deletion maps between Agilent probes A_16_P36056631 and A16 P16022206 based on public database CNVs in DGV (gssvL69036) and gnomAD SV (DEL_2_26674), which was also validated by Sanger sequencing experiments used to develop the CPS1 deletion assay (see Example 5 and FIGS. 5 and 6).

TABLE 15
UCD/HA gene variants with OR > 5

| | | | | | UCD/HA | | |
|---|---|---|---|---|---|---|---|
| | Variant | | Variant | | Gene | UCD/HA | GeneHancer |
| SEQ | Source | | Allele | Supporting | Impacted or | Gene | Regulatory |
| ID | Table | Variant Position (hg19) | Type | Public Variants | Adjacent | Region | Element |
| 117 | 10 | chr1: 45974696 | A > G | rs141429393 | MMACHC | Ex. | none |
| 150 | 11 | chr1: 53675699 | A > G | rs148035648 | CPT2 | Ex. | none |
| 151 | 11 | chr1: 53676305 | C > T | rs763703786 | CPT2 | Ex. | none |
| 152 | 11 | chr1: 53676401 | T > G | rs2229291 | CPT2 | Ex. | none |
| 153 | 11 | chr1: 53676688 | T > C | rs74315297 | CPT2 | Ex. | none |
| 1 | 1 | chr1: 182121153-182121212 | het loss | DEL_1_9677 | GLUL | Inter. | GH01J182142 (enh), |
| | | | | | | | GH01J182152 (enh) |
| 119 | 10 | chr2: 150438722 | C > A | rs549522925 | MMADHC | Ex. | none |
| 120 | 10 | chr2: 211361375 | CTACA > C | gnomAD | CPS1 | Int. | none |
| | | | | (rs1275499747) | | | |
| 3 | 1 | chr2: 211361945-211368375 | het loss | DEL_2_26674, | CPS1 | Int. | GH02J210503 (enh) |
| | | | | esv3594156, | | | |
| | | | | gssvL69036 | | | |
| 121 | 10 | chr2: 211362642 | A > ATC | gnomAD | CPS1 | Int. | none |
| | | | | (rs113465610) | | | |
| 122 | 10 | chr2: 211363902 | G > T | rs551601160 | CPS1 | Int. | none |
| 155 | 11 | chr2: 211365470 | C > T | rs557875053 | CPS1 | Int. | none |
| 156 | 11 | chr2: 211365748 | A > G | rs542708544 | CPS1 | Int. | none |
| 123 | 10 | chr2: 211367103 | AT > A | gnomAD | CPS1 | Int. | none |
| | | | | (rs1253865550) | | | |
| 124 | 10 | chr2: 211367235 | T > TTA | gnomAD | CPS1 | Int. | none |
| | | | | (rs539832276) | | | |
| 157 | 11 | chr2: 211367441 | C > A | rs776789323 | CPS1 | Int. | none |
| 125 | 10 | chr2: 211369053 | C > A | rs77459694 | CPS1 | Int. | GH02J210503 (enh) |
| 158 | 11 | chr2: 211454831 | G > A | rs147294932 | CPS1 | Ex. | none |
| 159 | 11 | chr2: 211507223 | T > A | rs990390709 | CPS1 | Ex. | none |
| 160 | 11 | chr2: 211527868 | C > T | rs1458915316 | CPS1 | Ex. | none |
| 118 | 10 | chr2: 26437421 | G > A | rs141429393 | HADHA | Ex. | none |
| 154 | 11 | chr2: 26455041 | C > G | rs146667859 | HADHA | Ex. | none |
| 128 | 10 | chr3: 136016902 | G > A | rs77820367 | PCCB | Ex. | none |
| 129 | 10 | chr3: 136046050 | G > A | rs748422725 | PCCB | Ex. | none |
| 130 | 10 | chr3: 136048854 | A > G | rs202247823 | PCCB | Ex. | none |
| 131 | 10 | chr3: 182740282 | G > T | rs138480247 | MCCC1 | Ex. | none |
| 161 | 11 | chr3: 182788881 | C > T | rs1244625468 | MCCC1 | Ex. | none |
| 126 | 10 | chr3: 48929487 | G > A | rs367835261 | SLC25A20 | Ex. | none |
| 127 | 10, 11 | chr3: 49455323 | C > T | rs149457059 | AMT | Ex. | GH03J049409 |
| | | | | | | | (pro/enh) |
| 132 | 10 | chr4: 146576485 | C > T | rs374622922 | MMAA | Ex. | none |
| 162 | 11 | chr4: 159611545 | G > A | rs748289922 | ETFDH | Ex. | none |
| 163 | 11 | chr4: 159616692 | T > C | rs1397900640 | ETFDH | Ex. | none |
| 133 | 10 | chr6: 49403267 | C > T | rs147715336 | MMUT | Ex. | none |
| 7 | 1 | chr6: 70451721-70451780 | het loss | none | LMBRD1 | Ex. | none |
| 134 | 10 | chr6: 99374800 | C > G | rs147696366 | FBXL4 | Ex. | none |
| 135 | 10 | chr7: 65554101 | A > G | rs28941472 | ASL | Ex. | none |
| 164 | 11 | chr7: 95761141 | G > A | rs139149160 | SLC25A13 | Ex. | none |
| 136 | 10 | chr7: 95813678 | C > A | rs35996658 | SLC25A13 | Ex. | none |
| 165 | 11 | chr7: 95818665 | G > A | rs142308242 | SLC25A13 | Ex. | none |
| 11 | 1 | chr9: 133339468-133339512 | gain | none | ASS1 | Ex. | none |
| 166 | 11 | chr10: 97376235 | A > T | rs200452017 | ALDH18A1 | Ex. | GH10J095612 (enh) |
| 167 | 11 | chr10: 126091623 | A > T | rs746547714 | OAT | Ex. | none |
| 168 | 11 | chr11: 66617482 | G > A | rs538706456 | PC | Ex. | none |
| 137 | 10 | chr11: 66618208 | T > C | rs1357633652 | PC | Ex. | none |
| 138 | 10 | chr11: 111896242 | G > A | rs150145390 | DLAT | Ex. | GH11J112023 |
| | | | | | | | (pro/enh) |
| 169 | 11 | chr11: 111899575 | C > A | rs145146632 | DLAT | Ex. | none |
| 140 | 10 | chr11: 111921965 | A > G | rs376141049 | DLAT | Ex. | GH11J112050 (enh) |
| 170 | 11 | chr11: 111930627 | A > C | rs782803398 | DLAT | Ex. | none |
| 171 | 11 | chr12: 109998857 | C > T | rs746219370 | MMAB | Ex. | GH12J109559 (enh) |
| 12 | 1 | chr12: 110008934-110008993 | het loss | none | MMAB | Int. | GH12J109571 |
| | | | | | | | (pro/enh) |
| 172 | 11 | chr12: 110011282 | C > G | rs1157166932 | MMAB | Ex. | GH12J109571 |
| | | | | | | | (pro/enh) |
| 173 | 11 | chr13: 100861707 | G > C | rs766245108 | PCCA | Ex. | none |
| 13 | 1 | chr13: 101158725-101159785 | het loss | DEL_13_139253 | PCCA | Int. | GH13J100506 (enh), |
| | | | | | | | GH13J100508 (enh) |
| 141 | 10 | chr14: 23243579 | C > T | rs368317701 | SLC7A7 | Ex. | GH14J022772 (enh) |
| 174 | 11 | chr15: 76578804 | A > C | rs119458969 | ETFA | Ex. | GH15J076285 (enh) |
| 175 | 11 | chr15: 76603710 | G > A | rs557160401 | ETFA | Ex. | GH15J076309 |
| | | | | | | | (pro/enh) |
| 142 | 10 | chr16: 28855653 | G > A | rs751872107 | TUFM | Ex. | none |
| 143 | 10 | chr16: 83940677 | C > T | rs762343124 | MLYCD | Ex. | none |
| 144 | 10 | chr16: 83948709 | T > A | rs376504760 | MLYCD | Ex. | none |
| 145 | 10 | chr16: 83948889 | A > G | rs777032506 | MLYCD | Ex. | none |
| 178 | 11 | chr17: 17924457 | G > A | rs761788938 | ATPAF2 | Ex. | none |
| 147 | 10 | chr17: 42084765 | C > G | rs537949245 | NAGS | Ex. | GH17J044003 |
| | | | | | | | (pro/enh) |
| 179 | 11 | chr17: 42084786 | A > T | rs1312599995 | NAGS | Ex. | GH17J044003 |
| | | | | | | | (pro/enh) |
| 148 | 10 | chr17: 42084825 | C > A | rs199923863 | NAGS | Ex. | GH17J044003 |
| | | | | | | | (pro/enh) |
| 180 | 11 | chr17: 42085014 | C > G | rs998174756 | NAGS | Ex. | GH17J044003 |
| | | | | | | | (pro/enh) |
| 181 | 11 | chr17: 42085026 | G > A | rs773335810 | NAGS | Ex. | GH17J044003 |
| | | | | | | | (pro/enh) |
| 146 | 10 | chr17: 7125598 | G > C | rs201509063 | ACADVL | Ex. | GH17J007213 |
| | | | | | | | (pro/enh) |
| 176 | 11 | chr17: 7126099 | A > C | rs727503792 | ACADVL | Ex. | GH17J007213 |
| | | | | | | | (pro/enh) |
| 177 | 11 | chr17: 7127359 | C > T | rs113994170 | ACADVL | Ex. | none |
| 182 | 11 | chr19: 19218779 | C > T | rs144256360 | SLC25A42 | Ex. | none |
| 183 | 11 | chr19: 51857610 | A > G | rs993404483 | ETFB | Ex. | GH19J051353 |
| | | | | | | | (pro/enh) |
| 149 | 10 | chr21: 38132112 | C > T | rs119103228 | HLCS | Ex. | none |
| 18 | 1 | chrX: 38210509-38210568 | het loss | none | OTC | Inter. | GH0XJ038350 |
| | | | | | | | (pro/enh) |
| 19 | 1 | chrX: 38224722-38224781 | hom loss | none | OTC | Int. | GH0XJ038362 (enh) |

[0497] The column headers in Table 15 are as follows: SEQ ID—Sequence identification number in the Sequence Listing; Variant Source Table—indicates in which table (1, 10, and/or 11) the variant was originally reported; Variant Position (hg19)—genome location of the variant (NCBI37/hg19 genome coordinates; Table 1 hg18 coordinates were mapped to hg19); Variant Allele Type—lists the REF to ALT alleles for SNVs and indels or whether the variant is a deletion (het loss or hom loss) or gain for CNVs; Supporting Public Variants—lists the rs number for SNVs (dbSNP) and indels (rs numbers reported by gnomAD correspond to the first altered position of the variant) or SV numbers from one or more databases (1KG SVs, DGV SVs, and/or gnomAD SVs); UCD/HA Gene Impacted or Adjacent—lists which UCD/HA gene (see Tables 8 and 9) is impacted by the variant (i.e., is located in an exonic or intronic region) or is adjacent to a CNV (i.e., the CNV is intergenic but a UCD/HA gene is located within 250Kb, see Example 6); UCD/HA Gene Region—lists if the variant is located in an exonic (Ex.), intronic (Int.), or intergenic (Inter.) region of a UCD/HA gene (see Tables 8 and 9); GeneHancer Regulatory Element—lists the regulatory element identifier (reported under the GRCh37/hg19 UCSC genome browser's data track titled Enhancers and promoters from GeneHancer) and in parentheses whether the element is a promoter (pro) and/or enhancer (enh).

[0498] Exemplary UCD/HA gene panels are reported in Tables 16-18 for the subset of genes with one or more AD/MCI cases with a variant (Table 16, 35 genes), two or more (Table 17, 19 genes), or three or more (Table 18, 10 genes).

TABLE 16
UCD/HA genes with ≥1 AD/MCI case per
gene for variants with OR >5

| UCD/HA Gene | Variants per gene | AD/MCI cases per gene |
|---|---|---|
| ACADVL | 3 | 3 |
| ALDH18A1 | 1 | 1 |
| AMT | 1 | 2 |
| ASL | 1 | 2 |
| ASS1 | 1 | 1 |
| ATPAF2 | 1 | 1 |
| CPS1 | 13 | 22 |
| CPT2 | 4 | 6 |
| DLAT | 3 | 4 |
| ETFA | 2 | 3 |
| ETFB | 1 | 1 |
| ETFDH | 2 | 2 |
| FBXL4 | 1 | 1 |
| GLUL | 1 | 2 |
| HADHA | 2 | 2 |
| HLCS | 1 | 1 |
| LMBRD1 | 1 | 1 |
| MCCC1 | 2 | 2 |
| MLYCD | 3 | 3 |
| MMAA | 1 | 1 |
| MMAB | 3 | 3 |
| MMACHC | 1 | 1 |
| MMADHC | 1 | 1 |
| MMUT | 1 | 1 |
| NAGS | 5 | 5 |
| OAT | 1 | 1 |
| OTC | 2 | 2 |
| PC | 2 | 2 |
| PCCA | 2 | 2 |
| PCCB | 3 | 5 |
| SLC25A13 | 3 | 3 |
| SLC25A20 | 1 | 1 |
| SLC25A42 | 1 | 1 |
| SLC7A7 | 1 | 1 |
| TUFM | 1 | 1 |

TABLE 17
UCD/HAgenes with ≥2 AD/MCI cases per
gene for variants with OR >5

| UCD/HA Gene | Variants per gene | AD/MCI cases per gene |
|---|---|---|
| ACADVL | 3 | 3 |
| AMT | 1 | 2 |
| ASL | 1 | 2 |
| CPS1 | 13 | 22 |
| CPT2 | 4 | 6 |
| DLAT | 3 | 4 |
| ETFA | 2 | 3 |
| ETFDH | 2 | 2 |
| GLUL | 1 | 2 |
| HADHA | 2 | 2 |
| MCCC1 | 2 | 2 |
| MLYCD | 3 | 3 |
| MMAB | 3 | 3 |
| NAGS | 5 | 5 |
| OTC | 2 | 2 |
| PC | 2 | 2 |
| PCCA | 2 | 2 |
| PCCB | 3 | 5 |
| SLC25A13 | 3 | 3 |

TABLE 18
UCD/HAgenes with ≥3 AD/MCI cases per
gene for variants with OR >5

| UCD/HA Gene | Variants per gene | AD/MCI cases per gene |
|---|---|---|
| ACADVL | 3 | 3 |
| CPS1 | 13 | 22 |
| CPT2 | 4 | 6 |
| DLAT | 3 | 4 |
| ETFA | 2 | 3 |
| MLYCD | 3 | 3 |
| MMAB | 3 | 3 |
| NAGS | 5 | 5 |
| PCCB | 3 | 5 |
| SLC25A13 | 3 | 3 |

### Example 12:—Identify Additional Genetic Variations

[0499] The methods and protocols described in the previous examples can be used to identify any possible genetic variations. Data can be generated by comparing genetic variations identified in 2 cohorts, such as: 1) non-diseased cohort including 1000 or more non-diseased individuals (e.g., individuals without LOAD); and 2) diseased cohort including 100 or more diseased individuals (e.g., individuals with LOAD). The individuals in the cohorts can be gender and/or ethnically matched. The genetic variations present in the non-diseased cohort and diseased cohort can be identified using CNV analysis (e.g., described in Examples 1 and 2) or sequence analysis using whole exome sequencing (e.g., described in Example 3). In other embodiments, both CNVs and SNVs (and other variants such as indels, etc.) can be obtained using whole genome sequencing.

[0500] Two new genetic variations, CNV_1 (located on gene #1) and CNV_2 (located on gene #2), are identified, for example, by comparing the sequence data with a reference sequence (e.g., UCSC NCBI36/hg18 or GRCh37/hg19). Similarly, two other new genetic variations, SNV_1 (located on gene #1) and SNV_2 (located on gene #2), are identified, for example, by comparing the sequence data with a reference sequence (e.g., UCSC GRCh37/hg19 or GRCh38/hg38). Data from a CNV database created using genome-wide CNV data on healthy subjects (or individuals without LOAD) such as the Normal Variation Engine (NVE) described herein can be used to determine if a CNV found in a LOAD cohort occurs at higher frequency or not compared to the NVE. Similarly, SNVs identified in a LOAD cohort can be interpreted for the potential relevance to LOAD using the Exome Aggregation Consortium (ExAC) [PMID 27535533, Lek M et al. Nature. 2016 Aug. 18; 536(7616):285-91] or Genome Aggregation Database (gnomAD) [PMID 32461654, Karczewski K J et al. Nature. 2020 May; 581(7809):434-443] publicly available resources; that is, to obtain frequency data (e.g., ethnic-specific frequency) for variants under consideration. In other embodiments, NVE databases for CNV assessment can be created for a variety of ethnicities (e.g., African and Latino ancestry subjects) to determine relevance of a CNV in a LOAD cohort compared to an ethnically matched CNV database on individuals without LOAD and/or using ethnic-specific data from publicly available CNV databases such as the Database of Genomic Variants (DGV) [PMID 24174537, MacDonald J et al. Nucleic Acids Res. 2014 January; 42(Database issue):D986-92] or gnomAD structural variant (gnomAD SV) data [PMID 32461652, Collins R L et al. Nature. 2020 May; 581(7809):444-451].

[0501] In one example, 5 out of the 100 diseased individuals have CNV_1, and only 2 out of the 1,000 non-diseased individuals have CNV_1. In another example, 30 out of the 1,000 diseased individuals have CNV_2, and only 6 out of the 3,000 non-diseased individuals have CNV_2. In another example, 20 out of the 500 diseased individuals have SNV_1, and only 20 out of the 5,000 non-diseased individuals have SNV_1. In another example, 60 out of the 2,000 diseased individuals have SNV_2, and only 50 out of the 50,000 non-diseased individuals have SNV_2. The p-value can be calculated using standard tests, such as the Fisher's Exact Test (FET) and data can be selected using certain significance values. For example, genetic variations with a p-value of less than 0.05 are included. In another embodiment, a p-value of less than 0.1 are included (e.g., when assessing rare variants found at less than 1% frequency in the non-diseased cohort and use of a hypothesis-driven study disease like only examining UCD/HA genes). Further, the frequency and odds ratio of the two genetic variations can be calculated and summarized in an exemplary Table 19:

TABLE 19
Exemplary frequency and odds ratio calculations
of genetic variations associated with a disease

| Genetic | | Frequency in | Frequency in non- | |
|---|---|---|---|---|
| variation | Genes | diseased cohort | diseased cohort | OR |
| CNV_1 | Gene #1 | 5/100 = 5% | 2/1,000 = 0.2% | (5/95)/(2/998) = 26.26 |
| CNV_2 | Gene #2 | 30/1,000 = 3% | 6/3,000 = 0.2% | (30/970)/(6/2,994) = 15.43 |
| SNV_1 | Gene #1 | 20/500 = 4% | 20/5,000 = 0.4% | (20/480)/(20/4,980) = 10.38 |
| SNV_2 | Gene #2 | 60/2,000 = 3% | 50/50,000 = 0.1% | (60/1,940)/(50/49,950) = 30.90 |

[0502] A subject with CNV_1, CNV_2, or both, may have an increased risk of LOAD, and thus may be administered a medication. In another embodiment, a subject with SNV_1, SNV_2, or both, may have an increased risk of LOAD, and thus may be administered a medication. Other embodiments include, but are not limited to, subjects with an increased risk of LOAD due to the presence of CNV_1 and SNV_1, CNV_2 and SNV_2, CNV_1 and SNV_2, or CNV_2 and SNV_1. Increased risk of a disease (e.g., LOAD or MCI) may result from the presence of two or more deleterious genetic variants in a subject wherein the variants occur in the same gene or two or more genes. For example, the two or more genes may belong to the same biochemical pathway, such as genes that cause UCD or HA. Medications used to treat UCD often target more than one gene (e.g., see Table 13) and thus may be administered to subjects with an increased risk of LOAD due to the presence of one or more genetic variations in a UCD gene (see Table 8) or another HA gene (see Table 9).

[0503] While preferred embodiments of the present invention have been shown and described herein, it will be obvious to those skilled in the art that such embodiments are provided by way of example only. Numerous variations, changes, and substitutions will now occur to those skilled in the art without departing from the invention. It should be understood that various alternatives to the embodiments of the invention described herein may be employed in practicing the invention. It is intended that the following claims define the scope of the invention and that methods and structures within the scope of these claims and their equivalents be covered thereby.

What is claimed is:

1.-96. (canceled)

97. A method of treating or preventing Alzheimer's disease (AD) in a subject in need thereof, comprising:
administering a therapeutically effective amount of a urea cycle agent to the subject,
wherein the subject has been identified as having one or more genetic variations that disrupt or modulate:
(i) a CPS1 gene or an ASL gene;
(ii) a CPT2 gene, a GLUL gene, a PCCB gene, an AMT gene, an ETFA gene, or a SLC25A42 gene;
(iii) a SLC25A13 gene, an ASS1 gene, a NAGS gene, or an OTC gene; or
(iv) a MMACHC gene, a MMADHC gene, a HADHA gene, a MCCC1 gene, a SLC25A20 gene, a MMAA gene, an ETFDH gene, a MMUT gene, a LMBRD1 gene, a FBXL4 gene, an ALDH18A1 gene, an OAT gene, a PC gene, a DLAT gene, a MMAB gene, a PCCA gene, a SLC7A7 gene, a TUFM gene, a MLYCD gene, an ATPAF2 gene, an ACADVL gene, an ETFB gene, or a HLCS gene.

98. The method of 97, wherein the subject has been tested for the presence of the one or more genetic variations with a genetic assay, wherein the genetic assay comprises microarray analysis, PCR, whole exome sequencing, whole genome sequencing, nucleic acid hybridization, an in silico analysis, or any combination thereof.

99. The method of 97, wherein the one or more genetic variations is within an exonic region of the gene, is within an intronic region of the gene, or is within an intergenic region that overlaps with a regulatory element of the gene.

100. The method of 97, wherein the administering is based on the identification of the subject as having the one or more genetic variations.

101. The method of claim 97, wherein the one or more genetic variations comprise a single nucleotide polymorphism (SNP), an insertion, a deletion, a single nucleotide variation (SNV), a copy number variation (CNV), or any combination thereof.

102. The method of claim 97, wherein the one or more genetic variations comprise:
(i) a CNV that is a loss of the sequence from position 211361945 to 211368375 in chromosome 2 or a complement thereof, or a CNV that is a loss of the sequence from position 182121153 to 182121212 in chromosome I or a complement thereof;
(ii) a SNV comprising chr2:211454831 G>A, chr7:65554101 A>G, chr1:53676401 T>G, chr3:136016902 G>A, chr3:49455323 C>T, chr15:76603710 G>A, or chr19:19218779 C>T; or
(iii) any combination thereof,
wherein chromosome positions of the one or more genetic variations are defined with respect to UCSC hg19.

103. The method of claim 97, wherein the one or more genetic variations comprise:
(i) a CNV that is a loss of the sequence from position 211361945 to 211368375 in chromosome 2 or a complement thereof,
(ii) a SNV comprising chr2:211454831 G>A or chr7:65554101 A>G, or
(iii) any combination thereof,
wherein chromosome positions of the one or more genetic variations are defined with respect to UCSC hg19.

104. The method of claim 97, wherein the one or more genetic variations comprise:
(i) a SNV comprising chr2:211361375 CTACA>C, chr2:211362642 A>ATC, chr2:211363902 G>T, chr2:211365470 C>T, chr2:211365748 A>G, chr2:211367103 AT>A, chr2:211367235 T>TTA, chr2:211367441 C>A, ch2:211369053 C>A, chr2:2 11507223 T>A, chr2:2 11527868 C>T, chr7:95761141 G>A, chr7:95813678 C>A, chr7:95818665 G>A, chr17:42084765 C>G, chr17:42084786 A>T, chr17:42084825 C>A, chr17:42085014 C>G, or chr17:42085026 G>A;
(ii) a CNV that is a gain of the sequence from position 133339468 to 133339512 in chromosome 9 or a complement thereof, a CNV that is a loss of the sequence from position 38210509 to 38210568 in chromosome X or a complement thereof, or that is a loss of the sequence from position 38224722 to 38224781in chromosome X or a complement thereof; or
(iii) any combination thereof,
wherein chromosome positions of the one or more genetic variations are defined with respect to UCSC hg19.

105. The method of claim 97, wherein the one or more genetic variations comprise:
(i) a SNV comprising chr1:45974696 A>G, chr1:53675699 A>G, chr1:53676305 C>T, chr1:53676688 T>C, chr2:150438722 C>A, chr226437421 G>A, chr2:26455041 C>G, chr3:136046050 G>A, chr3:136048854 A>G, chr3:182740282 G>T, chr3:182788881 C>T, chr3:48929487 G>A, chr4:146576485 C>T, chr4:159611545 G>A, chr4:159616692 T>C, chr6:49403267 C>T, chr6:99374800 C>G, chr10:97376235 A>T, chr10:126091623 A>T, chr1 1:66617482 G>A, chr11:66618208 T>C, chr11:1 1 1 896242 G>A, chr1 1:1 1 1 899575 C>A, chr1 1:111921965 A>G, chr11:111930627 A>C, chr12:109998857 C>T, chr12:110011282 C>G, chr13:100861707 G>C, chr14:23243579 C>T, chr15:76578804 A>C, chr16:28855653 G>A, chr16:83940677 C>T, chr16:83948709 T>A, chr16:83948889 A>G, chr17:17924457 G>A, chr17:7125598 G>C, chr17:7126099 A>C, chr17:7127359 C>T, chr19:51857610 A>G, or chr21:38132112 C>T;
(ii) a CNV that is a loss of the sequence from position 70451721 to 70451780 in chromosome 6 or a complement thereof, a CNV that is a loss of the sequence from position 110008934 to 110008993 in chromosome 12 or a complement thereof, or a CNV that is a loss of the sequence from position 101158725 to 101159785 in chromosome 13 or a complement thereof, or
(iii) any combination thereof,
wherein chromosome positions of the one or more genetic variations are defined with respect to UCSC hg19.

106. The method of claim 97, wherein the urea cycle agent is selected from the group consisting of carglumic acid, glycerol phenylbutyrate, sodium phenylacetate and sodium benzoate, sodium phenylbutyrate, taste-masked sodium phenylbutyrate, sodium benzoate, ACER-001, AEB1102 (pegzilarginase), ARCT-810, BB-OTC, DTX301, KB-195, P-OTC-101, PRX-OTC, SEL-313, SG328 and P-OTC-101.

107. The method of claim 97, wherein the AD is Late-Onset Alzheimer's Disease (LOAD).

108. The method of claim 97, wherein the subject has mild cognitive impairment (MCI).

109. The method of claim 97, wherein the one or more genetic variations comprise two or more genetic variations.

110. The method of claim 109, wherein a second genetic variation of the one or more genetic variations disrupts or modulates a corresponding gene according to Tables 1, 10, or 11.

111. The method of claim 97, wherein a subject has been identified as not having a genetic variation comprising a sequence as set forth in SEQ ID NOs: 184 or 185.

112. A method of identifying a subject as a subject in need of a therapy comprising one or more urea cycle agents comprising:
(a) performing an assay on a polynucleic acid sample from the subject;
(b) determining that the subject has one or more genetic variations based on the assay of (a), wherein the one or more genetic variations disrupt or modulate:
(i) a CPS1 gene or an ASL gene;
(ii) a CPT2 gene, a GLUL gene, a PCCB gene, an AMT gene, an ETFA gene, or a SLC25A42 gene;
(iii) a SLC25A13 gene, an ASS gene, a NAGS gene, or an OTC gene; or
(iv) a MMACHC gene, a MMADHC gene, a HADHA gene, a MCCC1 gene, a SLC25A20 gene, a MMAA gene, an ETFDH gene, a MMUT gene, a LMBRD1 gene, a FBXL4 gene, an ALDH18A1 gene, an OAT gene, a PC gene, a DLAT gene, a MMAB gene, a PCCA gene, a SLC7A7 gene, a TUFM gene, a MLYCD gene, an ATPAF2 gene, an ACADVL gene, an ETFB gene, or a HLCS gene; and
(c) identifying the subject as a subject in need of the therapy comprising one or more urea cycle agents based on the determination of (b).

113. The method of claim 112, further comprising identifying the subject as having Alzheimer's disease (AD) based on the determination of (b), or identifying the subject as having an increased risk of developing AD compared to a subject without the one or more genetic variations based on the determination of (b).

114. A method of predicting a subject with Alzheimer's disease (AD) or suspected of having AD as being a subject likely to have a beneficial response of to a therapy comprising a urea cycle agent, the method comprising:
(a) performing an assay on a polynucleic acid sample from the subject and identifying one or more genetic variations as being present in the polynucleic acid sample from the subject based on the assay, wherein the one or more genetic variations disrupt or modulate a gene according to Tables 1, 8, 9, 10, 11 and 15; and
(b) identifying the subject as a subject that is likely to have a beneficial response to the therapy comprising the urea cycle agent based on the identification of the one or more genetic variations as being present in the polynucleic acid sample from the subject.

115. The method of claim 114, wherein the one or more genetic variations comprise one or more genetic variations selected from the group consisting of the genetic variations listed in Tables 1, 10, 11 and 15.

116. The method of claim 114, wherein the urea cycle agent is selected from the group consisting of carglumic acid, glycerol phenylbutyrate, sodium phenylacetate and sodium benzoate, sodium phenylbutyrate, taste-masked sodium phenylbutyrate, sodium benzoate, ACER-001, AEB1102 (pegzilarginase), ARCT-810, BB-OTC, DTX301, KB-195, P-OTC-101, PRX-OTC, SEL-313, SG328 and P-OTC-101.

The application's sequence listing, which the Patent Office published only in electronic form, follows.

SEQUENCE LISTING (185 sequences)

SEQ ID NO: 1 - DNA, 59 bp, Homo sapiens
  source 1..59: mol_type = genomic DNA
caacctgacagtcttatgttatctataattcaattcctcttgaatccgaatgttctgct

SEQ ID NO: 2 - DNA, 59 bp, Homo sapiens
  source 1..59: mol_type = genomic DNA
aaaaaaaaagcatgttgttctaaccttttcaaacttccaaagtcagcaaatgagagcca

SEQ ID NO: 3 - DNA, 6430 bp, Homo sapiens
  source 1..6430: mol_type = genomic DNA
aggcatgtcataaagaagaatttatccttatatctcctatacccagtgaagtttgtgcatatagaacatgttaataagctgaatatgatatgtaaaatgtaataaaatgttaaaaatattcatatcctatttacctcgggaggtttatactttatttttatttaatttttttataatttcaaattttatgttagatttgggggtaatgagcaggtttgttacataggtatattgtgtgatgccgaggtttgggatacaaatgatcccatctcccagatactaagcatagtacccaacagtttttcaacccttgtccccatacctctctccccactccaacagtcttcagtttctattgttgccatttttgtgtccatgagtactcagtgtttaggtcccacttataggcaagaacatgcagtatttggtgttttgttcctgcattaattcgcttaggataatagccccagctgcatccacgttgctggaaagaacataatttcattcttttttgtggctgtttagtatcccatggtgtatatgtagcacattttctgtatccaatctaccattaaaggcacctaggttgattccacgtctttgctattctgaagagtgctgcaataaatatgtgcatgcatgtgtctttttggtagaacaatatatacatacatatatatatatatatatatatatatctccagtaatgcagtcatggggttgctgggctgaatggtagttctgctttgagttctttgagaaatctctaaactgctttccacagtggctgagctaattaacattcccatcaacagtgtataagcattcccttttcttcacagcctcgccagcatcggttgttttttgactttttaataacggccattcttactggtatgagattgtatcttattttggttttgacttgtgtttctctgatgattagttatgtggagcattttttcatgtttgctgacgtatgaagatgacatatgttgtatgtcttcttgttagaagtgtctgtccatgtcttttgcccattttttaatggggtttgagcatagaatatttttccactggtttgtgtcatctattatttctttgagcagtgttttgtagtagttctccttgtagaaatctttcacctccttggttaaatatatttctaggtattttattttatttttttctgtggctattgtaaatgggattgcattcttgatttggttctcagcttgagtgttattggtgtatggaaatgctagtgagttttgacactgattttgtattgtgaatctttacaaagttatttatcagttccaggagccttttggtgggtctttagggttttctaggcgtagaatcatatcagtgaagagagacagtttgacatcttctttacttatttggatgccttttatttccctctcttgccttcaaaccagagatctatctaggcatggagctgggaaacctttctggccccaagttctctgcatggggatggaaggcagcctaaattcttattccagtagagtgggtgctctagatgcttggagatctgcctgggtgtggagtgtagagggccttgctggaccacaatctctgcacagatagggcgggagagctcaggctggcaagccaggataacaggtactcttactgcttggagatatgcctgtgcatggagtaaagagggctgtgcttcaccatggtgtctgaacaggatgggtgggctggctcaggctgttgattcaggtgagtggatgctccaaatgcctggatatctgccagagggtggagcagagagggcctgggcttcaccacagtctccacacaggaatggttgggtggcttggtatgctgatctgggtgaatggtagctgcaactgctaggagatctgcctgggcatgaagcagagagggccctgctgtaccatgatctctgcacaggcagggtggggtatcttaggttgctagtcaatgtcaccaggtgtttcaaatacctggatttctgcctgggagtggagtggagagggacccactgcaccgtgatcccagagaaggaggttgggccacccagaaatgatacacataaacctgttctatgtctccaagctggtcctggctgcaagtctcctcatccaggagaaactggatgagcagctttcctccagctccaggcctgtgacaggggagagcacaattccagtgcctactgatgaggcactttctgtaattctggctgtagagacctctacaccactccagagcaagcgctccaatctctggcccaagacaaaaatgcctgtgcagccacggtgccagattgccaaagaatggctgactttgtatgcactcgggttaaaaacggcatcctgctttcagtcctgggtctgagaaaatgcctgcagcttttccctgtgtcttttcctctcagcacttccaagcctctctccaagttagctccaggacttgggagaaaaaagtgctctccctcagcctaggttgctgggatccccagtggaaaggtgagtagtagagggaggctctcctcccctctcacgtactggggcttcacacattgtcagccagatgccatcatgagggctgtttgcccacgttcttctccttgggagctggagtatctttcacaatatcaggggattcgtgttgtattagtttgttctcacactgtatgaagaaattcccaagactggataatttataaggaaaaaaggtttaattgactcacagttatccacggtttttaggggaggcctcaggaagcttacaattatggtggaaggcacatcttcacagggtggcaggagagagaatgagtgccaagcaaagggggaagccccttataaaaccatcagatctcatgagaactcatccactatcatgaaaacagcatgggggaaccgcccccatgattcaattatctccacctgatcccgcccttgacacctggggattatcatttcaagattacaattcaagatgagatttgggtggggacacagccatgtgatatcatcccaccactggctcctcccaaatctcatgtcctcaaatttcaaaacacaatcatgccctcccaacagtcccccaaagtcttaattcattccagcattaacccaaaagtcaaagtccaaagtttcatctgagataaggcaagtctcttctgcctatagggctataaaatccaaagcaagttagttccttcctagatacagtggaggtacaggccttgggtaaatacacctattccaaatgggagaaattggccaaaacaaagggtctacagtccccatgcaagtccgacattcaatagggcagtcattaaaacttaaagctccaaaatgatctcctttgactcttatgtctcatatccaggtcacactgatgcaagaggaaggctcccacatccttggcagctctgcccctgtggctttgcagggtgcaggctcctcccagctgttttcacgactggcactgagtgtttgcagttttccaggcgtactgtgaaagctggtgatggatctaccattctggggtctggaggatggtggccctcttctcacagctccactaggcagtgccccagtggggactttgtgtgggggctccaaccccatctttcccttccacactgccctagcagagggttctccatgagggctctaaccctacagcaaatttctgcttggacatctaggtgtttccatatatcctctgaaatctaggtggaggtccccaaacttcaattcttgacttctctgcacccacaggctcaacaccatgtggaaactgccaggcttggggcttgtgccctctgaagccatggccagagctgtaccttgggcatttttagccatggctagagtggctgggaaacagagcaccaagtctctaggctgcacacatcggggggccctggacctggtcccaggaaaccatattttcctcccaggcctctgggcctataatgggaggggctgccatgaaggtcactgacataccctggggacattttcccattgtcttggtgattaacattctgctccttgttacttagcaaattgctgtgataggcttgaatttctcctcaggaaatgggtttttcttttctattgcatcatcaggctgcaaattttccaaacttttatgctctgcttcccttttaaacataagttgcaatcccaaaccatatctttgtgaatacgtaaaactgaatgcttttaacagcacccaagtcacttcttgaatgctttgctgcttagaaatttcttccaccagataccctaaatcatctctctcaagttcaaagttctacagatctctagggcaggggcaaaataccaccagtccctttgctaaagcatagcaatactcacctttattctaattcccaacaagttcctcatctctatctgagaccatctcagcctggacttcattgtccatatctctgtcagcattttagtcaaaaccattagacaagtctctaggaagttccaaactttctcacatcttcctgtcttcttctgagccctccaaactgttccaacctctgcctgttacccacttctaaagtcatctccacattttcagctatctttacagcagcctcccattacccagtaccaagttactgtattagtctgttttcaggctgtgatgaaaaaattcctgaaactgtgtaatttataagggaaaaaggtttaattgactcacagttccacatggctggagagccctcaagaaacttgcaattatggcaggaggcacctcctcacagggtggcaggagagaaaatgagtgccgagaagtggggaaagccctttatatagccatcagatcttgtgagaacccactcaccatcatgagaacagcatgggggaaactgcccccatgattcaattatttccacctggtcccacccttgacacgtggagattatcacaactcaaggtgagatttgagtggggacacaaagccaaaccatattaccaattttccttctcgaattaatgctcacagagttgatctttgtgcaatatcttgctatttccaagtggtcgaggcacactgaaagcttctaatccaccatcttgggaaaaaataatctctctctctctatatatatatatttttttatatatatgtatattttatatatatataatatatatataaaagagagatatagagatatctatgagatacatatagatatatatatttatatataaaagagatataaatatagagatatattttttatatatatatacacacatatatacatataatgttaaaaagcatcttttcaaataaatgctgcttgcatatgttaatttagtttgaacaattttggagtggatttcaggacaggagagagaaaaaagcaaagagcaaaacaactccactctaaagggaagtcatagttcctgggtctgagtggtgcttcttgcctccatcctgccctgacccttcatagtctcgtgactttcacattgctctaataagatatcaaaatttgagtgaggggttcagttcctatctctgttctcccagtaatgcaacaaaaagggtaacttgtccctcctctttacattttaaaataaggaagggttgaattagctcagtgtttctcaaggcttgattcaccttaattgactgaagagctttttaaaaatcccaatttctttggcccttgtcatagacattctgattccttttatttggcagaagacccaggcactgacctaatttttaaaagttctgtatatggttctcttgtgcaggcagaattgagatcattggctttgctaaggtatctccagcactgacatcctgtgactaggtggataatttaactcttcctaactctacagaaaaagtgagaagctctagagattccactggtaacctcttcaaggttatgtcacatgctgccactagatggcgcaggcaattcttgggacggaggagattctggttatttgggattttcattttccctgtgcaatatacttgagacactcagcttaagaagcttcgtgggggaatgacattttagctcctttcccaaagctcgaggcccagaaggtagagctgttttgcttgacaagttgatagagagagactcattaaataaacgttctatcgtctgaagggagaaagtaaaacccccggcataaatattagttcacatttttcttattatttccagcaggtgtgtgttctccccttctctgtgtctttctctctcttactctttgttggtggcctctttttacctttatcttttcccttttcttggtttctgtctgtaaccactgtttgtaaactggttatgatgaatttacaggtggattaaatcttagtttgccacctttgtcgtagataaaaattttag

SEQ ID NO: 4 - DNA, 59 bp, Homo sapiens
  source 1..59: mol_type = genomic DNA
tacaaggcctgaatatgtttgtttgcttctctacgtagaaatcttttcccatgctttct

SEQ ID NO: 5 - DNA, 59 bp, Homo sapiens
  source 1..59: mol_type = genomic DNA
ctttgagtatttctgttaaatgtcatcttactctagtcaacaaaattatgagccatgcc

SEQ ID NO: 6 - DNA, 6382 bp, Homo sapiens
  source 1..6382: mol_type = genomic DNA
ccctctaattacctcaatttttatcaaatgtatactttcaaaatgtatactttggtgaaatataaaaggaaaaatatataattgggtttaaaatgtatattgtaaagttgaaaagttacctactgggtacaacattcacaatttgggtgatggctacactaaaagcctagacttcaccacaatgcaatatatgcatgtcagaaaactgcacttgcaccctctaaatatattttttaaaattaaaagcatctcgtttatatttttaatattaaattatatatcctcaaaacattgaaaaatacaaagaataaagcctatgggaactaaagtacctgatagttcctttaacatttccttataggattttcctatccttattatcattttaacctatttaatttggttattctagtacttccatattctttaaacattattgataaaaagtaacagaataatttaagactctgattaatatatagtattatatgattatttaccaattctcattactcattgtattagtccgttctcacattgctataaagaactacctgagactgggtaatttataaagaaaagaggtttaattggctcacgattccaccaactgtacaggaagcatggttagggacacctcaggaaacttataattgtcgcagaaggcaagggggaagccagcacgttatatgttgctggagcaggaagaagagagtgaagtgggaggtgctacagatttttaaacacccagatctcgtgagaactctatcccaagacagtactacgaggatggtgctaaaccattagacactaccccgatgatccaatcacttcccaccaggccacaccgccgacactcgggatcacaattcaacatgagatttgggtagagacagacagccaaaccacatcattcatattattttcataatccaaaagaatgttgctttttacaacaaaatgccatggcaatattttgctaagcccagcttatatgcaggtatgtttccctgtcccctcaaccacctccaatctaggcctatttgtcctcaatgcttgttattctgtgttggatggattaggttccctgaatgcactaactgcagtactcgatactgtttcccaaggaaccttttgctctagtcagtattaacaacatggcccttatttacagtctactgtcaaacacaaggccttctgaattatcctaaactggtctgctggtctcaatttctacaaatccatcttctacactgtttctaaagtgatctcactctaatacccaagtcaatatatgtcattcctctaattaacatcctttaagattctacaggactaataaatgtatttttcaaagcattctggtatgagttcctaggaatctggaaaggtgccactagggccactacagaagataaggcagctagccatgcaggaatctgctgctactttaaccagagcaattctacttgttcccaacctctatatgtatatgaacatataaaattgttttaaaaagttgttttgctattttttttttatgaaaggtacaattattggttggtattgggaaaagactctaattaatgtaattctacatataaagcacttcatgacctgatccctaccaacttgttaactttatctcatgcttctgaattgttcatagttcttaaaacactacaattttatgctactttaggctttgtccaacatacacattttattccatgtagtgccctcatctagaatgcccaccttctcatcttatttcattaacaactgttaatgcccttcaggtctcggtttaattacaatacgtctgagaaaccttccctgacttgtaaatgtcccttgcttataactcaattataacgcataggtatattaacattattcatctgcacatttgttttatcactagatctgccaaacttggctgaacagatttctaggccagactaataacaactacagtagactatctggtatgtaatgactaagtcccaattctttttcctcctacctttgtttcaagaacaaacatttattattaaattaataaaataatttctccaagaagataataattgaccaataagcttttaggaagagacagctcttaattcacacaaagttatttccttaaatggaattgatatacttattagaagagctgaactgaatttctaaatagcttaatttaaaatattttataaaataaaaaagtttctggtaacaacttgcggtaacataagaccagaacaaaacactatttttaaatttttaattgtccgaagacaacgtagaagaaaggtgccatcgtttggttaccaagcttttagcttgtttttggactgcattttcaataattatcaggaaatttaactacaatatttagattatgataagcttgacatagaccttatataaaacattataacttttaaggtctttaaacaacaatcttttgaacttcacgaacttcacttcagactttttttttaatgtacaaaaaggctatccttttcagaaacacaaaacttttattacttactactgccctctagtgaatttccagaaaaaaaaatcagaaaactaaagagattgtatagtttaaaatgcttctattaataggttggccctaattgtctccaaatttattttgacttccaagaataaatcaccaactgtatttgaaaactaaaatgttttaaaataatatatacaaactacattcctaataacttcttttaccgctcagtttagaagggcacgttttctttacatatctctctcctttatctggaatgctggtttccaactctgcaggccttagattattgtaaagggtcaacactaaatactacctgtagacttaataaatgtcttccacatatttgtgaaatctattattcaaagatgtacatgttattatgattaatgaaacaacacaggtactcaagactttccttttaagtattcactgagtctaagacgtatatattttcttacatttaatatcagtgaaatttggatgcatctaaaaattgaaggcatcatataattgaaggctaggcagaagccatgacatagttgtcgctacatgcacattcacaaatttggtcacagcaagttacattacagtcacttcagttgaattacatgcattcttggtacaattattgagtttaattgccacttatgtcttaaaagataatatgatttgacattaaagcaaaaagttaatgtgtaagtcaggagaaagagaatgaagatgcatcggtagtaaagaaaatattcattagaataatgggcataattctgtattttcttaaaaagcaacagtcaagtgcttcataagcttaagaaaggaagatatccaaaagagaagcatttttctgcttaggtatatgcaaaaggattcccttctatatggcaagacaagaaacaacagcaaaacatcttaaatttacaggataggtgtgttggcagcttcgaagaaaatcccagagataagaatagaacacacaagaaaagctgcacatcaattctcttgatagcataaaagacaatacacttttttagcttctgtgtatgagcgaaaacatgtgaaacttgtctttctgagtccagcttatttcacctaacacagtgactacaactaatgactaaaagagtagaggccgttaagggtagggagtagggaggggagatgaagagaggcttgattaatgggtacaaaagtacagttaaatagacaaaatacaacctagtgttcaatagatcagtagggtgactacagtcaacaataatctattgtatatttccaaatagctagaagagaataattcagatattcctggcataaagataaatgtttaaggtgatggatattccaattaccctgatttgatcattacacattatatgaacacctcagactatcacatgtacctggaaaatgtgtatacctattatgtatcaataaaaataaaagacaatacagttggttcccatgtcacaatggttcaacttaggattttcatactttgtgatggtatgagaccattcttttttactttcagtacagtagtcaataaattacataagaaaatatttgatattttattgtaaaataggcttggtgttagataattttgtgcaactgtaagctaatgtaagtgttctgagcaagtttaagataagctaaactaagctattatgttcagataggctaaactaagctatgatattcagtagtttaggtgtattaaatgcattttcaaactgaaaatattttcaacttacgatggatttaacagaatgtaactccactgtaagtcaaaaaccatctgtgtcgtatagtaaaacatgaacatcaataaccaattcaaaaagtgatatagaattctcacactccaaatataaagttttaggaacgcctttcatttcatattttccttgttatgaatgcagacaaatccaacaaatctcactcactaaatataaaacaaagattataaatgattaagaaaaacttgtcagatttttccttatagtgacacataaagtaacggtgcaccttacaatcggtagcatatattcagtgaaatatgctatcacataggctgagaaatttgacttttaaagggaatttctttctctaaatattattgagaaccactgctgtgattcataaggtgttgtaacatgaactgaatgtttgttttcccctaaaattcgtatgttgaaatctaatccccagtgtgatatttgtaggtggagttttcaagagataactgagtcatgagggtgaatcccttataaataagattaatgcccttataagaagggtcacaatagagcttgcttcctctctctccctgctctttatcatatgagcatagaatgagaagacagccaactgcaaatcaaggaagagggccctcaccagacaccagacaccttgatgttgtacttcccagtctctagaaccatgagaaataaatgtttgttgtttgagccacccagtctatggtacatctgttatactgacctgaactaagacatggaggcaaaccaacatttgatgggtacaagaagaaaatattaaatgttttatttctatatttgaatctttatcactttaatgttctttaacctattagtttatattttacattaaatgtacaaagattagcataataatatgtaaatatgtatttataatcataaatatcctggtggacatatttaaagttttatggatagaggtatatagtaaacaatttagcagtcactgcttctataggcagttcactggtccatacgatacattttgctgaagacatcattattcaacatttccccacttggtggcaccaaaaaattagaatatctacatatatatccgtgcctgttaagttttacttttttaaatttagtaagtatcaattccctttcaatgtaagcttaaaataataggcaaactaatatgctgtttgacctccttctcctaaagctcactgtccaattatttggcattgattaatacagggtacagtagtcagaatcagtaaaatttaaataatcaactagtttcaaaaataaacaataatacataactaagaaattcacacttgactgacacataagataaaaaaatttctctagcctcaatacaaaaaaaaaattcagttacaaattccataacaaacatgatttttacatttcatattatatttagggtcaaagtactcaagtattaatttcccactctgggtactttaattaagattaaacctattctagtcctcatgcatattttctataccctctttcaaggtgccacaaggaaagtccagttctcaaccttttccaaggtaagttaggagaaaactttgtatcccaactacaagcaaatatgataattatactatttaactacctatctacaataaaaccacatatctataaattgttggttttcactgaatttttactaaaatttcggtaagtattattggctcatttttacagatggggaagcttgggatcaggtaatagattttaaacaaactcaacattcatgaccagagctcagctatacacaccatgatgcccctcttgaacagggtatcatctaccttcctcttcccctccctctatacaccacaggtattaaaactggccaaatcatggcttggcagcaaaacctgagctttgagtacttgtagtgctattcgaatgatattatctctctatccacactcccccaaccccaactaaccaccattcaattatgaatgcctttttgacttacctttgaataagaaacattctcactgatcatgatacaactgctttttgcatttggttt

SEQ ID NO: 7 - DNA, 59 bp, Homo sapiens
  source 1..59: mol_type = genomic DNA
cactctgtagaatttttgttattgggaacattcaatggaacaaaggcactacaaaagag

SEQ ID NO: 8 - DNA, 47 bp, Homo sapiens
  source 1..47: mol_type = genomic DNA
tgaaaccttcattcattgcctatgggcactgaggtcatcaagttcag

SEQ ID NO: 9 - DNA, 59 bp, Homo sapiens
  source 1..59: mol_type = genomic DNA
tttggaaactcaaaatgttcatacagactgccaacagattaattagtagcctctttgga

SEQ ID NO: 10 - DNA, 2149 bp, Homo sapiens
  source 1..2149: mol_type = genomic DNA
acaaacaaattcattttgacctgaacatgcatttagtttttggctactaatcaacccaataatccattttaccttgaacctgaccaccaatttgcctttacataaacaatctgtggttaactatgaaaagatgcattttcatggtatctgacacaatttaccaagttccttatggtagatttcaggctttaaattgtaagtttcaggcttcaaaagaggcaggattattaaatctttccatacaccagaaaatctgacaagtgatgtcattttgaaatcatgcttttgcctttgagaaaacaacttagaattgttgtaggaccaatgagaaaacaacttagaatcgttgtaggaccatccttttctcaaaacccagagagtgtatgtgccaaggactagaacaagaattggatctctccttttcccagtcaactcctcactcaccatattaaaactggagttcttgaggtatgttaagatagatcagcttctattcaggcattccttccacatactcaaaataccctcagatattttattaacaaaaaatttttcataaaaaaatagtcatttaatcattctagagactcatcacaaaatacaagtcacaatattaacatatgaaaattaaaattacaattaacatctcaccaggatcaaagaaccctaacttcaactttcaggatagagagctaagtttcaagtacatgtctagattctatgtgcctctaatgataatgatgtacataaacctgtcttaaatcggcaaacagacgaggcatggtggcttgcacctgtaatcccagcattttgggaggctgaggcaggaggaatgcttgagcccaggaattcaagatcagcctgggcaacatggtgagacctcgtgtctttaaaaaaaaaaaaaaaaaaaaaaaaaaaaaaaaaaattctatccatccaggcatggtggcacacacctgtagactcagctacccgggaggcaggaggattgcttgagccaaggtggtcaaggctgcaatgactgttccactgcacactccagcctgggcaacagaggaagaccgtctcaaaaaacaaaaaacaacccacacacaatttatgttgagaaagcaagtctcccacaaattatttttaaaaaatgattccaggctgggtgtggtgggtcatgcctgtaatcgcagcactttgggaggctgaggtgggcagatcacttgaagtcaggagttcaacaccagcctggccaacacggtgaaaccttgtctctactaaaaattagtcaggtgtggcagcacatgcctgtaatcccagctactcaagaggctgaggcaggagaatcgcttagacccaggaggtggagattgaaatgagccaagatcgtgcactgcactaaagcccgggtgacagagcaagactccgtctcaaaaataaataaataaataaataataaaaataatcattccacatctcaaaatgacttagaaatttaaatggaaaaaataaataatttgcttggacaataatttggctttgggagagtcctcatccgaaaataacaaaatttccttaatattagtactaaagaactaattacagctaacagctcatttaccaagtagtcaattattcaacaaatttagccatctactgacaaactgaaattagtatcagaaactccatgtattttatttgtaggagagcattttaaatttttcaaaaattcatggcataattttaataatcgtccttctgtagaatccctaacctcagaaaaaaaaaagagagaataaattagaagtgagaaaaggaaactgcggaagactgacacattggacatcagtgggaagaggcagaaaaataggaagaaaaataaaggacagatttaaaacaatttaaaaaggactacaaagaggattggggccagttggtgcagattaaaagacaccttcttcacagacctcaatcatgcacaggcagtaacggcattactataacacagaacagtatagtagctgattctgataatgaatcctcagaaaagaagaatatggttaagcttcagttctttttgaaaagcaatttacatacacaattacaaataattgtaaattttaagcattcagctaagatatgtacaaaaaaattaatgaaa

SEQ ID NO: 11 - DNA, 44 bp, Homo sapiens
  source 1..44: mol_type = genomic DNA
tcctgacagccctctgttctgcattgcaggggaacgatcaggtc

SEQ ID NO: 12 - DNA, 59 bp, Homo sapiens
  source 1..59: mol_type = genomic DNA
catgcttatccagacagattcaggcttttgtcatttaatatctcttgggtgtttttcat

SEQ ID NO: 13 - DNA, 1060 bp, Homo sapiens
  source 1..1060: mol_type = genomic DNA
ctttcgtttactctgcctttctgtattttagtttctgaatttctgtcccataaagccagcatttaggcattttgaattttgagtttcttcagtgaattcataatagtaaaaatatttaagaaaacctgtaaaggcaagattgttgttgaagcccctcacattagaacacttcccaggtgctccaacctgggggggactgaggacttacatgggaagtcagagctccccatcttttttccccaaaggtcattcattctgacagcatgacttcaacttgatatgagcaaagagcatttcagataggaggagaaaaaggaagagggttgggcaccgtcgtgaaatggtacacttcctcaccgcggtgcttatctacataattgtgtttttataacatttcctttacttttctgtaagctgatgctgccctaattatagatttttaagagaacacttcattgtaccccaaattatacagtgctttaaaaaggtactttcttaccggtttaccaaataccttataaattcgtaattacataaaacaattcgagatacagaatagaaacagcctgtactgttaacaggtgttggtattgttatataattgagtacatggctttcaaagatctataatatttttcttgagtaaaaagaaaaaaatgactcattatagtcgtaatgtgtcacagagactcctgatcaaacagaatgcacatgttctattttgtgcattctgtacagttcattgtaaatggacttgcctttgtggaagtgaaagtgccacttattccagcaaattgcctttgtggcatatgcacctacttgttagacagcttgggggcacttgggccaggcagaggctgggccccctttatcatgggcacacctgcacacatggcactatggcgccacactccaggtaggctgctgtcattaacagacttgctccttgggaaacccactgaggacttctcagtgccctcctgcccatcagagaccacctcggaattcttagaagactaggaatggggcagcttcctagacgctagctcttttcccgcca

SEQ ID NO: 14 - DNA, 1508 bp, Homo sapiens
  source 1..1508: mol_type = genomic DNA
acagacccctagttgattttatcattggacaaaattatacaaagcctatcttagcagcaatcagttttcggtgacaccattatttcttcatgcccccaacaaactgcagtagatatgttggaatttaagctcagcacatatagtcatccaaattgtctcgaaaggttacaaaagatgggaagaaaattatatgttgttctatgaaaactatgaaaggagagagttagaaagaaagataatcaacagtgtcaaataccactgagaaatctaagacaatgagggatgagaaaaatccgccacgcctcaggatgaggaacccagggttgccttcagcaatcagtttgagtggcagagatgagggctgagggagcagcagacgtcaagagggcagaacaaggagtgactctgcattgagaaaatggaattctgtcctcaaaacatgtaacaacaaaaggatgaggaaattaggataaaaattgcagcaaggtcaaatgaaggctttggggtttggggtttttgtttgtttttttcagcaaggaggaaaaaggattatgtctgcaggcagaggagagaagaagaaattaaaggtgcttaagctagacaaaaagaagataattaagacagaaaatctttgattgcagatgttatagcacccaccagggagaaaagggagagaacagagaggactgaaaacataaggttagtttaaacttagaaagaggaagttcagttcctcgcctaagatggggaagagaaagaaattgccacagagttgttttggaattaaaaggcttatctcgcatggtctttattttgccagcaaagtaacagatagcccctgtcaaaggagaaggggcacggaggggcaccaagaggagggtgcaggagagaaaaggcttagaacaatggtgggcaggaaactgcaaagaaatggacacctgacaccaggtgtcagtacctactcggtagatgtttgaataaattgataagacattttaaaaggccagactcggtggctcatgcctgtaatcttagcactttgggaggctgaggagggatgataactttgggccaggagttcaagaccagtctaggcaacatagtgagaccccgtctttacaaaaaagtaaaataaaataaaagttttttaaaagacattttaaaaaatagctggttagtaatggggagagtcccactgataagatgataaaattttcttataacttttatatctttctgcagtaccactatagtgttgatagtagacttgcagaatcaaaagaaggaaggataaattactgtcttcactgtgacctggtggctttccctagtggtgctagaggaaaagtaagagctccagggaacctaggcttttgctttgtaaggatagcctcaatattggtacacacttcgaaacatgggctgggtaagaatttaagtgtagccagaaaaaatatcttggtatgagcttcatttatcaacactttatcataaattcatcattgtat

SEQ ID NO: 15 - DNA, 1486 bp, Homo sapiens
  source 1..1486: mol_type = genomic DNA
cacctttcctatggaagttatacaaacttttagttttcaaagccaataattttcagcctattatttaaagttatacaagtaatcactggaataactctaaataaactacatagtttccaaaataccataaagaagaaaacaaaaagaacacctctcacatagcaattgtaagaaaattaagaagcatgtaaagcagaaaaaagaaaggactagggttaaacatatctattagaatgtaaatgagacactcacctattaaaagaaaaggtacttattagatttttaaacatcaaaaacaaaacctgccaggtgcagtttttggattacagtggctcagacacctgtaatcccaatattttgggaggcccaggcgggcgaatcgcttgaggccaggggttcaagaccagcctgggcaacatggcacaacaccatttctactaaaaatgcaaaaaactacccaggtatggtggtgtgcacctgtagtcccagctacttgggaggctgaggtgggagaatccgttgagcccgggaggcacaggttacagtgagctgagatcatgccactgcactccaacctgggcgatagagccagatcttgtatcaaaaacaaaacaaaacaaaaaacctatataggagaaataccttaagcttagctgccctgtgctgcccctcagggaatggtccaggatgaagccaagattaatttaaattagcatttttttttttttttgagtcagagtctcgcactgtcacccgggctggagtataatggcgcagtctcagctcaccacaacctctgcctcccgggttcaagtgattctcctgcctcagcctcctgagtagctgggattacaggcacccgccaccatgcccggctaatttttgtatgtttagtacagatagggtttcaccattttggccaggctggtctcgaactcctgacttcatgatccgcccacctcggcctcccaaagtgctgggattacaggcgtgagccactgcacccggcctaaatcagcatttttaagggcgagatccaggagtcgatatattttttttaactcttgaagagattgcaatgtacagtcaagactgagaatcattaatttaaaacagagattcaaaaaggtaagaaacaaaaggatggacagagatacagcaagcaaatgcaagtgacaaaaaaatcaaggaccgtggtatttatatatcagataaattcaaggcaaaaagcattaactgggacacacgttggcttcatagtgacgaaagcaccgtccaccacgaagttgtagtggtcatgagcttattgtgtgccaaatcacagagcactgagatcttaggttgaactgcatgaaactgacatttttataggtcaaaactgatgaaatgttggcaagttcaacctgatcagtaaagcaaaatatgttcgtactcacagtatgctgtaaagtactaacagagcctgatgtaatgcaaacaatacata

SEQ ID NO: 16 - DNA, 24994 bp, Homo sapiens
  source 1..24994: mol_type = genomic DNA
tgcagtcttttcgagaaaggtgtggtttccatggcaaacaacagaactaccagcagacctcgcaggaaacatcacgcctagagaattacaggcagccgagtcaggccgggctaagctgcgaccggcagcggctgctcgccaaggactattataacccgcagccttacccgagctatgagggtggcgctggcacgccctctggcactgcagccgcggtggccgccgacaagtaccaccgaggcagcaaggccctgcccacacagcaaggcctgcaggggaggccggctttccctggctacggcgtccaggacagcagcccctacccaggccgctatgctggtgaggagagccttcaggcttggggggccccacagccaccacccccacagccgcagccactacctgcaggggtggccaagtatgatgagaacttgatgaaaaagacagcagtgccccccagcaggcagtatgcagagcagggcgcccaggtgccctttcggactcactccctgcacgtccagcagccaccgccgccccagcagcccctggcataccccaagctccaaaggcagaagctgcagaacgacattgcctcccctctgcccttcccccagggtacccactttcctcagcattcccagtccttccccacctcctccacctactcctcctctgtccagggtggtgggcagggggcccactcctataagagttgcacagcaccgactgcccagccccatgacaggccgctgactgccagctccagcctggccccggggcagcgggtccagaatcttcatgcctaccagtcgggccgcctcagctatgaccagcagcagcagcagcagcagcagcagcagcagcagcagcaagcccttcagagccggcaccatgcccaggaaaccctccattaccaaaacctcgccaagtatcagcactacgggcagcaaggccagggctactgccagccggacgcagccgtccggaccccagagcagtactaccagaccttcagccccagctccagccactcacccgcccgctccgtgggccgctcaccttcctacagttccacaccgtcgccgctgatgccaaacctggagaactttccctacagccagcagccgctcagcaccggggccttccccgcagggatcactgaccacagccacttcatgcccctgctcaatccctccccaacggatgccaccagctctgtggacacccaggctggcaactgcaagccccttcagaaggacaagctccctgagaacctgctgtcggatctcagcctgcagagcctcacggcgctgacctcacaggtggagaacatctccaacaccgtccagcagctgctgctctccaaggctgctgtgccgcagaagaaaggtgtcaagaacctcgtgtccaggaccccagagcagcataaaagccagcactgcagccccgaagggagcggctactcagccgagcccgcaggcacaccgctgtcagagccgccgagcagcacgccacagtccacgcatgcggagccgcaggaggccgactacctgagcggctccgaggacccactggagcgcagcttcctctactgcaaccaggcccgtggcagccctgccagggtcaacagcaactcgaaggccaagcccgagtccgtgtccacctgttctgtgacctctcctgacgacatgtccaccaaatctgacgactccttccagagcctacacggcagtctgccgctcgacagcttctccaagttcgtggcgggtgagcgggactgtccgcggctgctgctcagcgccctggcacaggaggacctggcctccgagatcctggggctgcaggaagccatcggtgagaaggccgacaaagcttgggctgaagcacccagcctggtcaaggacagcagcaagccacccttctcgctggagaaccacagcgcctgcctggactctgtggccaagagtgcgtggccccggcctggggagccggaggccctgcccgactccttgcagctggacaagggcggcaatgccaaggacttcagcccagggctgtttgaagacccttccgtggccttcgctacgcctgaccccaaaaagacaactggtcctctctcctttggtaccaagcccacccttggggttcctgctccagaccccactacagcagcttttgactgtttcccggacacaaccgctgccagctcagcggacagcgccaacccctttgcctggccagaggaaaacctgggggatgcttgtcccaggtggggattgcaccctggcgagcttaccaagggcctggagcagggtgggaaggcctcagatggcatcagcaaaggggacacccatgaggcttcggcctgcctgggcttccaggaggaggacccccctggggagaaggtggcctcgttgcccggggacttcaagcaggaggaggtgggtggggtgaaggaggaggcaggtgggctgctgcagtgccccgaggtggccaaggctgaccggtggctggaggacagccggcactgctgttccaccgccgacttcggggacctcccactgctgccacccaccagcaggaaggaggacctggaagctgaggaggagtactcctccctatgtgagctcctgggcagccccgagcagaggcctggcatgcaggacccgctgtcacccaaggccccactcatctgcaccaaggaggaggtggaggaggtgctggactccaaggccggctggggctctccgtgccacctctcaggggagtccgtcatcctgctgggccctacagtgggcaccgagtcaaaggtccagagctggtttgagtcctctctgtcacacatgaagccaggtgaagaggggcctgatggggagcgagctccaggggattccaccacctcggacgcctctctggcccagaagcccaacaagcctgctgtgcccgaggcgcccatcgcaaagaaagagcctgtgccacggggcaaaagcttacggagccgtcgggtgcaccgggggctgcccgaggccgaggactccccatgcagggcaccagtgctgcccaaagacctcttgctccctgaatcctgcacagggcccccccagggacagatggaaggggctggagccccaggccggggggcctcggaagggctccccaggatgtgtactcgttctctcacggccctgagtgagccccgcacgcccggacccccaggcctgaccaccacccctgcacccccagacaaactggggggcaagcagcgagccgccttcaagtcgggcaagcgggtggggaagccctcacccaaggctgcctccagccccagcaacccggccgccctgcctgtggcctccgacagcagcccgatgggctccaagaccaaggagacagactcacccagcacgcctggcaaggaccagcgctccatgatccttcggtcacgcaccaaaacccaggagatcttccactccaagcggcggaggccctctgagggccggctccccaactgccgtgccaccaagaagctcctcgacaacagccacttgcccgccacattcaaggtctccagcagcccccagaaggagggcagggtgagccagcgggcaagggtccccaaacctggtgcaggcagcaagctctctgaccggcccctccatgcgctcaaaaggaagtcggccttcatggcgccggtccccaccaagaagcggaacctggtcttgcggagccgcagcagcagcagcagcaacgccagtggcaatgggggagatgggaaggaggagaggcctgagggttcccccaccctcttcaagaggatgtcttctcccaagaaagccaagcccaccaagggcaatggcgagcctgccacaaagctcccacccccggagacccccgatgcctgcctcaagctcgcctctcgggcagccttccagggggccatgaagaccaaggtgctgccaccccggaagggccggggcctgaagctggaagccatcgtgcagaagatcacctcgcccagcctcaagaagttcgcatgtaaagcgccaggggcctctcctggtaatcctctgagcccatccctttccgacaaagaccgtgggctcaagggtgctgggggcagcccagtgggggtggaagaaggcctggtaaatgtgggcaccgggcagaagctcccaacttctggggctgatccgttatgcagaaatccaaccaacagatccttaaaaggcaaactcatgaacagtaagaaactgtcttctactgactgtttcaaaaccgaggccttcacatccccggaggccctgcagcctggggggactgccctggcgcctaagaagaggagccggaaaggccgggcaggggcccatggactctccaaaggcccgctggagaagcggccctatcttggcccggctctgctcctgactccccgagacagggccagtggcacacaaggggccagtgaggacaactctggtggaggaggcaagaagccaaagatggaggagctgggcctggcctcccagcccccggagggcaggccctgccagccccagacaagggcacagaaacagccaggccacaccaactacagcagctattccaagcggaagcgcctcactcggggccgggccaagaacaccacctcttcaccctgtaaggggcgtgccaagcgacgacgacagcagcaggtgctgcccctggatcccgcagagcctgaaatccgcctcaagtacatttcctcttgcaagcggctgaggtcagacagccggacccccgccttctcacccttcgtgcgggtggagaagcgagacgcgttcaccaccatatgcactgttgtcaactcccctggagatgcgcccaagccccacaggaagccttcctcctctgcctcctcttcctcatcctcgtcctcgttctccttggatgcagccggggcctccctggccacactccctggaggctccatcctgcagccgcggccctccttgcccctctcctccacgatgcacttggggcctgtggtttccaaggccctgagtacctcttgccttgtttgctgcctctgccaaaacccggccaacttcaaggaccttggggacctctgtgggccctactaccctgaacactgcctccccaaaaagaagccaaaactcaaggagaaggtgcggccagaaggcacctgtgaggaggcctcgctgccgcttgagagaacactcaaaggtcccgagtgtgcagctgccgccactgccgggaagccccccaggcctgacggcccagctgacccggccaagcagggcccactgcgcaccagtgcccggggcctgtcccggaggctgcagagctgctactgctgtgatggccgggaggatgggggcgaggaggcagccccagccgacaagggtcgcaaacatgagtgcagcaaggaggctccggcagagcccggcggggaggcccaggagcactgggtgcatgaggcctgtgccgtgtggaccggcggcgtctacctggtggccgggaagctctttgggctgcaggaggccatgaaggtggccgtggacatggtaagaggccagcccagccagggtggggagtgtggggttccaaaggacaggcaggcaggcagtcggggagccccttgtttctagtgctacagtgtgggccaaatgtgtctgcagtctcgggacaatctgcagagtcctgagcctctctggggtgtgtgggggaagtggaggcacccatctggctaaggcaggtcacactcacctaccctgtcccaggagacttcccgccggggcccgtatgcccagccaccgccactctcccactcacctggcatcttcaggctccagccccacccagaatccactgggcccctccccatgctgtcaccggagatgccaaggcccagagaacacgaggactcccaagattgaacatcagggctgccccgggcggtgcaagagcaagttgcccaccctctgttcctgtctccattgcctctgggatgaagctaagggctcaggaagaccctctctggcgacacaggcttggtgcatggacccagtcacagggttcctccctctgcaggacagtccatggggtcacacagtcacaacaggcagggcggggcagatccagaccctctcaccattggctctgagaccagctttggaagccatagtcactgagcaccaacatgagagagggaactctggggctgtgccgccatgcacctttggggctgtgacctgccctctctgtgcctccgtcccctcgcccctaacgtgggtatgagggtgcccatggaggaggggtcgggagggttaaaaggtgggcacctctgagcccaccgagcacagcagccctgtgatagtcagtgcagaggggcctggtggctctggtgacagcagggtgacgttcttcgtggtgtcaccacttccccagtaccatagagtacctctgtgcccttctgagggaggggtcagtgggggcggtggggtgcacctctcccccggggccatgcttctgcccccacattcaaccccgactccactgcctcatccagacttccgtggagtgacgctcccggctctcagcgctgtgtggtggctctcagtggggacgcctgcagccttctctggcccctgccctgagtcccatcccctccactccttccttcaacccactatgtgcggctgaggtcacaggggagccagaggggcttggcaggggtctccagaggccctggacaaacactgcctgcatctgagtgattcagtgacccagcacagtggccccagccggtggcttcgcccctccccctgcccagcctcctcccccgtcgctgcactgcccacctgctcctcgcagtacacccctgcagcccctctgagcagcccctgctcctgacagttgccgtggcattgcctggccaaaccaaggtcccggtgggggcccactgtgtttgccacccacgcctcctagtgtgtgtcttgggcacctgcttcccactgcccatggggatggctggagaccttctccacgcccagacgccctgcccacctcactccaccctccacctcagaggaaggctggccccgacaggactcctgcaggttcctggtgccgcgggccttgcttacccagcagatggtggccttgggcctcttccctctccccttcccagttagtgattttttgcctctctcctgctttctgtctctctctgtctctctctctctctctctctctctctctctctctctctctctctctcattactggctccttcccagcgccttgaaacaggttcaagtctctcccgtcatcaaaaaataataaccctcagatcaccagccccagctggctgccacctcccctgcttcacagccccattcctgaaagccttgtccccacggcatcctcggtcccgcagcctcaccaggggctccccgacactcacgtcccaccaggctgagatcaggtcgtctccacatcccctgcagccagcactggccggccgaagggaggaggggtcagccccgagcaccgaccaccccatcctgtccctggcccatgggtgtcttaaccgcccatgcacacacaaggtcctgctggactgaggagacagtgtgtgttggagaggcgctagcttccctacaccacgcgggggctggaacttgccagcccagcccatgcctgtctgctgtgccatgctccagaaatggcctgacagcctgcgcaactagggctgccccgggaaggtcggaaccaggaacaccctgccagacagatgggacatcctgggagaatgggcagagtctggggcttcccagggtcacttttggctcaccaccccttcctgcctcagtggcttgggggcgccatgctccttggagtgagaccctggttcaaatcccagctctgccgagggctggttccatagctccaggcgagtcacgcatgctctgagaactccacaatgtcaaaccccgttagcaggattgtggggttctgtggatcatgtgggacctgcctggcatgtggaaggggcttggggtgcagctgtgtccctggccccagcactgccacacccctcggtaccttgacctcacttttgcgctctggagggcagaacctctgagccagctctcagggataccttttttcctcgatggccttttctgggaactgccctcgcctgctatctctgagccctgcctgcccttcccccaaagccatcatagacccctacctcctatccagatggagcctggccatggaatgcttggggtgagagggacccatagcgggctccgggcattgttagggggctaggtggtgtctgcagaggccccacctgtggcagggtttacatgccgccacccctgccctcctcttgggtagctggggtcagaagggcctgaggcctcactctctctgcatcttagtttcttcacatctaaaatgctattcatatgcctgcctgagggtggttggggcctccgtgcagtaagtggagagaagccttcagccagaggacccccatatgcttaaacatccagacaccaagggccactcacagacagcagccggcttgtgtttcgtcatcccttttgggtcaggaactggggacgctggactccagatctccaggaggccatcccagactaggcgggaaggaggcctcagccctgagctgaaaacctgaaattctagaataaaccccaggccccactcccagcatgggcagcggggaggggagtgttctgacatttctcagctgctgtggttgggatggtgcgcccaccctgagcatgtggggtcctgtgggcccctactccagcctggaggcagctgcaggggtcagagaccagcctggagccctcgggcaggttactcagcctcagctctcattggtaacccaggtaaaataacagtaatcccatcataaggttgctgtgggcatgaggcttccagccatgcctggcacataggaagctattgtcgtttgtttcactggcttcgcacttgggcagaggccgccgccctctctgctgccttctctacctcaccccccgcccccagcacggtggcactgtggctctggcgcctggtgacttctccctccccggcctcaggtttgcttcactcttccaagggccttcttggtgtgactgtcctgtcctggccacgtccactccaagcagctggtccaggtgtggggcagcccccaagctcagcagaggacagttttgagacttagaggaggacggcatcagatttacatgaagtcagccatctcaagggattaccacgtcaccgcctcctctcacaggtctgagagctggtcccctggagggtgcaggtctcatcctaggtagaacagtcccagcctagcttcaaagtgctcctgctgccagaaagggtagaaaaccatgctgaatgccttcactgttgcctggaatgggagcctcagtttcaccatctgtaaagtgagattaatgaaagggacccacagagggctgttagagccagtaggcggccaggcgcggtggctcacgcctgtaatcccagcactttgggaggctgaggtgggcggatcacgaggtcaggagatcgagaccatcctggctaacacggagaaaccccgtctctactaaaaatacaaaaaattagcctggcgtggtggcgggcacctgtagtcccagctactggggaggctgaggcaggagaatggcgtgaacccgggaggcggagcttgcagtgagccaagattgtgccactgctctctagcctgggcaacagagcaagactccatctcaaaagcaaaagaaaaaagagccagtaggccaggcgctatgtcttacacctgtaatcccagcactttgggaggcctaggcaggcagatcacctgaggtcgggagttcgagaccagcctggccgacacagtgaaactccgtctctactaaaaatacaaaaattagctgggcatggcagcacatgcctgtaatcccagctactcgggaggctaaggcaggagaatcacttgaacacaggaggcagcggttgccgtgagcggagatcacaccattgcactccagccccggggggacagagtgaaattctgtctcaaaaaaaaaaaaaaaaaaaaaaagcaagccagtgggcaaggacacacaccacgcccagcacaccagaagcatgcagcagatgctggctggtagccacagccatggtagtaactggcatcactggcccaagggggtctccctacccaatgtaccagcccagagggtgctaaatgacccatgtttgtgggcatgtgtaccccagtgctgaacctccttctggtagattttcaagcaccattttggagaagggaggcagggaccacagggggccagccagcctgtacaggttttttgtgttttttttgtttgtttgtttgtttgttttttgaggcagggtctcactcttgcccaggctggagtacaggcagtggcgtcatctcggctcactgcagcctcaacctcccaggctgcagcaatcctcccacctcaccttcctgagtagctgggactacaggcacacaccaccaaccctcactattttttgtagagacagtttcaccatgttgcccaggctggtatcaaactcctggactcaggcgatcctcccaccttggcctcccagagtgctgggattacaggcatgagccactgcacctggcctaccagcctgtaaagcttgagggctgggctccaactggagactcacctgcctttcctttctcttcatcagatgtgttccagctgccaagaagccggggccaccattgggtgctgccacaaaggatgcctccacacctaccactacccgtgtgccagcgatgcaggtacgagcccgcccaggaacaggagggcattggagcccatccaagcagtccagggggaccctccctgggcacagctccccaaacccaggccccatctcactcttcagtttccctcctctcttgccccagcaattcttttatccttctgtctgcctagacctctgctgggcaatgccagggacatggaaatgaggcattccccaggcacctgcttgaggagtgcccagagcagtgagggaagatagaagcataaattacaatgtggaatgctgtctgcggagccatcattgccaaggggcagggaggatctcaggcctcagagagaaaggggtattggaggttgggcctttgaaggataaataggagttcactcagcagagacaaggggaaaggcactactacaacagcaaaaaccaactgagttgggggtgatgaggttcaaaacagactgagacccatggagcaattgtggaagttttgaagcagggtaatggggtatggaggtaggcccaggctccccgcatcctctccccggtccttcctctcactcatgtattcatttgttccgcaagcatttgttgagcccctaccatcactgggcacacagaatgaccgtgcatgggctggagccacccaagagcccttacctttatcgaccaggtggggaaactgaggctcagagacattccttatttcatccagagaaagcaattgcttatggtacaatattagtcattggggacaacaatattttgggagatatggggccaactttggcctggattcaaaccctagtggtggggggtggggtggttttcgttcttgtttgagacagagttttgctctgtcacccaagctagagtgcaggggtgcagtcgtggctcactgcagccttaacctcctgggctcaatcatcctcccacctcagcctcctgagcagctgagaccacagatgtgcgcagccatgctggctcctagtagtgtttttatttttatttatttatttatttatttatttatttatttatttttgagacggagtctcactctgtcaccaggctggagtgcagtggtgcgatcttggctcactgcaacctccgcctcccgagttcaagcgattctcctgcctcagcctctcaagtagctgggactacaggcgtgcaccaccacgctcagctaatttttgtattttttgtagagatggggtttcactgctttggacaggatggtctccatctcttgacctcgtgatccgcccgcctcagctgcctaaagtgctgggattacaggcgtgagccactgtgcccggcccctagtagcgtttttaatgtgtggtcttgagcaagttggttgatacctctgcacacagtttccctacctgtatgatggagatgataatagccccttctctgcagagctgctgggaggagagtgaaataatgaacactacccacacggtgctgcctcagtcctattttgggtccagcctctgtgacctctccccacacggtgctgcctcagtcctattttgggtccagcctctgtgacctctccccgtcaccctcaatccctcccaactctggcctggaaagaggcgaagtcataacccacctcccagtggacagagtccaggcccccccaggctcccgtcgctctcctagcagccccagctactgcctcccgtcctcacctgatgccctgctggctttgcctggacaggggaccacagcctgtaccccacctgcctggtgggtccccagccagtgtcagcccagccaagctgccccagggaggacacagaggactctgagtgctgacagttgcttggcaggggctgagctgccgggacccagcggggaaggggcttgctggagcagggacgtggaggattctcactggcttcacgctcccactctgagcagtgtgagccagagtttaacatggaccctgccacttgcccaggcatgtggccgcactccccataatagctgccacgagtcacattcctccttccacagtgattaacttagcgcccgctccactcccagccctgctacagaaccatgttgtttccagccatcttcacagattggctgcctcacccacagcacacagcatggcgtggacagtcccaggacttaatgccttggctttcttgctccatgtcctatgttctttctcctaccccagcactgcccagccccccaaggggctcacccttgagtgggacggacagcaaaactgtggttcttggccacagttagggagaccagacgggaaggagagagtatgcactgtggaagaggttcatcctgtctgaacaagggagaaatctaggaagacttccaggaggaggtgacatttaagccaggcctcaaaagatcgggggagctttgtagcaactgtttagtggtgggacttgtatactaggctttgagcaagagaacttttatttcagataaaatcctagaaggattcctcatataacagggatccctgtagcaccgtgaagattgaggcaggaaagggactgggaatgctgcaaatggagacatacacctcagagactgagttggcacagaatccatgggacttgatgatgagggagagggaggtgacaagcctgatgcccagcttccccatgaaggggagaagtagggtgtggacgtgcaaatggagtattagctgctgctgcagagctactggcccttccaggcccagcttcatgtctccagcaccagcccttcattagttctcaaaagggcgtgagttggctgcaggctctgctgggagcaggatgatctagggtggccccagctgtgccagcttgtctttgctccatcaatctctcatcctccagcaggctggcctgggtgcgtcctcatggcagccccagggctttgagagagtggaggtcacagggccactcacagcctaggtcctggactttaccacgttctgttagccaaagcaggtcccaagtccagcacagagaagtgcaggccacctggggtgagctgcagagccacaccacaaaggacctgggtgcggggaggggactgggctgctctgccaggccatctacacacacggcagttccctttggccacacggcagtagaggcagctgtggacatacaaagtgtagatagctgggctcaggatcgagtctcgcccaccatcagcaggcgagggctcatcagagccctggaagggacaaaatagcagggttgtgttcaccatggaacagctggctgaggaggagggtggacccctgggaaactgaggaacagctgccagagaaggcgagggagaacaagtgagctcgagagtgaaggcggggaggacgggcgcttggggtgcagggagggcccccagcgtgactctgccagccaggcggtggggggggcgggggggtgggagtgagagggcactgagggagtgggctggtcaggctgatctgatgtctggccagggaggagccccaggcctctgtgtcaggcactgggactgcagggcaccagggctgcccactggctgccagcctctgccctgcactgcgctgtcctggcctactcatcctgcccccttccaattcttgttaaggaacccactttggagacaagcagtgactgaagagcaggcagaggctgctacaccacagtgtcctgtctcaacctttccccactcaggccctggggccaacctgtcagtgagtgcccaggttccccaggtgcaggcaccaggtcaggagccagatcactgaggactggccttgcccagtgactcccgccccgtgccccatgtggggtggtgctggggcagtgctgagggagccagtttggaagtggcgacctcctaccctcaacttcccttggtgggagtgcccgcagctacccaggcgtgccaggggcaggcctgggattttagcctagtgtctttggaatatctagttcagccccagaaccacatctggcttgcctgagccaagggaaggggaacagccgtggcacatctctagctgctggccctgaatggcagtttccaggtccgtggcactccagcttctggagacaagggcagatcgcctcagagaggcctgctaccacccagccctgccctcagggctgcagagctgtccctgccctgccttctggccaccaccctgtcatgatgccattgcacagagccacctccagtgtgaacaggaagattgtgttggagagagcaccagcctccagctacttttgggtctggggtttgttcagaacagtggctggtgaggctttgggggaggggagccgagaaggggactagagactggggggtccctgggggaaaagccagcttctccctaggtggcagtaggcaggggagtggagactccctgagatagcaacacctcctgggcctaggtgggcataagcactggccatgcttggttgtcctctctgcccctgcctcctgcgcccactgcatgccacacatgtgcagggtggtttatttttaaattttattttattttatattttattttattattttattttattttattttattttattattttattttattttattttattttattttattttattttatttcatctcagacagggcctggctgtgttgcccaggcaggggtgcagtggtacaatcacagctcactgcaacctccgcctcccaggctcaagtgatcctcccgccccagcctctcgagtagctgggactacaggcatgcgccaccatgctggctaatttttgtatttttgatagagatgaggttttgccatgttgcccaggctggtcttgaactcctgggctcaagcgattcattcacctcatcctcccaaagtgctgggattacagacatgagccactgctgctgccaagatggtttctatacactcccatcctcaatctccatgataggcatacagtaggtggcataatgcccattttacagatgtggagactgaggctcagagaagtagcagatgctcaaatccaggcttgcaacaccactaccagtccgtccacaggggttcatgacatgctcactggaagttagtgagctcttccaggggctgggcatacatccagggaagaagacagagctggtgccctctgggagcttgcctgccagtggggaagaaacaaggagcaagacaagatcacacaggccagtctcttaggaggcagtgacaagtgtggctggcagagtaaggcgggagggagggagggactgagggactgcctcaagtgaggaggggcggcacgtggaactcagggggaaaagctctccgcggaggaggtgaggtgagtcaagactgccaggccaggggccgcacccgcgccgtggagtggagtggagtgtggagggttttgtgcagaatctgattaactctttgaaaagagcccctgcagtctggagcctcgcgggcagtgcggctcccctcctggctgcagacaaaaccccacagctgtggggcccccaccctgtcctaaccaccgaaacttctctttggtcacaggttgcatattcatcgaagagaacttttctttgaaatgtcccaaacataaggtaggggaccacagtgttttgtagggcgaggggtgtcaagcgggagaggagccccacctcgcacctccttcacagtcccctgggcccccttggctgcgcagccccgcagggcccagccctaggggagggagctctccccgcccacccccaggagcccccgccgccgtccagctcaggtccctgtccacttgcgcgccgccgccgccgaaaacccgcaggcgtcggggcatgggcagccaggggctggagggcgtccctgggacggcctccctgcagctccccaagataggtgacagagtggggcaggcgggggcgcgggacggtggcacggagctgaaggcgaaggtgaaggtgaagctggacggggtggggccagaaggggtggtgccgacggcctcgggcggagaccccagccgcgctctggggtcgcctgggtctggggcttaggcggggggcccacactgggggcggggcctatggactgtgaagtccgaggtcgtcggtaactggcgggcgggcgtcttttgcagaggctgccgtagtaatccaccccaacggccggaggagccgccggagcccgcctgcccgcccgccgccgaaggagaggagccgcctgcgcagcccccgggcctttgagctgctcccagcgctggtccagagccgatccttgatccgggtcccggatcgtggatccggccgcctagggctcagacttgcggccccgggttgggaggaaaacccgttccggagccgcctgctcccggaaccggacggcacagggcgttcttgcccaccccaggggccaggcttgcggagggggagcccgcggagcggccagactccccggggcgctcagcctccggcgagggtgggagacggctttgtcctggggacactttccctctggaatctcaagacgacgtggcacacattccacgtgggtgctgccgccaccccagtcggtcgtggcgtgcagctgggagccctgggcttgggggtgggggtcgaaacagtactggaagaggcggagggcggctcctagctccgtggactaggcgggggagaaaggaagcctttctgagagcgggctaggccggcactggagaggccggagcctttggaacaaaccgtgcggaacgcgtccaggggccttcccgcccagcctttgccagatctctcgtgcggttcgggcaaagccggggtagacctgggctatgctcagttaggggttgcgggatccccgagtgtgggcgggactgggacaccctttggcctctgtttgtcccctttccagtcctccaccccacccctggagcccagcctgggagcgcaaaacccaagaagcggccagaacgcacctccggctccggcggacgcgcgaccgttgtgcaccaccagggaccgccgcgcctactctgcacgggagcagggacagcgctagatttcgtgtacaaaacctgtgtacccctctatatatatgttacatagaatgtatatatgttgggaacatgctcgcttctcccgtgtgtcgccgccgtgcgtcgtgcgcccgcaacagagccccaaccgggcctttgccgggtaaggggctaccgcgacgccacttgtccacgcagccaccaccggcccgggccagtccctgccagtccgtccgcctgtccgtccgtgtcctcagctctgtccacgcttcgataggcctgacgcagcccccagcccagggccgccctagcaacttcctgtacatatgactgtaaaatggtaaacgtgtgtattatatctggcctcgttatatagtgtatatatatgtatacatatacatatatataatatatatgaagactgtaaatgttaagacgactagtgttcttattagtatattgcttcacactgaagattgtgtgtatcgagctgtttctaaaagatgtttattttccttaagagtaaaaaacagtcattgcattcagaaaaaaaaaaaaaaaaaagtcaataaagatacaacgattgttttggaaaatctgcagcccgtggattccgaccagattcagctgggagccgggccaggctttaggttggggaatgggaatgaagggaggggctgggggggggggcatgaatggagtcagggagtcggcctttcacagaacaggaaacctcccccgcccctgtgccccctctccagtgtggcggcaggtcgggagggaggaggcttctttgctgtgagatgaccaggggccgggatgggggaggtgagacgtgccagacttcttgcagggagacccaagctgtagctcctgtcacacaacaggtcctggaagtcagtccatcctcccgtgccacccagggacctgatggggacagagctgggaggtgagaagggacaactgaccccatggaggccctaagggttgacacagcccaaccatgtgccctgggagcagggggaacaggtaggctggaggccatacagccagccctccccactcctcccactaacaaacaaacatcgggaagagctaagttaaaagttgtgtaccttgtggccggagggggaggggaagcctttccctaggtgctgggggagggcccaagcactctcactagtcagcacatccatcagctgaagacacaaaacccagattataaataatttcatttttaattctctgtacaaaacttctcaatctatgaaaataaagtttgcaaaaggcaaagtagcacaggagcctcaggtcaggaggctaagcacgctgacctacactatgtacacgtctctctcccacgacggagagagaggcctctggggcagagccctgcttgcagtccgggaaagccaagttggcttccgtcagcacagggaaatgtacccctctcttccctgtacacaggaggaaaaaagccactaaggtgcctgcagagcaaggaggggggccccccaaaatggctcggcccctgcagtgccccgatcggccaccagaggtcagcaccatcatggccgccggtcttagggtcaagatcgcgcccctcgggccttccaccgcgaaggcacacagcagccgcaggtcgaactgtggaggccagagtctcttgcactgccttcggccttcaaagcttcgacgcaggacagaagctgcacgggaccaaagtggctagagacaggggtgctgaggccggggacacggggtctagctggaagtgacagtggtcccaccgcccaggcgcatgagcatctgctgacagtcgtgcagcagccggcgatcgccaagcttctcgagtgtgcgcgccgcctcagccagcatgcccacgcgctgcccgggcgccgacaggaagccggggggcaggtagcaggaggccagcagcaaggcctccgcgtgctcccgccgcgtgggccgcggctccagctccgccaccgcgcctgcgcacacgaggatgtgtcagggatgggtctcaagctggccacgcccccgcgggagccctgcccacacacaagccacggcaccagccgcctgtacctggcacacaggtacctggcgggggcctggcgggttcccctctccccaccctagtctcagcccacacacaaagtccacagactgagtcacgcacgtgcagtcatgtatcccacaaatgacagtcaccccactgattccttgtgaaaggaattgtcatcaggtaaccatcaagaagatgcttggtctttttttttttttgagacagggactctccctgtcactcaggctcactgcggcctccaactcctgggctcaagctgtcctcccaactgagcctcccaaagtgctaggtgtgagccactgcgccaggcctgtctgtcccgtctgacacacacacagcctcccttggtatcacatcccatgtgcgcccttccctgctgagcagacagcacatccctggtcagcagctgccccctcacctcctttgccaccggggcctgcccgccgcctcagactgcggtcgaggagctggtgtgtccgtgtggggctggcccccgccatcagccgggccgtggcctcatgtaggaacacctgggggccaggagagtggaggctcagggctctccatctccaccactgcctgactccccgtcttgaggacagggccatcgggcactcaccctccgcatggcgggccggaagctctgtgccagccgcctcaggctgctcaggtcccgttggaagccacgcagctcaagggcggaagcctggggcctgctgctggtgccctgggctgctggggccggggccgggggctgctgctgccgccacaggctggtgcgcaccacaagaagcaggtcacacaggaacagctgcacggcctgggggtggcaggcagggcaggggtcaccagggctccagctctgggaggggcaggatgggggcccgtggtgccaggggccggctccgggctgcactgccgaggcactgcacccgcctcacacacgtgcaatgcaacagcaatgcaccgcggggccgcccgcctctctcggcccccacacccgccaccggcccgggagcagctgtccagccctcctgatgcagggcctccaaagggatcctaccacaccatccacccccctcctcccagggatggggaaactgaggccagataggggcaacccctctcctctggacagaagccttagccaaaaagcagggtctgctggaccccctatcctgtgctgcttgggctaaccccatggtcttctgcagcccctgggggctggggagaggaaccagggaatggaaagctgaatcccccagccctgccaggcccctgaccccacccctcaccttgtcaatggagctgctggctggtgtggtagccaggctgtcctgcaggtacccactggccttctcacagatggtcaggctggctggaccagactctgccttggcacagcccagcagggcccgggcagccttgaaggagtgcagagctgccctgggcaggggtctcctgttgggaccagggcagaagagtgccagtcagaccagtccacaagccctggctgagtgccccccacttccctggctcgagttccctgaggaaaaaaggtggtgactcctcctgcacagaacaaaggctgagtgaggcacagtgcccaggggatgaggaaggctgagcccgggaccaggcaggaggaacctgccgtgcactcactcagactcctgcagcacccggggcaggtgctccaccagcgggcacagccgctcagccgcctcctcatcccgccgcagccagtggatcaccacagctgtcagagaggcccaccacttggccaccgggtctacgcctgcagaagagggagggtcccctgaaccctcagtcacgctgcacgggggagctgagaagggagccaggacaggggccggggactcaccggtggtggtggccatgctggaactgatggagaagctgtaggcaggagcccccgcagcatcagaacagctgttcagcagctgcaggtacccgagggcatccgagaattccctgtggaaggagagagctggctgtcggaacagatggcaggggtcctaggagggtgctccccacctgccctccagagtacagcctggcccctggctctgcaaagtgccactgtctcctcccacaggctggtggggagaggaaactcagagaggaatgaagcgtgcatggcacgcacggtagcccagctctgggctctctccacagggttgaggccagagctattctcagaatcccgccggaggggccttgcctggaggagggcacaacgacacttacttgtccccatcagctgacccagggctggggttgggctgggtcacacagttcagtgctcgctctaagagatgttcccggaatagctgagtcacctgggccagggggtccactgtggagaggaggaggtgagtggggtggggagcagggccccaccctcctctccaagctaagggctttttcctgggtgggctggggccacacctagggccactgggaagtgccggcatgcccctgggtgcagcccctgccaaggacaggggaaagcgggtggacataactatcaccagcaccagccttggccaggagacaacactgaggcctgccctacactgcttccaaaggaaaaccgacttgagaagatgccattgttggctccgcttccttactccacagcggcactgcctggggtcacttctccaattagccatctgcccatcaatccctgcatgtgcttctgaaagccccaatgggaacgagaggcacccaggcctttcccttcctgcaacccccacagcaacaacccatggcagggagaaggactggggtggccagagacagccagagattcaggcgacaagggacaggacaggaatgaggatgagggacaggagaggggacagggaaggggtaagagagcacctgggttcccggccaagctgtacaggctctcccatggggtactgagcacggaccagtccccatccacgaagaaacggtggcccacggggtggcagagccactgcatggcaggaggcactgagccactctgtgccaggcaggcctggcgggcactgctcaggaagaagcgctgtaggggagggtactgggctgtcacagtggacacagcctggggccagaccccgggccgagtcccagcttggcctggagtccccctggtaaccactgccacatcccgtgtagctcttacccagggagcctctggagagagctgcagggataagcccccagccccccaacccactcactgtcagaaaatgcaaggcccgtgggagactggtcttcactctcaatgcagccgccacatagatctcggccagcgtcgccacagacacggcatcccctgcacactctgccaggttcagggcactcagcgccaggttggtggcagtgaggtgcccgcctgtgtgcttccctggaaggcaagcaggcatgaggctgtgggtggagcacaggcagcagggagcacctcggagcccgccccacgctcagtcctacccatggtgtgcagctggtgcagcttatggtagaccagggctgcgtctcgggcgctggcgctagcatccactcgcagagcacagtcctgctgcaggccccctgcccggcctgccagccagcggcccacccagagacgctgcagcaggtgacggatgaggttccagaggaggctacaagccaggtccaggtgggaggtgggcaggggccggcccagtgcccgcagggccagccacagctgctgggcagcctgggcaaagtctccctgtggatgagggttttccaggtgagaaaagtgaggtcagagcagctgccccaaagctcagaagagccgtccacagcaggctctggaggggtggtgggggtctgcggatgcgtggctaggcacagggaggacgggacagattcatggtgtgcacagggagcaggaacaagggttgacacccagcaccttcacagcctggggtccctgccctgcccactctgccggggccagccccttacccgggccaggtccaggtcagcctgcttgcgatgcctccagaagtacacggcggggcctgagtggggccgtgtgactggctcaccgtagacaaagagaagcaccaaggagacgagcaccaacagcccattgagcagccagaccactgggggcagcagccactgggcccagccagggccatctatggacagagggaaagctggggacacagctcccaggaaatccagagccccaagttcacaagcctgggggctcaccccgagtgtccctcccaaagatgcccaggctggccggtcccacctctgctctcggtgcccagcacgttgcgcccagggctatggtagacgctggtggtatctgaggggctgggaagcccccgggcccccagcaaggaggccaaggggttgcaggacaggcagaggaagacgagcgtgcacagggccaggcgggagcggtccagcatgccccggctgtgcagagacggccgctgctctggctttgcctggtggggttgggcagggtggtgagggcagaatcggagggaccccagagagcatggggctgggaaggggggggtcaggattctgcccaccttactgtgggaccccacgtggctccaggcctcagttattctgtctatgaaatgggaggtaggatctgttagggtcttcccggccctgtcatgaggctcagaggatatggctgggagtggggaagggggcaccgtggcagggcccaaccttgctgtcctcaaagactgggctgtcaggctccgagtcactgccactgccaccgctgccactgcccctgctgccaagggacaaggggctgctctggaaaggtgagccagcatccgaggggggtggggtcagtgtgtcctccacctcagtcttcacgccctccatgagcacgtctgtgttccctccactgccacaggccgacaccagatccttcagagattctgtgggccgaaaggaacagagccagg

SEQ ID NO: 17 - DNA, 18267 bp, Homo sapiens
  source 1..18267: mol_type = genomic DNA
actcaaccttcgagaaggtccgttcaaggtccgacaacgctctgggggtctgggggggaccccagcaaccccgtcatctcctggccacacttctgcttttggggcctcttagctttgggaggggaaggggcatggccgagtggtttttgagaagtgttacccccccacaaacaggaatttcctggcctctgggacaccttgggggtgtcttggggggaggggcggtagccgctttgcacggtctttgtctcccatctgactaatttaaacggataacaaagaggttctctgaaggtggccctgagatatgtggggttttgcagcctcgaaagaagagctggggcccggcagggcgcgggggctcacgcccgtaatcccagcactttggggggcggagctgggtggatggcttgagcccagcgagttcgagaccagtctgggcaacatggcgaaaccccatctctataattaaaaacaagccagggctaggggagacactttttaagagagcacttgtggttctagctcagagaggaccagacacttctgcagggtcacacagcagggtcctggacaggattcccagggaaagtggggggcgggggttgtgatgcgagacccacggacaggaccgggacctgaccctccaggaccttccagctggaggggggtgtcgtccccgcccaccccctcccccgacgcccactgggcacctgggaaggtgtccttacagctgacttctgcaggggaaactgcctctgcacgctctgagggcaccggccctgccagccccaacagccacctgcccggcggcactccagggccggcagactggagggagaattcctgcttccccgctgtgagcccctgcaagccttcagaccagctcttggccaaaaagggaggctgaggcttggggtggtcaaggcctgagccagggtccccagcccggggctcacgactcctccttcaaggggccatctgcaccctgcattcatagagccccccgtgcagtggggtgggcaccctgccgcaccctgcatacagccggctaagggcaccggtgtccacagggacccagagacgtcgttccagctgcccagggccacacagcccacaagtgacagggccaagaccggaacccagtacctgctgggcctgcggaagtgggagcgggcacaggagggtggggcggcttccggagacggggtggggtggggtgggggcaggttgatacctgccctggcgggggtgaggacagaggctggaagagccgcttagcaggctccccgcgcaaccctcagtctgtccgtttggagggtgggcgaggcgtcggccagcttgccagggtcacggaagggtcgcctcccaattagaaaccagcttccccctggcttcccgctcacacccgctttaccggctgcttgaaacagccagagacccgccccccgccccgcttccccgtggctcagttgactcccggctggacggcacggaggcagctcggatccacagtgtctgcggccttgcatcccggcttgggggtccggacccgctgggaacagctggttcagatttagccggggaggcagcgcgcattcctggcagtttgtggtgaacaggaatgtgctggaaggccggcggccgggcagcgggggggcgggggtgggggaggacggcagcggctgggggtggggccaggggacctgggcccctgagccggcagagacgcggcgcagctgggcaaggcagggctgtgtacccagcagccaccgttctcattcctcgggatcaaagttgccggcggggcggggctgcccccgggcgtggaaagccaagctgggtgggctgtgagctggtactggggggcctccccgcctttgcctcctctgggctacgagctgtttccaggcaggtgccaggtcaggggaccctaacccaaataatcccaggcaggtccaggtcaggggaccctatcccaaataatcccaggcaggtccagctcaggggaccctaacccaaatcatcccaggcaggtccagctcaggggaccctaacccaaatcatcccaggcaggtccagctcaggggaccctaacccaaatcatcccaggcaggtccagctcaggggaccctacccaaatcattccaggcagatctagctcaggggaccctaacccaaatcatcccaggcaggtccagctcaggggaccctaacccaaatcatcccaggcaggtccagctcaggggaccctaacccaaatcatcccaggcaggtccaggtcaggggaccctacccaaatcatcccaggcaggtctagctcaggggaccctaacccaaatcatcccaggcaggtccagctcaggggaccctaacccaaatcatcccaggcaggtccagctcaggggaccctaacccaaatcatcctaggcaggtccagctcaggggaccctaacccaaatcatcccaggcaggtccagctcaggggaccctaacccaaatcatcccaggcaggtccaggtcaggggaccctaacccaaataatcccaggaagagatgaggaagcggaggctgagtggggagctgtccgcgggaacctggggagatgggtgcagagcagggagagggatttgattttttttttccttctctcttttctttctttttttttttaagacagaggctcactctgttccaggctggagtgaagtggcccgatcttggctcactgcctcctctgcctcctgggttcaagcgattctcctgcctcagcctcccaagtagctgggactacaggtgcccaccaccacgcccagctcatttttgtattttagtacagacgggatttcaccatgtgggctaggccagtctcgaactcctgacctcagatgatccgcccgccttggcctcccaaagtgctgggattgtaggtgtgagccaccgcacccagcccaaaccctactttattctccctccagcgtttatctcccgctcccgctacacgacctgcccccatgcttatggccccctatacactttgccgtctgcctcagtgctgtctccgcggtcactagtggctggatagggacactcgaggtccccactggtgcacacccactgcccaggagcacacagcccattccccacggcggtgtctcagagcaccgaaggccaagaaagctggaatggccgggtgcagaaaggtggcagggaatcggtggcaaggagccaggtgcgtgactagaggcggtcagcctcgggggcagctccttcgggagttgctaagaagcaggatgggggccgggcgcggtggctcacacctgtaatcccagcactttggagggctgagacgggcagatcacgaggtcaggagatggagaccatcttggctaacacggtgaaaccccgtctctattaaaaatacaaaaaatgagctgggcctggtggcgggcgcctgcagtcccagctactcgggaggctgaggcaggagaatggcctgaaccggggaggcggagcttgcagtgagccgagatcgcaccactgcactccagcctgggcgacagagtgagactctgtctcaaaaaaaataaaaaagaaaaaagagctgatggttgcacaacattgcagacgtacgaaatgctgtgaaatggtgcggtttcaggtggttgaagtggtaaacgtcaggtgtgatatagcggggaggtgagaaggcagggcggggaggcagatccggccaggtttgtcctgcaccgggagtggattagagctgatgtttatcagtgagttctaagccggttgtcggcctgcttggagggcggtttatctgtgcccgcctgcagtggctggggcgcccccaatgatgggaaaagggagcatctgcgtgggtgtggtgaggggggacctccaggccgctctatctgctgttgccctggagtccccggccccaccctctgcagagcttctgtggggttcctgctgggggtgcccccagcccagctcagtctcgtgccctttgctccaccagctcctgtccaaatatgacccccagaaggaggcagagctccgcacctggatcgagggactcaccggcctctccatcggccccgacttccagaagggcctgaaggatggaactatcttatgcacgtgagtacacgcagggacacaggctgtctcacacttaacaaatcttggtttttctcactttttttcttaattaagaaatttttggggggccgggcatggcctggctcatgcctgtaatcccagcacttttggaggccgagggtggtggcggggggcggtggatctcgaggtcaggagttcgagaccagcctggccaacatggtgaaaccccgtctgtactaataatacaaaaaaattagccaggcacctgtaatcccagctactcaggaggctgaggaaggagaattgcttgaacccgggaggcggaggttgcagtgagccgagatcacaccattgcactccagccggggtgacacagcgagactccatctcaaaaaaaaaaaaaaaaaaaaaaaaaagttagctgggcgtggtggctaaataaataattttttttttttgaggtggagtctcactctgttgcccaagctggagtgcagtggcatgatctcggctcactgcaacctccacctcctgggttcaagtgattcccctgcctcagcctcccgagtagctgggattacaggcgactgccaccatgcccggctaattttttttgtatatttagtagagatggggttgctccatgttggccaggctggtcttgagcccttgacgtcacgtgatctgcctgcctcggccttccaaagtgctgggcttacaggcctgagccaccaaacccagccaaagattactttataagagtggaaacttgaggcctgggatggtggctcacgcttgtaatcccagcactttgggaggttgaggtggacggatcacgaggtcaggagatcgagaccagcctggacaacatggtgaaactccatctctactaaaaatgcaaaaattagccgggtgtggtggcaggcacctgtaatcccagctactcgggaggctcagggctgaggcaggagaatcacttgaacccgggaggtggaggtggcagtgagtctagatagtgccattgcactctagtctgggtgacagagctagacgccgtctcaaaaaaaaaaaaaaaaagagtggaaactgaggcccagagagaggccgtgagtttgcccaggaaggcgtgagcttggctgagatcagcatcgggtcttcacggttcctcgctgctcacagaggtttctgtttcccccgccccatgttgtgccctccagactcatgaacaagctacagccgggctccgtccccaagatcaaccgctccatgcagaactggcaccaggtgaggggctggtggagcggagcagggatggtgctgggggcccatctaacaggtggggagactgaggcccactcactgtccctctcctgcctcttcccagctagaaaacctgtccaacttcatcaaggccatggtcagctacggcatgaaccctgtggacctgttcgaggccaacgacctgtttgagagtgggaacatgacgcaggtgcaggtgtctcttctcgccctggcggggaaggtgaggcccagagaggggcagccacctgcccagagtcacacagcgaggtggatgtagctgctgcattcactcgtttgcaaatttctgtttgtttatttttgagtcggagtctcactctgtcactcaggctggagtgcaatggcgtgatctcagctcactgcaacctccaactcccaggttcaagcgattcttctgcctcagtctcccgagtagctgggattacaggcacctgccaccacgcctggctaatttttgtatttttagtggagactgggtttcaccatgctggccaggctggtcttgaactcttgacttcaggtgatccgcccgcctcggcctccccaagtgctgggattacaggcatgagcccctgtgcccggcctcgtttacaaatatttctgagcatccgtgaggtgccaggtacttcagattccttggtgaacaggaaggacatggtctaccccttatgcagttcagtctgatggcggaggcatgcaaaagtgaacacagcattgtattatgcattatatgtaagctctggccgggcgcagtggctcacacctgtaatcccagcactttgggaggccgaggttggagaattgcttgacaccaggagttcgagaccagcctggccaacatggtgaaaccccatctctactaagaaaacaaaaattacctgggcgtggtggtgcatgcctgtaatcccagctactcgggaggctgagcccaggagttaagaggttgcagtgagctatgaccacaccactgctctccagcctgggcaacagagcaagactctctcaaaaaataatcataacaaaagtaataaataagctctgaactgggagaaatgccttgaaggagaagaatcagacgaatgttgagtgtctagtgatcttcaaacccagaccgggagcgtgggtgggacagtggtgtagaccgggagcgtgggtgggacagtgtctggtgtagaccgggagcgtgggtgggacacggtgtctggtgtagaccgggagcgtgggtgggacacggtgtctggtgtagacggggagcgtgggtgggacggtgtctggtgtagaccgggagcgtgggtgggacacggtgtctggtgtagacggggagcgtgggtgggacggtgtctggtgtagaccggcagcgtgggtgggacacggtgtctggtgtagaccgggagcgtgggtgggacggtgtctggtgtagaccgggagcgtgggtgggacacggtgtctggtgtagacggggagcgtgggtgggacggtgtctggtgtagaccggcagcgtgggtgggacacggtgtctggtgtagacggggagcgtgggtgggacggtgtctggtgtagaccgggagcgtgggtgggacacggtgtctggtgtagaccgggagcgtgggtgggacggtgtctggtgtagaccgggagcgtgggtgggacacattgtctggtgtagaccgggagcgtgggtgggacggtgtctggtgtagaccgggagcgtgggtgggacacggtgtctggtgtagacggtaagcgtgggtgggacacggtgtctggtgtagaccgggagcgtgggtgggacggtgtctggtgtagaccgggagcgtgggtgggacacggtgtctggtgtagaccgggagcgtgggtgggacacggtgtctggtgtagaccgggagcgtgggtgggacggtgtctggtgtagaccgggagcgtgggtgggacacggtgtctggtgtagacggggagcgtgggtgggacggtgtctggtgtagaccggcagcgtgggtgggacacggtgtctggtgtagaccgggagcgtgggtgggacggtgtctggtgtagaccggcagcgtgggtgggacacggtgtctggtgtagacggggagcgtgggtgggacggtgtctggtgtagaccggcagcgtgggtgggacacggtgtctggtgtagacggggagcgtgggtgggacggtgtctggtgtagaccgggagcgtgggtgggacacggtgtctggtgtagaccgggagcgtgggtgggacggtgtctggtgtagaccgggagcgtgggtgggacacattgtctggtgtagaccgggagcgtgggtgggacggtgtctggtgtagaccgggagcatgggtgggacacggtgtctggtgtagacggtaagcgtgggtgggacacggtgtctggtgtagaccgggagcgtgggtgggacggtgtctggtgtagaccgggagcgtgggtgggacacggtgtctggtgtagaccgggagcgtgggtgggacggtgtctggtgtagaccgggagcgtgggtgggacacggtgtctggtgtagaccgggagcgtgggtgggacggtgtctggtgtataccgggagcgtgggtgggacacggtgtctggtgtagacggggagcgtgggtgggacacggtgtctggtgtagacggggagcgtgggtgggacggtgtctggtgtagacggggagcgtgggtgggacacggtgtctggtgtagaccgggagcgtgggtgggacacggtgtctggtgtagaatggaatgggagtgtgtgtttgtgacatggtgtctcacgtagaaggaacagcaaggtcttgacattggaattggctgggctgttagaggaagcgggagctggttttctcctggggtaactgctccaaatggtgttttcagatgccccctgtggctcccagtaacctcacgtggggaatggtggtcagggaggagccgggcgcagacatcccagtgaggggcagagccaatggcctggccatggtgcccggggattgggtcagaggaggtggtggaaggtgagagagaggaagcgaaaaccacgtccccatccccagaattcttggcctgagccctggaaagctgagctgttgcctaagacaaggcacgctgggatgaagcagccccatgggctgggcgcggtggctcacgcctgtaatcccagcacttttggaggttgaggcgggtggataacttgaggccaggagttcaagaccagcctggcaacatggtgaaaccccgtctctactaaaaatacaaaaattagcctggcgtggtggcacacgcctgtaatcctagctacttgggaggctgaggcaggagaattgcttgaacctgggaggagggggttgcagtgagcggagatcacaccactgcactccagcctgggtgacagagccagactccatctcaaaaataaaaataaaaaactgaaacagctgtatgatgggtgtgtggagtgtgtggagtcccagacacccgagagatgtgcctgtgggggctctgcgcggcaggcagaggtgacaggccgcggcctggtctctgtcccgcccccagggcctagatctagggtccctggctgccctctgctggtactcccggcccctttccctcacccaggccaagactaaggggctgcagagcggggtggacattggcgtcaagtactcggagaagcaggagcggaatttcgacgatgccaccatgaaggctggccagtgcgtcatcgggctgcaggtgggcgacagctcccccagccccagggaccacggcattgggggaccacggtgttgggggacagcagcattgggggacagcggcatggagccctgtggtccctcaatttcagggagggaccggaagcttgttgggtgcagtctgacctctcccacgaacctccctgcagatgggcaccaacaaatgcgccagccagtcgggcatgactgcctacggcacgagaaggcatctctatgaccccaagaaccatatcctgccccccatggaccactcgaccatcagcctccagatgggcacgaacaagtgtgccagccaggtggggctcgcccgggtgcccccgactcctctccctgcccctctacaccctgtggtctcggcccctccctggggccacctccagcttctctccccactctcagtctcagccccttccctagaccacctccggcttccctccccgctctctgtctccgccttggatttcagcctctgtcatttccacctggctgtgggtctctagggaagttactacctcaccctgtgtcattttcccttaaggactgcccaaaggtccacccaattctttttttttaatctttatttattttatttatgtatttattttgagataggatctcactctgttgtccaggctggagtgcagtggcacgatctcggctcactgcaacctctgcctcccgggttcaagagattctccttcctgcctcagcctcccgagtagctgggactacaggtgcatgctgccacacccggccaatttttgtatttttagtagacatggggtttcaccatgttgcccaggctggtctcgaactcctgagctcaggcaatccacccgccttgacctcccaaactgctagggttacaggtgtgagccaccgcacccggccacacccagctaatttttgtatttttagtagagacggggtttcactgtgttggtcaggctagtcttgaactcctgacctcaggtgatcctcccacctcagcctcccgagtagctgagactacaggcgcccgccaccacgcccggctaatttttgtatttttagtagatatggggtttcaccgtgttggccaggctggtcttgaacttctgacctcaggtgatcctcccacctcagcctcccgagtagctgggattacaggcatgtgccaccacgcccagctaattttgtatttttgggagagacagggtttcaccgtgttggccaggctggactggaactcctgacctcaggtgatcctcccaccttggcctcccaaagtgctgggattacaggcgtgagccagtgcacccagtgaaggtcccctcttctctccaccatgacctgctccacccctccttcctctccaggtgggcatgacggctcccgggacccggcggcacatctatgataccaagctgggaaccgacaagtgtgacaactcctccatgtccctgcagatgggctacacgcagggcgccaaccagagcggccaggtcttcggcctgggccggcagatatatgaccccaagtactgcccgcaaggcacagtggccgatggggctccctcgggcaccggcgactgcccggacccgggggaggtccctgaatatcccccttactaccaggaggaggccggctactgaggctcccagcacgctctctccccacatcgtctgcccatctgggtttttgggtttttctgtgttttcatcttttttttttttttcttaacccgttcagtgctgccagtcaaccaagggtctgtgagtgtcagcgtgggatcaggcagcagagcttttttcccctttgccttgatccttcgcaaggctgagccactgggctgtgggggaaggggtcaaggccatatcccaatacgtgtagggcgagggtccctgctggcacattcaggctgtgctgggaagaagagacctgggcttggaaggaaccggtccccgacggtttctgcttgcctcgcctcttcccccttttgtcagctgagcagtttgtggtttctatgcccgcaagtttcaggaagtattcacaaaagaaaaatacattttttcccccaggggtggggcaaggacagtggagagagtgctaggaaatgagtcccctgggaaaggggaccgggccgtgatgttaaatatctccggctcccaagtgactggatttgcctaggaccttcagaccaacagacttcagaccctcagacctgccccggggccaggtggagaaagtgagggccgtacaaggaagtgaaattctgagttgttggggctaagcctgaccccctctccatgctccccgccccaacccactctggcctcagtagatttttttttcagttgtggttgttgcccaggctggagtgcagtggcgccatcttggctcactgcacctccaccttccgggctcaagcgattctccagcctcagcctcctgagtagctaggactgcaggtgctccaccacgcccggctaatttttgtatttttagtagagatggggtttccccatgttggccaggctggtctcgaactcctggcctcaggtgtgatccgcccgcctccgcctccccaagcgctgagattacaggtgtgagccaccgtgcccagcccctcagtaggttttaaggagcccccagccctcctcccttctgggcccgaccagcttatactgctccatcttccccggccacatgccccgccaagtactgcacagggaccccccacccaggggacctgctccgtgagataatgtgaaatacgactgtggaccaaacgcaataaaacctctgtttgtacgaagagaaggtggccaagagagttggcgtcgatgagggcgtgctttgctttgatgcttttgtggggagagaggaggtcttgggggatggggggatcaaggggaaaatgtccacctcaccattgggaggaggagcaaaagctgaagccacaggtgagtctgggtggaatgaatgatttgaagggccgggacttggggtagagggagaggctgggcttcctggccatttggagaagaggcagttccctcaaatgccccccatgcgctttggctgcactctaccttacagcgcaagtctcgtggcctcagcctggatgtctccccgttggcgaactcctatttatcctcaaagccccaacggcaatgccacctcctgccgcgggagccgtccccacgcctctcactctccccagcgccttcaaagctgtggacccacacgctcccatttcagcttcacctccagcctgaagagtttatttcaactcttcttccagagtgggaaacgggttttcctcaaaatcagggtagccactataatcggagactctagaatgttggccccctccccctcctgccatcctctgcagaagccgaggagcgttcgtggaatgaatgaatgaacgaatgatctagtggaacccctactttacagacggacgagtgtagtcccagagtctggactaaactagagggagcctggccagccccggggacagcggggacagagggaactcctgcaattcggagctgcggtattgcagccggttatacaacgtggggaggcagcctggctccccaaagacagcgcagcctcgttcccggagggcggcctgcctgggacctgccgggcactccgccaccctacggtgatgcagcaagagccgcgcggtccctttaagaaacccggctaggcgaggcccttctgtgatcccgtctcctcccttggcccgcgcagctccgacggagcaggccagtgagtgacgggcaggtcgcccaatagcagcgtgcagaggcaggggcgtgccccggcgctgctacctgcgcgggcaagctcagcgcacttggcttaaggggcggcgcgctccctgcctgctgctgggcggagggaaggcggcaagagctgcggagcccctggaaggtgagaaggactcggagagggaagaaggcccgagactcgagaatgcggggttggggccgggagggatgcaagttccctgggaattagggggtccagcctctgacctccttccggtgaatgttgacgacggctgaattgatcactgattctcaaggggggcatcggacatctgggacccttaagagggcctttgccgatcacacacctgcagccccctgcccgttagaactcctgcactcccccttgccccgtcttacaaatggagaaactgagcccactcccccagatcctaagtcccgcttgatgtaaaggaaagaaccctggcgtaagggtctgggtctgaggtcccagttccggcctggtcacctttagcaacttcctgcccctctgtcagcgtcagattctccatctgtgtcagaggtggaccggcccaaggaaaatagatcaggaatcgctgactccaggagtctctatcccagccccttcgcctgactctttctctggctcccgcggtccctctgagcgattaatgctacataaggtgtgggcagagctggggtcgtgcctccagctgggcaactgcctgtctctctgggtgcctgggtttgctttcttgggcctcggtttccacttctgtagagtggggtgatagtccagcacttcccctgggcgtgtgaaatgtccagcactgccaatattcgttgctgttatcttcggagaacagtgaggggaaaggaatccttgcctgggctgggccaggcaggaggctgggggtcaggacctggaagaggcttccaggtgaggcttggggtggagcctggtgacgaaagcgttaagcccaaactcggtccctggaggattagaggatgatctttaagtccccagctgtcagccctgctcagagcgacagtcctggcagccaatcagatgcgaggacggctgcgggttgcgctcccattggtttactccacccctggggtagcggagcctctttatcgagtgactactgtttgcctcgctctaatcagagcttccaggaaccctgcgctgtgggataaaggaatgaggttcagaaaggggcagggagttgcccgcagccgcaccgcacgtcttcagcccgaccgttgtcctgacctctctgtcccgtcccctgcccagtctcaccatggccttctggacacagctgatgctgctgctctggaagaatttcatgtatcgccggagacagccggtaacgccccagtgtgagaccagggccgggtgggcaggcagcccccactgtcccccaccgtctcccacctattctcccccaggtccagctcctggtcgaattgctgtggcctctcttcctcttcttcatcctggtggctgttcgccactcccacccgcccctggagcaccatgaatgtgagcccccccagggaccaggcactttgtgtgtgtaggggaaggcagatggctcacccgtgcacaggaatcccccgtgcatgtcagggagccttcaccaggccgccaatacatggcatgggagtgagctctccatcgctggaggcatgcaagcggtgccgggcgacccgatgggggtggagtcaggcagagtccacagggcctcagcaccaggcgtctccccgcaggccacttcccaaacaagccactgccatcggcgggcaccgtgccctggctccagggtctcatctgtaatgtgaacaacacctgctttccgcagctgacaccgggcgaggagcccgggcgcctgagcaacttcaacgactccctgtgagccagaggcagtgggtgcggccggcctgcaaactcggggctgcagtgccggccggaaccccgcctcctgccctctctctgtccccagggtctcccggctgctagccgatgcccgcactgtgctgggaggggccagtgcccacaggacgctggctggcctagggaagctgatcgccacgctgagggctgcacgcagcacgggtgaggaggccggggggcctctggcagggctgagctctgagcctcaacttgccgggccgtgaaatgggcacagggtgggggtgggtgcctcagaccaacgtccccccagccccatgctcccgtgcgctcctcccccagcccagcctcaaccaaccaagcagtctccactggaaccacccatgctggatgtcgcggagctgctgacgtcactgctgcgcacggtagggtgtcggggcgggaccgcgctgacttcctgggacactgcactggggatgtcctggcactgccccaccccgggccaaggacctcccgttccaggcatccaggctgtccctggtctctgcggtgatgctgcttgtccgtctgggcccccagacagagtgtgtctgacccagtgaggaagactcgtctgtgagatctccaatgagtccctttgcctctcagagcctcagtttccctatttgtaaagtgggggctatgatagtatggtctgcctgggaactggccagagcgctggacccctagtgagtgttcaaaatcattgtcccccttgtggtctttctccccaggaatccctggggttggcactgggccaagcccaggagcccttgcacagcttgttggaggccgctgaggacctggcccaggaggtacgaggccccactcatcctcaacccccatggaggcaacgttggcaggcagcctgcgccgggagggtctggggcagcccgggcacttcccttgggtgggttttcaggaggattagacagcgagagggagaggctgcccctggcccagtgccctgccctggttagggcttggaggtgggatcattgccagctccgtctggtaacctctctctagctcctggcgctgcgcagcctggtggagcttcgggcactgctgcagagaccccgagggaccagcggccccctggagttgctgtcagaggccctctgcagtgtcaggggacctagcagcacagtgggcccctccctcaactggtacgaggctagtgacctgatggagctggtggggcaggagccagaatccgccctgccagacagcagcctgagtgagtgactgacctcggtttcccctcttgggaagtggaactctgggcaggggggcagggcctcatggcacccccatcccaggccccgcctgctcggagctgattggagccctggacagccacccgctgtcccgcctgctctggagacgcctgaagcctctgatcctcgggaagctactctttgcaccagatacaccttttacccggaagctcatggcccaggtgggggcagcctggatgctggggtgggagggtggtggccagagcccatccagtaccctcagtccaggtgggccagggccaggccggagggtcacggaaactatttgaagaagtaggagttagccgatggagggggatcagcttgtgcggaggatcagaggcacacgcaggagcaaggcagagggggcagggggtgggcaggggtcctcagaggaggagagggtcatcagtggagggggtgctgtccacaggtgaaccggaccttcgaggagctcaccctgctgagggatgtccgggaggtgtgggagatgctgggaccccggatcttcaccttcatgaacgacagttccaatgtggccatgctgcaggtgtgcgggggtgctggggaggtgggatgtggctccccggtgaggagggtagacaggcccggtggatgggaaggtgggctccgtgcagacccccacttttttttttttttttttgagatggagtctcgctctgtcgcccaagctggaatgcagtggcgtgatctcgactcactgcaacctccacctcccgggttcaagcgattctcctgtctcaccctctgagtagctgggactacaggcgcccaccaccacgcccggatgattttttttttttatttttagtagagacggggtttaaccatgttagccaggatggtctcgatctcctgacctcgtgatccacccgcctcggcctcccaaagtgctgggattacaggcgtgaactaccacgtcctgctttttttttttttttttttttttttaagagatggagtctcactctgttgcccaggctggactgcagtggcgagatcttggctcactgcaacctccgcctcctggattcaagcaattctcctgcttcagcctcacaagtaactgggattacaggcatgcgccaccactcccggctactttttgtatttttagtagagatgggctttcaccatgttggccaggctggtctcgaactcctgacctcaggtgatccacccgcctcgcctcccaaagtgctgggattacaggcatgagccactgtgcccgacccagactctcactttcacctgcgccccccagcggctcctgcagatgcaggatgaaggaagaaggcagcccagacctggaggccgggaccacatggaggccctgcgatcctttctggaccctgggagcggtggctacagctggcaggacgcacacgctgatgtggggcacctggtgggcacgctgggccgagtgacggaggtgagggcctgtccacctgcggggtctgtttcagtggggagggcaggtcccatcctagtgttcccaccctggtgttcccagggggaggcgggcccggccctagtaagagcctgggatttgtagagatctcaggagggagccggccgtgggcctacgaggggaaaacatggcccagccccgaggtccagggggaggagcggagtggtctaggaggcaggcggaccccagcgcctaggactcacccccgcatcccacagtgcctgtccttggacaagctggaggcggcaccctcagaggcagccctggtgtcgcgggccctgcaactgctcgcggaacatcgattctgggccggcgtcgtcttcttgggacctgaggactcttcagaccccacagagcacccaaccccagacctgggccccggccacgtgcgcatcaaaatccgcatggacattgacgtggtcacgaggaccaataagatcagggacaggtcaggcgagggagggggcggggggatgagggactgggcggggccaagagcgtggtgggtggggccaggcagcattcagcct

SEQ ID NO: 18 - DNA, 59 bp, Homo sapiens
  source 1..59: mol_type = genomic DNA
ggtggccatagttggtctttaaataacactttttggtattccacaaacttctggaaaat

SEQ ID NO: 19 - DNA, 59 bp, Homo sapiens
  source 1..59: mol_type = genomic DNA
aatggaattgcaaaggaaatagacaaaattcagtttggaatcccttagttaccaccttc

SEQ ID NO: 20 - DNA, 20508 bp, Homo sapiens
  source 1..20508: mol_type = genomic DNA
ggtttttttcatgggtagaaaggataggaactctgaaataattagttagagaggaagaaagatttaaaattttgccaagattttgttgaagataattttatgtttaaaatcaacttaaaggagctgcaaggggccagacagattgaatttgttacaagttttatccttttctggagttcctgaagctcagaattctaaccaaatcttgcatctcactgtgggtgttttagtgtgccagctggaaaatgggatgaacaaatagggtccctatggcctctatcctgaggactctgttggaattgatggcaacatcagcctgcttcttattggttttcaaagtgagggaagaattcaaaaatcctaaatgctgggagcatccttatgaagtctggtcttttggttgggtctattgaagattcagactggtactgaaaggatttatcgcttgcatgtcagatatgtttttcctatttatactcttcactcctctctaccatgctctttgccccaggagctgacttttatagattgcatcaacagaatactttgtcttctgattcctggctgtctaacggtagacacatgtagatcattgcatgggaatggagtgaagtcagagtatttattcccttggtttcttctcttctgagttgccacaggttggcagtggttgtatttctccaccaaaggccacaactcccattgcttggccttctcttatagctacagttgtctctctatgttccagtaattgctccctttacctcttcaagctctgggttagtggcatccttctccactacactttgtcttagccaaaaggtcgagaagcaataatggcatccttgtgggactcctagggtacctcattattccttgttggttttccttaaacacttccataccatgataagcagtctttttattaaactgtcctcaactgtcttatttggctgtgccatattgtttccttctgtgacctgactgatgacattgggttcaggtgttgtaagtctgtttcttccattataaaggtccccattgacatccacctaatgatgttaataggttttgatgattgctgctagaaatgccaagcaccaattatgtcattacctaaagtatagcttgtacaagaaatagaataaatgtttgattatgtctctttattgatttttcagaagagttgatgttctagtaacctccaaagaagcctcccttttttcaaataatattgtgaattcataaatatgtacatatctggtgtgcttcgttatttcttttgatgctcaaattgtcccatctttcaccagcagtagccccctcatgctgttgcctttttgtcatgacctcaataggcttcaatagcttccttgctctgtggaacaatgtgatgtctcagattctttttatatatttctgctccagacgtggaaccaaacattactctaaggagccctgattcctttttgtggcaaatgctatttagagaccataattgggacattagggattctagtttctacaggattttcattgcttctacattttttcagtgaagagaattacaaaatgtgtacatttttagaaagtgaaaagcaaatcatgagtttatactgttagttccaaggaaaaatttaagattactgggtttttaacttattttagatgtgtatcccttttctcttaaatggaaaatatcctaataatattaacatattaataactgatcatttgattttcctgctttatatgtcatagtctcaaaaataacaatattattattaaaaacaagactattgagtgtagtgtaagatttctttgaggttatttggtctttaggatatattcctcaaagaatttaagggggttaaaagggtttcatttaaaaatcacttgaaatagtacttctgtggttgtgccaccaaactgaactataattagatttcatcactacaatctaatttaattttggttttgtgtaaaaattattctatgattctgaagtcaaaattatagaataaggtacattcagagagtcctaacttccttcattgttcttgttcacatatccccacatatttccttccccctcctctaagtaatatttctttattaattttttccttccattgtttcttattgaagcaagtgtgtgtgtgtgtgtgtgtgtgtgtgtgtgtgtcccaagaccttttttgtgccaaaggtggcaagctatacgtattttacttcaccttgctttttttggttttaacagtatatcttggagattacctacaatggtataaagagatcgtcctcattcttttcaacataaactagtccttcattgattagatgtagcatagtttattcaaccagtctccttgagggtcgtttgggttatttccaagcttgtgctactacaaatagtggtgaagtgaagtttttggtatatgtcatcttgaatttttcctagacttctagaaatgaaattgctggtcaaaggataaatacatatgtaatttttttaatgttacaaattcttctccagaaacattgcacttccaatgagaatgcctgtttcctcacaacatcaccaatggagtatgttgtcaaaccttgagattcgttttgcccctgaatgggtgagaaatagtatctctgtgtagtttaaatttggatgtgtttatcttaccatgattaagtagagcatccttgcatgtgcttgaggttcatttgtatatctatttttatagacagtctgtctctttaagacagaagagatttaaatgctcttcaaattatgtaacatgaatgtcttagtttcagtgccccagaggctgaccgtaagacaaggattcatgtgatcatgaattattagcaggtatttccacgaaaaggcagtatactaaatgaaaaatgggacaagaaaaagaaggaggctaagccagggtgtgacagcaaacaaggttccagagaatattgctctgggtcaatctcataggggagttatggagaccatgtgaaacacatctcagaattgtcccctacaggtggcaaggggggtagaatatttttttcttttcactgtctgtcactgattggttaagggctgctctcaggggacacaggcccccaggcatttccagctctttatatcgctgggcaaatcaggcttcaactgcctgagagcagtcatccaactaagaaatgtagatattggaaatgaaagccttcagggagctagaaagcatgaacatggcgaagagattgaagaggttatgggtagagcactggcggcaactactttaatgagtgactacccattccacactcacaggaggtcagcaccgtacaaaagagacatgtatcagggatgatttcaatataaatatccatgtccatgatagatgagacaatattattggcatcttatgtacttgatctgactttataacgatttgctaatcacatgtgttaaaagaaaattatgatgtattatgtacacccagttttccctagtcacacagtgttgagtcaaatgtctcctttgagggtaccttagaattttcactgatgcatagggtaatccctttgtgtgaaatcaacacccagacctatgttggaattaaaccagagttcccctgacactagcaagaggaataaacagagctttgttttctcagctaatgagagcaaacagttctatcccaggtggccttccttggaggtttttcaactataagataatcacacacaggccagaggtacagctcaacaatcctgaatgagaaaccaggaaaggaatagaacagaataccttgcttgaaactatcaaatattttagccagtggcaagaagtttactgacaaagcaggttttatctcttaggcctttgaccctggttttcatgttttgatttataggaggacctaaagagctctcagatttcaacatcacagagagcagaaagctgttcctcatttcatttattttattattacttaaaattagtgagtggaaacaggctacaggagaagagctaacatgaatggaaattgaccaggatgtaatttctccacatccgtatttttttcctcctcaattctaaacttgaattttgatcaattctggggtgaccgtcttatctggatttgcctgggattttcccaattttagcactgaaagtttcagacatagggcacactggaatggttgtttagccattttgtgaataattctggttatattactggtttaggacggggcttctcatggtaaactgcattcaaattccacgaatttcctgttaacatgcagattctgattcaacagggctggggtggggcctgagagtctacatttctagttttcaggtgatattgatgcttctggtccatctgtggaccacacttgaagtagcaagggtcaacggtagggataatattgatcctaagttttgttgcacatttcaacatttgaaatttaattttagtttataactacctttttgtttttttttttttttttttgagacggagtctcactctgtcgcccaggctggggtgcagtggcatgatctcggctcactgcaacctccacctctcaggttcaagtgattctcctgcctcagcctcccgagtagctgggattacaggggtatgccatgactcccggctaatttttgcatttttagtagagacagggttttgccatgttgaccaggctggcctcgaactcttgagctcatgtgatccatccgcctcagcctcccaaagtgctgggattacaggcgtgagcccagctaaaattaacccagctaaaattagcccgaccctagtttattgaactttgaacttaaggaaagaaaagccttggcctcccaaagtgctgggattacaggcgtgagccaccatgcctggccctagtttattgaactttgaacgtaaggaaagaaaagtgtttatgtgataatcatatttctttatgactattcatggtgaaggaaagagaaattaatgtacttgccaatagagcatttatgtttatgaaaaagttaaaggaaaggtattcaacatacaaaaaattagcattttaattgatgcaaaaattgtagattgcagttgttgctatatgttttatattgtatcatttgtttagtttccttttttggattttgaacaaattttgaacttgatattttcttagataattttaattttattaacatgtctgcactgccaattgctagctcagtcacacacaggcaccatctgtaccttcaaatagaattgtatgttttttatccttattacaaggacatatttctatatatttcatatataagatatgaaagtacttaataagggttcttcctaaatttgttccctcaattccatatctgaaactttatttatttacttttctttgggcattcttcccagcagcaaatctcctttaaacaacacatttcattggtgtcatgagatagctttgattccaggaaagagcagggcttattgttactcacttccattgctactagtaacatgaaaagcgacatctaaatccatactatgtttttctaatgagtttttttagagttattttttgccaagtttctcaactacagggtgtccactgttaatcctatttgatcagtttctattttaggagaagactcatagaacacagcaaatatttcatttattgaacctctcacagttatgaactatcttcccaaatccaccaacttcattggatttctaaatctattaatggttagtaattgtgtttgtgtatgtgagatgcatgctgtattatatatacaaatatagatatatatacatgcatacatatacatacagttagttaaaaatacacattgctcttggctataatttttaaaaacccaaataagtttattttattttatttaaaaaatttatactctaccttgtacttctagtacatatagcttgtatggctgcatgtcatcctaaaaaatagaaagcattagatgaaagaaaattaaataaatcagaggataatgtgaagctaagagtaaacatagaagtagaaacaataataacattcgcatctagagtgtaagctttagaagtagatatgatagtgtctaggagataacagcagaccaactgatcaatatattgaataggagtatttcaatgtaatatttcatcttgttccactggcatcagtgccaagaacaaactagtatttgtccagtttggaaagaactgaaagaaaacttttcaaagcccaaagtttctctcccactctcttcccatacctttctttctttggaaagaaaatgaaactttttaatcaatgaaattgacatgtagtttatatacactaaaatgcacctattttaagtgtatattttgattagttttgacaaatgtataaacttgtgtaagcgttaacagttaagatgcaaaacatttcccaaacccctaagtacacccccattctagtcaatactccccacctctagccccaggaaaccactaatcttccttctgataccatggattcgatttatcttttctcaaatgtcatataaatggaatcacagggtgtatggtttttttcttgcccggattctttccttcagcataatggttttgagattcagatatgttatgtgtatcaaaagttcatttagttttttactagtgagtaatattccattgtgtggatataccacaatttgttcattcaccaattgatgggaaagtggttgtaagagaaggaaatttgggtaaaagatcatgtaaatctattagcttggctttatgaataacagaagatgtgaagagagtgagattcttgctaaaatattctttaactcagcaactaaatctctgtcttcttttctgtctctgggcctgttgcttcttttgttaattagtaataattttattatataaacttaaagtactttagatttagttaaattctcattggcaaatcaaagcatgccatatttatcatctttggctcaaatatcatccctgagtggcaggcagatggcagactgtgttatcctctatcagttgaaaaggaaacccctggaagtaagttaatattttgggctttagcagaaagctgggactgaaactaggaacacaacatacattttcaaagcccaaagtttctctcccactctcttcctatacctttattctgaaagagggggagtgaacagaatagccaaagtactgcctccttcccctcgtccccaccccaatttcctcttcccacttcaacccaagcagcaggtctttaacctattttatatattgagcttctaagtaaaatttcatttgctgaaatatttctcaggttaagaaaactattgaaaacccattgaaccaaatctcataggaaaattaggattatttgttttaaaacacaaacttcagtgatataataatgtctttcacttacatggcactttctacttctttaaagagctctcacagacatttcatttagccagaagaataaagctaatcaataaatgtaattaattaagactatacattcacaaatgtcttaagtccaattaacatttaattatccttgttaatgggaaatggactgagtttgtgtgtgcaagatccacacacaagctaaaaacttaattacagcaagtggtttctaacttctgtctcatttaactttggctggaggtactaaaaagtacccatagtggttaaaaaattttttaaggcaatgtatataggttgcatttcctatctcttctacaagagaaaggtggtgaagtaaaataagaatattgagaacatgcatcttttaaacacacaaaaaataactttccaaaaaatgactgctagaatttgatatgatggtgacacatagttttaaaagtgacttaaaagtcttccaatgggcaaatactaaaacatcaacaacagtatagcttacctttgggcaactattgagatcaagaagacaggcaagccatgtacctaagcatggcaacaactggtcccaagttgcctggacagttatagttaatttttgttctggcataattgttaatagctccttctttaactctcagaagtgtcctgatttggatgataaattatatggtcatcctggctataaggaaacagcactgaaccatgactaagatgaaaaaaatattactttttcccatttttccttcctcaaaatttgagcatctgctcaaactggctttttttgtttttgttttttgagacagagtttcattcttgttgcccaggctggagtgcagtggcgcaatcttggctcactgcaaactccgcctcccgggttcaagcgattctcctgcctcagcctactaagtagctgggatcacaggcgcacatcaccatgcccagctaatttttttattttttattttaggagagacagggtttcaccatgttggccaggctggtctcgaactcctgacctcagatgatctgcctgcctcggcctcccaatgtgctgggattacaggcgtgagccactgcacccggccccagactggcttctttcattatctaaactatagatataatgaggtttcctctcctttctactaatttcaatcagtggtttgaaaacgtgggcattaatcagaatcactgagaagcttaaaaataccaatgtctgagaagaatcttggaacagttaagtcagcgtctctggaggtgggacgtaatcattgctactgattaaaagattcccagataattctaatatgcagccagggttgagaatcattgattctgacagtcactaaataattatttctattacaaaatacctggtattgtgagtgatgtatgaagtttaagatctccttggggaaaaagaatgtccctgcccaccatacttgaccatggcatacctttggctccatcctctgggtagccaaaggggctgctcattcctgttatcttcggatcacacaaagagtaataattctattttttcttccaaaatcttcattgtctgcaacgataatacagcaaagccaaatgaagacctcctttggcctgggataaaggcactttaagtgacagtgatagaggcatttgaagggaccttcaagttggccactcattatctaatggaagctctgacattctgaaagcttaggcaattgaagctaggtggcagtcctgcttagcaattaaaggagacaccataaagagaactataaagattcacacagaagaaaaccaaaaatgacttgccactgatttaacaccaacataggatcaacagggcaaaactaacttgctgtgttgtgcctttagatacagtcttcctcattaaagctcaggaatttccttaaaattataggcaactcttaaagtctgatgcttctaaataggctccatgacctctttacattctagtttaccggaagttaaccctactcccttatgcaaatgtctgcaaatagacactggtgaatctttaatcttctataaaatgaaagaatatgaggaagttatggagaatattgagaagcatctgaaatggtaatgcttgtgatacacaaaaccatgacaaactgtgattcttttaaaatttgtctataaagatgtttaccaaaatattcacagtgttcacctccaggtcagatgatttgtggggatttttatgttctttctaatacttttctgttttatttaacttgttttacaaaaagcgtatgccatcttatttaaaaattttactgtttttatgagtgtcaaaatgctgtttaactcactgaagtccattagtgattagataattagcagatcatgactgttttctgtgatgtctattctcagcccaaggcttgctatactttaattgatgattcctctaattaacattgttaatggatgacgctagtgtgtgtgcatcccagacaatcaatagattgtgcttatacttgctctaatttgaaaagctcaccagaagtagatgtttttgtttatttgctgctgttttagggaatacccaagatgaagatagggtctgttgagttgcatagatttcatacattttaaagtgtttaacaaactatcccttagatagaattttagaaattataaaagaaattgctatatcagaactaagagctcagaaagatttaataattcttctaaacacatgttcattaaattatttgagttaagcacagtatattaaggagtgaagttaggaatacaactgacagtaacagttgagtatcccaatggttgagcaacttctctcaaaaataatgtgtgattagatattgagtgagatttttctgtttccctggaattaaagttaaggcctaaagctgataataaaagactaaatagtaccctaaatctaagtttagatagccatctagagttgaggccagctgctccactgcaaagaatatgaactggaaattaaaaaaaaaaaacagaccctacccttcccttctcttagtatatactatgggagaactcagggagagtccgtgactctatatctgtaaagtaagccgttgtgacccttcaccattaccatcaacctttctctgattgccctcggggtgagggtacttccctttgtcaaaaccaagatgggagtttcaagagaatcactcatgaagttatagcctgttagaaaaggagactggaatttcactctctcattggatgtctccttaggccagactacttgctggactgtccctggaggagggaaatgagaattgggaggacgtggcaaggtagatgactacgaaacagagagggtgccaggaacaaactccacttaaattcatgtttcctgagagggccataagacagggcccacattaacaaaaagaaagtgcaactgggagcctcggtcctgcagcaccgctgcagtatgggaagcaagaggctgagtcacagaggaatgtgttgtgatagcacgagctgggagatctaaagagataatctagaatgtagcccagagatgggagataaaatctattaaagaaaaggttaaaagacatggtggaacacaactattcaaagagataatggataagaattttcccgaattgttgacaggcccaaacctcattataaaattcttataaatcccaaacaggaaaaataagaaaaatccacatcttcatatatcttggtgaaactgtgaattaacaaagacagaaaatatccaaagcaaccagagaggaaaagactaacaaacacttataaaagtatgaatgtcagaccaatagccaccattgaagccagaaggcagtggaatatctttaatattctgagattaagtaactgtcaaattggaatttcatacccacggaaactatatttcaagaacaaaaatgaaaaaaactttttttagacaaagaaaaataaaaggcttttatcagtagatcatcattaaattctaaaggattgtcattcaagcaggagaaaataatggcagacataaggtctgaaatgcaaaaaggaataataatggataaaatccaaattgagaatataaaaaaagtgaatataaagataataacatctaatctttaaacttaaaaataagatacaattaaaatacgggacaactatgtaagtacacaggatgatcatcagagataatacctgcaggaaacagctaccattccaaagacggggtgggaggggtgggaacaaatggaagtaattatcaggacctagaagcttggaggcaggaaccccagccttctaggaaggggtgctgcctggctggtgctagcatttcaggagcttgaagaggccctgcagagctgatcctcagacctctgaagaatgtgtactcttggctgctgctgttgtctctcaaggggcaagaacagtcagttgtgagaatgccaaagaaactggagataggaaccaacaaattgatgttgctggggcaatgttgccaggagcattatgcaaaaatgagaaagaatggtctcttctcctgccttacaatatccctatagggcccctgacttagtctgtgtagtgttgctatgaaggaatgcctgaaggggagtaatttataaagaaaagaggtgtttttgcctcacagttaagtaggatgtaaaaggagcatggtgccagcatctgcttctgatgagaacttcaggctgcttccattcatggcagaagggaaagaggagccatgatgtgcagagatcacatggcaagagaggaagcaagagagaggggagggaggtgccaggctctatttaacaaccagctctcatgggaactagtataaggagaactcactcattgccatgaggatggcaccaagacattcatgagagatctactcccatgacccaaacacctcctactaggccctacctccaacactggggattgtctttcaacatgaaatttggaggggacacacatccaaaccatatcattcaaccccattcccacatattcatgtccttctcaaattgcaaaatataatcatcctttcccaatagtccccccaaatcccattccagcatcaactcaaaagtccaaaatctcgtctgagactcaaggcaagttccttgcacctatgagtctgtaaagtcaaaaacaagttatttgcttccaagatacaatggtaatacaggcattgggtaaacattcccattccaaaatgaacaaatcagccaaaaggaaaaggtaacagaccccatacaatctgaaacccaacagtgcagacattacatcttaaagctctaaagtaatttttgactccatgtcctacatctagggcacactggtgtgagaggtgagctcccaaggtctcaggcagcctgactccatgactttgccaggctcagcccatatagctgctctcactggttggagttgaatgtttgtggcttttctagtctgaggttgcatgctgatggtggctctattaatctgggttctggagggtagggtcctgctcctgtggttctactaggcaatgctctagtggggactctctgtgggagctccaagcccacatttccccttggtatcaccttagtagagtctctctgtgggggcttcacagctgtggcaggcttcttcctgggagcccaagctttccaatacattctctgaaatctaagtggaaggcaccaagcctcctttactcttgcattctgggagccttcaggtttagcactaggtgaaagctgccaaggcttatggattgtaccctccagaaggccaagtggcctgagcagtatctggggccctttaagctgtgggtggagccaaagcagctgggatgtgaggagcagtatctcaaggtggtacaaggtagcagtgccccaggcttgtcccctaaaaccattctgtcctcctaggtctctgggcctgtgatgggaggggctgagtcaaagaattctgacatgcctttgggacctttttcccattgttctgactattatcacttggctcccttttagtcatgctgacctctttagcaagttgatgcaccatagcacccttaaattcctctcctgaaaatgctcttcccttctctaccacatggccaggctgctaattttccaaatttatatgttctgcttccatttcaattataaatttcaactttagattacttctttgctgccatatctgtttgtaagctgctaagagtagtcatgccacttcttgaatgctttattgttggagatatacttaatgctaaatgacgagttaatgggtgcagcacaccaacatggcacatgtatacatatgcaacaaacctgcacgttgtgcacatctaccctaaaacttaaagtacaataataataaaattaaaaaaaaaagaaaaaggggtcagttatgtagtcttcatcccttttatatttttctgtgactctttgaaaggactagcagacatttctgtaaagggccctatattcaaaactgtaggctttgagggccataagatctctgttgcaataaatccactcctcccttgcaggtgaaaacagcactagacaatatgtaagtatagataatatataagtgaatgtaagggctgtaagtgaatgagacccactgtattccaataaaattttatttacaacaacaacaacaaaaaagaaatttcttctgccagataccctaagtcatcactcttaagtatggctttccacaaagccctgggacatgggcacaattcagccaagttctttgctacagggtaacaagggctgcttttgctccagttcccaatcagctcctcatttccatctgagactttgtcagcctggcctttactatctatatttctgccagcattttgatcacatccatttaaccaatatttaagaagttccaaatttccccttgtctttctgtcttcttctgagccctccaaactcttcaacctctgcccgttacacagtttcaaagctgcttctacatattcaggtatctttatagcaacaccctgctacttggtaccaattttctgtattagtcagggtcctccaagaggaccagaactaataggacatatataaaacattaaaatgtataccatatatgtatatatacacacatacatacatacatgaaagggaatttattagggagaattagctcacacaattacaaggtggtgtcccataacaggctctctgccagggggagaaagatagaagctggtagcatggcccctagggaagctggtagcatggctcagtccaagtctgtaaggccccaaacctggaaacctgatagtgcatcccaattctaaggccaaaggcctcagagccctggggtggctgctggttcaagttccagagtccaaggctgaagaacctggagtctgatgtccaagggcatggggaggaaagggtatactgctctgagagacagagagcgagcaaaagaaagaagagcaagcaagctgaatacccccttcttcttcctgctttgttctatcaacactggcagcccattggatggtgcctactcacactgagtgggcagtcttcctctctcagtccactgactcacatgtcagtctcctctggaaacagccttacagacatgctcaggaacaatgctttaccagccatcaaggcatccctcaatggagtcaaattgacacaatgttaatcatcacatcccctctttggcaggtcctaacaaggagccagttggctgatgaaaaatgtaatttgcaggtcccagccccagcatcaccaagtggaatatagaagggtaggtttggagctgagctattaataactggaatgtgcattcagtaccagtttttcctgagtacaccattttaatctgtatattcaaggctcctttgatttcagcagtgttttcttgatttacatctatgaattttttttaattccattgtttggcccttagttgtttttttttcatgtgggctatagattggtgaaaagaaaccactccatgtacacaccatatggcgaaattaacttccagtttgtttaacatggcatatataaacctaacagtaggaaggtggctacacagtatagcttggctctgaattggtttcagaggtcctaactcccaccactaaactcttaacaggggctgccattgcccctttctgtacaagttggggtcctggtggatctaagaagctcaatttcatgtttgtaatccagggtaatactctgggaaaatactaataatgtcgtaaagatagctgtattttcctcattccaggcctaatttagaatcccaaatcccttctcctagtgtctgagaaaagaaatccaaataaaaacaaaacatattgaagatgaaaaacaatacagtgactagttttaagatccttctatttctggttctatttagagcccttgactaacaaacttgtcccctgatctttacctttacagatatcaagagtgactgggcacatgaagtccaattgaaggttgttttgtctgtatgctgatgcaaactttagttcacagaaaccttttggtctgtaaattgcattttgttttagggtttttgcttccctccatactgatgagtgttgtgggtggatttgtgagctctcactgctagttaagcatctgctattcatcatcctgatatagtcatcttttgcattttacttttcaaatggcaagcttcatcagaaattaagcactttttactagagacactatttgactcacaatctgacagattctaagcttaaagggaatcgcggggggggggagctgataataacatcagctacaggaagctgtcatgaatgggtttactaactcaactggagcccaaaatgaaaggaagaatatgaatattctcttgacctcactgtcttctggtgacactttagagctggctccatcaatttatattttcaattacacctgctttactggtccttcccctcacttatatttttacgtctatcctatattaaaaataattatatcctgcctcccacgagctgccaaactcactgcactcaaacttcttgaaagaattctcataatcttctcaccatttatccccttgaaatgtggatttcatttctgccacctttctgaaaccactcaccagtgtcacagataacctactaattctaaatccaattgctatatccttctttctattcctctccacctctctccctcttttgatgttcttaagcctctcttctcctgacttttatgacactgaagcctctttgttctcctaattctggatactccttctctgactcttgcactgattttcttcctcctcttgcttctaaaggctctccaagactctgtccttggttcttattttttctctctcttgaactttgatgaattaatcaaagtccattgttttacctacgaaacctatttctcttaatttagttatttcttcaagctctattcatatgtttacaacttcctgatggacattactccctgaataatccaacagcatatcaaactcaacaggtccaaaggtaaattcattatgtcctctcacaaattatctccttttcccaaaagctcaaagcctatctttgctcttcccagtatctaatcaattgccaaatttgtaagctctctgcctttgcaacattttcatctgcccccttattccattctcactaccactaccctactcccaatcctcacaatcattcatattgtcttttctaataaccttgcaatttatctttccctttccctcattcctttcctactccaacccatcatacccaacaaagtcaaattaatttcctgaaggagtgcaatgattactcacctgctcaaaaaccttagtagctcctacttctttttagttaagtgaaaatttaccatccctctgtttaagttcctctgtaatctatcccagtccatctatgcttggcttctaccataccctacaagaaaacggaattatttattgttccttagacctgtccccagattgtctacttccatgccttttttttcatgccactaccttcatctccgcttgttaaaaccctgaccaatattcagtataatttggacatcttctcttctgtcttctcttgtaaagacccggttgaaacttctgccaagagcccagctgaaactcccatcacagaaagtattatattgtgtatttgattatagttttctgtgaacttgttttatgtcactactcagactggaacctttatgttttattgagtaatacactgaacagtgtcagtgctccagataggttccttcagatttctttgccattttactatatgtgtccttcctccactgatttcaatgttctttgaattgccacctttcagtgggctcttctttgaaagctgccctcaggctattggagctattttgcccacaggtcagaggattagttctgagagttttcatccctcacctctacctggtggtgactgttaaccaatggctatagaatgtgggactttgaaagcacaactgtttgacttcaggatgatacaacttggaggcctcacactgcagaatttcctggcaggatcaggctgaagttacctcttgcagaatggctgccgaaattttgccctttcttcctctcctctgttcatctcatcttcataggaagatgagataggaatccatctttctgtctctcagggtctgctgcttgggaaacgtgactaggacaagtcatgtttttgagtacttgccatgtgtcaggcaccatgctaaatgtccacatatgtaatttcccttaatttaatcctcttaaccgcctggagagctaattattactctgattaatagatgagtgaactggactttgaagagattaagtaacttttttcaaggctatatagctaataagtggcaatgccaagagtccaaacaaggcttcagaggcagctcagtcaaccagtttgctatactccttctgaaactacttcatggaaaggagacttctaatatggccccgcatgagccctgtctcctggtattcacatccatgtacaattctctccccttgggtgtgagctggacctagtaatttgcccctaacaaatagaatgtggctaaagtgatttcacttccatgattagttatacaagactggcttctatcttgctagcagaacattttgctgcctttgattcatcaagttgctctgttggagaggcccatgtgacagggaattgagagtggcttccactcaagagctaatgaggaactgaggccctgaaacctgccagcaaccacataagtgagcttggaagtgagtccttccctgctggagccttgagatgaggctgcagccatagtcaacatcctgattgtagcacatgagagactctgtgccagggggctcagataagctgtgcctggatttctgacccagaaaaaataagagataataaattatatatatatttcatatatataaaatatcacacacacacacacatatatatatttgagacagggtctcactctgtcacctaggttgcaaccaccccctctggggttcaagctattttcatgcctcagcctcccgtgtagctgggactacaggcatgccataccggctaatttttgtatttttagtagagatgggatttcaccatgttgcccaggctggtctcgaactcctggcctcaagctatccacccgtctctgcctcccaaagtgctgggattacaggcatgagccaccacgcccaaacagagtgtggtattttttaaaagcctgctgcttggaaaacagagagtcaaccttgttattcagtgtaacacttgaaacctccagctcagtgacttaccaatagatgctaactaataatctatcacctctggtggttttatggtccaataaacttagctaggatggtggtgataaactgcttgaaaagcattaactttccaatgtgataggtacttgataaccttggaaccaagtaaacaacaaataaattaccagcgaggattgggtaaagatattattttaacgcatccaaaataagcctttggttttgtgcttgtttcaattaattaatcaatcgataagggacagtacaaattgggcaccagctggcttgttgctcaaccataagcaaagctgtgttcagtacctcccagtcaactgcatgtttcccaacgtgtgcctctctctgcccctgcatactcacccacatacagcacattgtcatgtaaatggaaatcaaccaaagatgtttttccaattctttattcctctggttgccatgggattacagatcagaagtcagagaagacagatgtaaaatagaaaaagatgcagccctccaactaccccagctgcctgaaagcatcctttgagtaggcaagaaaaggtaataatgagatggatgacattgagcgacagtctgtcactatgatggtaggagtagaagaaagctagaagataaaggcaaatgtataatgtcccttgacccacagagaaacctgcccaccttccgcatctttttcaaacagtggttggcaacaacttgggcaaccaactgtcctgatttgttggaaactgtcctcattttagcactgaaagtcctgtgttcctggaaatagctcaatcccagataaaccagaatggttggtcaccctagcaacaatcactaactcccaaagggctcagctcccattgatatttgctttttaattggaagagtcaataaaaagatatcttcttaaacttttctctttgaaagctgtaattatcctattggcagaatttattttttaaggtagtgccataaattctattcctcccactaaaaagtgaaaaaaatacattagaaggttttactaattttattcagatgttatatttgagctgaaaggtgggggaaggagacaggagagtgagtttggaggacagaaagctgtcaaaaatatggactaagggcatatttaaatttgctggtacattattaattgaagaaatcatttgtctgaatt

SEQ ID NO: 21 - DNA, 62835 bp, Homo sapiens
  source 1..62835: mol_type = genomic DNA
ctatactatgcctttcatattattctattccaactaccactagatccttcagagtcttgcccaaaatgagcacattattactaatgagcatagataataattagctatttctttgatttgagcatgtcttggactactggttgagtctttagagatatcaacaacaattagaagaggtaataaatctgagatttccccttattttcctgaggatctgttgcttgccacctcttttggtaccaatttctcaatcaggttggttattaagtagaaaagtcattcattaatagttctcacaattgctcagagccctggtaaattgagcttgaagccaaacttccaggaatagatctgaaaccatgcctcaaaacagacttgataaactactgccactgattgctagaggaagcctgcattgccactatccttacgccacatctatggcaggaactcaactttgcaatcaccagaaagctgctgtcattgtaccagtagatgctaggcacatctccaggagaaatggaagcaccaaagattgttgccttataaaccacaatctcacatggatgcatttgattgctgggtctaggtcacatctatgtacagtagttgcaagtggggctgtgaatttgagtttatactcttatgttggagtccaaaggccagggagcctggagttgttttccaaggacaggagaggaatagtgtgtcccagctttagcagatccacacattcatcttttctctgctttgttctttctggacccccaatagattggatggtacctgcccacatagagggtagatcttctccaccaagtctattttgactcacagctaaactcttctgaaaacaccctcacggacacactccaaaataatgctttaccaggtttctaagtattctttaatctcatcaagttgacacctaaaattaaccataacacacacaccatcccaaaatttaatgttttaaagcaacatttattttgttcacaaatgtgaaatttgggcaagaaacaatctgtttcattcagtgtaagcttggggatagaatcacatgaaatctcagtcactcacatgtctagcgactgatgatggctttcaggttgagactttaactgaggccattggccagacacctacatgtggcctgtccacgaagaaccaaactgtctacccccacacagcttactgtctacattaacctgactttactattccattgtctttgttagtataactttggtattccagtagactattgcccagaaagacaaaagttgcaagtaaaattattgttctttacaggagtttctgaaagttgtatcattcttcagtagaagagtttacatcgtaagattatttgagcctctagcctcaaaacgcttaccttgtagtatccaccaatcctaagatccttatcctattctaatcaagctcctgtgttgaaagactctcataaaccaaactcccagctctcaatatagcatcagactttgttctcctgttctgagactctctcagattccatgaagtatcactttaagcaatatattcaacttagtcttttcaatgtgttgttctggtgatatttgggaagccagcatttgacaccatgtggcctgggcttctttacaacatggtggctaagtttcaagagtgagtattccaaaagaaagctatgtagaagtgatatagtctttttaaagataagatcagaaatcacacagcatcatttccactacattccagccatggaggtaaccacaaatgttcacccaggttcaaggaaaaggggattagacaacaccatttgatgggaggaatcaagaattttcagacagatctctaaaccatcacatcccctaaactcaattaacattgtctacaggttcttggaaactgcaattttaggtacaatgcctaaggaagccaacttttccataggctaattgatataaacaagagtgatgagattgatataaacacgagtgatataaacaagagttcctatggcatacttctggtcacaaaaacatcaccaaacttctaaataaaaaccaaaacacatctaatattaaatatattgtcgtggggtggggggatggggagggatagcattaggagaaatacctaatgtaaatgacgagttaatgggtacagcaaaccaacacagcacatgtatacacatgtaacaaacctgcacgttgtgcacatgtaccctagaacttaaagtataaaaaaagtataattatcaccaattatttgattttgttcgtagaaccataccaaatttgaagaaaaatgaaatcaatgagaagctttgtttctaaggtttaaagttaaaagggcaattgcagttgtccaataactaaagataatttaattacttgttgaaaattattttgccttgattatctaggaattggtaatcaaaacataagagcatatttttgaaactgataaactgagttgttttctttttttcttttttttttttttttttgagatggagtttcacttttgttgcccaggctggagtgcaatggcacgatctcggctcaccgcaacctccgcctcccgggttcaagcgattctcctgcctcagccttccaagtagctgggattacaggcatgtgccactatgcccggctaattttgtaattttagtagagacagggtttctctatgttgaccaggctggtgtcgaactcccatcctcaggtgatccacccgcctcggcctcccaaattgctggtattacaggcaggagccaccatgcccggccatgaggttttttaacataagcatttcttatttcaaaaggaaggtagtagttctaaattttaattctacacctcaaatgtaattcattttaacattttatctgcatctgactgatttcatcaatgtaaaataaagcaggtggcccaattcaggcaaacatgtactgagcatctgttgaatgaggccttgtgctaggtgtggcaaagaatatagagacaagaataaatgctcatttgtggtttactaaacaagagaaccaataacttcagtggtgagatgtccgggaaaattttataagagttgctactgataagctcaattccactttctgctagggaagagagaaattgcataagaggataaaataataaaactcggttttggctgagttcccaaaggtggaggaaaaccagtaaattccaaatacattcacatgccagagtgaggcatcggacttgcaaagaggatggagcaaaagcaatagttttcaatccttaagatatcatctatcttgaagttacatcattggcttcaagatggccactcagcttcacatatgcctctgaagcttgggagactgatgtctaacactctcagagataaatccaaaagaaagtgaatatggctgatgctgaccctgcctgataacacattgagagagtactgcattagaagtgagatgcactttcgctttcaagcaacagtggggcaagggtgcttgaattttcccatgggccaatggaagggtggaattggaattctgcccacgaggattcaatcctattctgcttttctattccagagcctttccacacttactcccacaggctgagcaaagcgcctgcattgtttcaagtttttccctccatgtagacaatggatggatgctttatttctccagtgctcatgggcctaatgattcatgactgtgttagccccttttaccattttcagggcttgcaggaaaaataatcctaggagattcatacttagagcagaatgcggcccaaacacctggcaatcatgttcatcattctcattttttacctagatcatccttgatgccagagcaaggtttactcaatctgatggacatgccttttatttctcttggcatcacccacctctagatagtcataaaggatagcggatggcttattatgtcaagtatttctctcataactaaataaattatatagataatgcagtgtctgtaagtacttgaggagacttggaaaccttttacggtcatcaaaatgaatatttttctattcatcagcattcacaactattgaatctttatctgtttgtatggtttatactggggctttccacccctgcccccccgccattattatttctccacttggccattcctattcagagcctttcaccttttatctctgacatagcttggttcaagagcttaattttttttaaggtaccatgaccaagtcaatttatatcctgaagaagggattacatgattattcaaatttggcattgctacacatagaagatatctgtgtgatttacttacatttacatattgactttcatgatatctagcttaaatcttgacagatgaaggaacacaacagcagactttgggaaacattttttcaattaatagtacatttcgttatactgagggaaggattgaacatatacatttattattttagctcagttttgagatggtgtacattttttgcttgttttatgtttatactgccagtgtttgaaaataaatattcataattcctccttttttacacaaaagttacataggcactatattgtaacttggcatttttagttaatgatatattttagagtttgtagtatatcaggacataaaaagcatcatcaatctttttatagttgcatagcattttactgtgtggatgtatcataatttctttctttctttttttctttttttttgagacaaagtctcaaaagcctgtcgcccaggctggagtgcagtggcgcaatctcggctcactgcaacgtccgcctcctgggttcaagtgattctcctgcctcagcctcccaagtagctgggactacaggtatgtgccaccaagtctggctaatttttgtattttttttttttttttttagtagagacgaggtttcgccatattggccaggctggtctcgaactcctgacctcgtgatccacctgcctcagcctcccaaagtgctggggttataggcatgagccaccgcgcctggccatgtatggtaatttcttagacaaatccccaattgttggacactgggtagcttccaaactttcactattaccaagaaaacctagctacaacaaacaaccttgcctatacgttttcttatatatgtgtgtgcatacatgtatgcacatatacctatccagaggtagaattcctgagtccaaactgcatgagtaattttgatgaatattgccaaattgcctttaacaggagatgtactattttccactggaaatatatatgggtgcttgtttctttacagagagggccgtagtttttaatgaactcagtttttttttttaactaaaaacaaaaccaaaacaaaaaaaacaaacaaaaaaactcccattttagagtcccttagccagaatcaggctttactttctctgtgtggagccaagttcattatttcaattcacagacagggtaactcatgggcaaataggtttttttctaaacataggtcttaagttattacattttgaaacattttttttgatttctgctaaatttctatttacatgatacattttattttaactagtacttcttaaaaatttgatatatttgaaccatcaggacagagtggtggtagcttcacatggaaagataggcttatgtttatacataccataaaatttttccacttctttactcaaaaaataagggtcccttgagggctaaggattatcacagttgacctcactgtcagaaatattaccagtttgtgagatacaaagaacaaattacccttatacatttataatttatcattttgttttattacataactaaaaactactgaaaatataaaataactcatttaggaacaagtttttagataattcatccataaagaaaattcatttggtttttcaaagaaaaagaggaaaacaagattggtgataccattaacatattttgcttttaaataacgacatgatgttggtcaaaaatttataatgttttaatatataaccccatatgaccaccagaatttggggtcttccttaggtgtagtgtcataacaataactacaataactcacatttttgtggtacttatggtttacaaagtacttccatgtacctgataataatttcagctgtcattagttgtatatgatacacactagaagatattaatctcttttcaccaaaaatgagagaaataaaaatgcattatttacttaaagtcgaaaagccagtaagtggtaaatcatagagacagaatggtggttgtcagtggacgtggggagaggggaatggggagttattgtttcatgggtacagaggttcagtttttgttttgttttgttttgtttttgagatggaatctcactctgtccctagacgggagcgcagtggcacgatctcagctcactgcaacctttgcctcccaggttcaagtgattctgctgcctcagcctcctgagtagctgggattacaggcatgcgccaccatgccagactacttttttttttttttgtatttttagtagagaaggggtttcatcatgttggtcaggttggtcttgaactcctgacctcatgatctgcccccctcggcctcccaaagtgctgggattacaggcgtgagccaccacacttggccagagtttgttttacaagataagagttctggagatggatgttggtgatagttgcacaacaatataaatgtacttaacaccactgaactgtacagttaaaatggttaggatagttttatgttacgtgtatttcaccacaagaaaaaaaaaagctagtgaatgatgagcttgtgtttgatatctgtccaaccttttctttctactcaaagcagttattatcccggtgttacagatgaagggactaaggcctagagggactgaactgacttacgtcatgtaactatcaagtggcagagttggagtttaatataatgtaagtgattttacatgcagaggcttagcataggaagtaaaaataaaaccaagggatcaattaaccactaaggactgggtaatcctgggttaatcacttcatctgtttgggcctcagtttactcagttgtaaaataaagggactgatataaatcggaggtttttttaaagtcaatgtttttgaccatgactaaaagtaagaaatgttttatattgaccagtacacagacacacacaccaccaccaccaccaccaccaccactgccagcataccttgtcctaggttgggtttcccagatgtagatcttgaaatagggatttgagtacaatttattaaggatatgctcccaggagaaactggtactggaatagaagaaatagaggaaagaggaggaaaagggtagaaatcaaccaagtgtgagatttcaggtgaagtcctggcctcagccttattccacagggagccgtagagcataaaatacttcatataatttgatcagccttgaggcaagagagtgaggctttcatacttcatcaccagtcaatcactggttacaggctaccccaataccatgtaacatcccaggcattgcagctcatggtacttgtggtagccagtcccccaaaggtggcccccagtgatcactagctcatggtattcacaccttcatatagttccctcctacactacaccattgttggtctgtgtgaccaataaaatacagcagaaatggtggtatgttgggatgagaaggagggggaaaaaagaaaaataaataaataaataaaaagaaatgatggtatgccacttctgagattaaaatgtaaaaagctgtgggatccatcttggattctctttttcttgggtcactggctctgggggaagcaaggtctcattttctgagtagtccaatgaagaggcccatgacacggactctcatgacaaggaactgaggcttctagccaacagccagcaaggaaccaaggcctgcaacaatgacttgagtttgaaggcagattttccaacctaaatcaagccttgagatgattgtagctccagctgacagcttgagtgaaatcttttgagagaccctgagccagaaccacccagttatgttgctctcagttttctgaccctcagaaaccatgtgagataataaatgtttggtgttttaagtcactaggtttttgaaaaaattgttgtgcagcaatagataaacaatatcatacactgggttgatgtggctccaatagctgaagggtagttctctgaagagcttgaggggatatcgtgtaggagagtagcacaaagacgctggggaataggcagaaccagtagaagagacctgagtgacataagcagagcatccatcatatctgctattcccccaaaagcaaacatttcatgaaacgacacttattatatgtgatatactctgatattttttattctttttattaaatgataaaagagagccctcaaattgatttcataatacactaacagatgtgacgtccagttgaaaacagtgaacataatcatctttaaggccccttatagatctaaactgctgtaattaggaggtggcacagttgttataatgataactaacatttaataagcattcactattccagaattgttctaaacacttcacatagactgtcttacgtgaagacaataaggtaggtactattactatcctcattttacagatgtggaaacttgtaaatgtcagaggccaggagggaatccaggcattctgactccaaaacctattgtcaagagtgtaggcttctatattagactgtttgggttcaaattctgattccaatggttgatcaataaatgttttcagttatgatgatgatgtacccaattattagaaattcactgatgtggataattctccctattgtcaagagtgcaggttcctgtatcagaccgtttgggtctaaatcctgatgccaatggttgatcaatgtcttttcagttatgacgatgacatactcagtgattagaaattcactaatggggataattctcacaaaaggaagtttagggccagggttatgtacatcaacattgactgaattcagcagttcaacgcattgataataagttcaatgttctgctccgcttcagccacactgacccagtcttcactttaaatgcagccactcatgcatttcaataagaaggggccctggcctaggttacataacgtctgcatgctttaacagctaaagtacacttcactgtaaccaaataggatagaaggaatttcaacatattcatttttatgtattgggttcattaaagtgcactcaaagataattctctaacaaacaaacctaactaaaaatacactagtcaccatcatgtagaaagtattcctactaaattcagtgaacattaattaacctttggatttcaaaaatgggatcaataaacacggtacaattgactaaaaggggtaaaaattatttgcagaacctggacacctggaactatcatctttttggttaaattcctctgagccaagtctctatcaattatatctttcctttcacaggaataaagtatttatcacaggtattagagtcagtgtaaaagcacaacatccttttaataaaacattctcagtaatcaaaaattcatatacctccagaatgaattatttagagctggacacatataggggaaatgtgtcaggaggatatttcagcagctgctgtgttgtaaggtgacatggaagctttagaaagagggcagaaagaaaaaaaggtttaagtcctactttagatgctattggatgattatggattataaggaacaagactggttgcaaccttgcttagaataccgctagcaggggtaagacagttttctcacgttacctattttttggaaaaaaaaatcatttctaatatgttgctaaaaagggatttacagaggatgtcatatttctcaaaccaaatatcaatctcgatgacctaaaaattaacaattcaaaataaaactttttctaattataaaagaagtcacgcttttacagaacatttaataaatgtagaaaatgtaaagaaaaaacacaaagtgatgagatattggctcacgaagtaataattatttatatgtatgtatagatacacatctccaaattgtgtgtgtgtgtgtgtgtgtgtgtgtgtgtgtgtgtgtatctccaacttggcatcacactgtaagttcattttgcaattttactttttactttttaaatttttattgaccatccccactccctcctcccaactacctttcccagcttctggtaaccatcattctactctctatctctgtgagttcaattgttttaacttttagctcccacaaataaacgcaaagtttttctttttgtgtctggcttatttcacttaacataatgacctccagttccatccatgttgtggcaaatgacagtatctcattcttttttatggctgaatagtactccattgtgtatatgtgccacattttcttcattcattcgtctgttgatggacacttaggttgtttccaaatcttggctattgtgaatagtgctgcaacaaacatgggagtgcagatatctccttagtatactgatttcctttcttttgggtatatacccagcagtgcaattgctggatcatatagtagctctatttttagtttcttaaggaacctccaaactgttctccacagtggctgtattaatttacattcccaccagtagtgtacaagggttccctttcctccatattcttgccagcatttgttattgccttcttttggataaaagccatttaaacttgggtgaaatgatacctcattgtagttttgatttgcatttctctgatgatcaatgatgttgactactttttcatatacctgtttgccatttgggtatcttcttttgagaaatatctattcaggtctttcacccatttttgatcagatcattatatttttttcctatagttgttagagctccttatatattctggctattaattccttggcagatgagtagtttagaaatattttctctcattctgtgcgatgtctcttcactttgttgattgtatcctttgttgtgcagaaacttttaaactcgatgtgatcccatttgtccatttttgctttggtggcctgtgcttgtgaggtattattcaagaaatctttgcccaatccagtgtcttagagagtttccccaatgtcttcttttagtagtttcacagttcgaggtcttagatgtgactctttaatccattttgatttgatttttttatatggtatgagagaggggtctagtttcattcttctgcatagggatatccagttttcccagcaccaattattgaagagactgtcctttccccagtgtatgttcttgggaactttgttgaaaattagttcactgtagatgtatggatttgcctctgggttctctatttggttgcattggtctatgtgtctgtttttatgccagtaccatgctgttttgtttactatagttctatagaatgatttgaagtcaggtaatgtgattcctccagttttattctttttgctcaagatagctttggctattctaagtcttttgtgattccatataaattttaggattgtttttctatctctgtgaagaatgtcattggtgctttcattgtaattttattttttttttactttaaaaatattgtgggaatttccttgtgtcaaattattctgcttcaatattaatttcatagctgtatagaattccattctatgaacatagtacttgtaattcagttatctagtcaggcaagcagaaactactctgtatatctaatgcagaaaaggactcaatgtcttccgtttagtttctcaattcatacaaaaccacatccaggccatcaccaatcattctatatgacaaatgctctttttaacaaccccacaatatcgccccttaccacaaaatcttccttcagcttaacctttcccactctaggttcccacaccacccctaatcccgcttgaagcagccctgagaaacattgcccattatctctccataccaccccaccaaaattttcactgcccgaacacttcaacactattttatgttttcttattaatgtaagaagacaggaatgtcaggcatctgagcccaaggtaagcgatcatatcccctgtggcctgcacgtatacatccagatggcctgaagtaactgaagaatcacaaaagaagtgaaaatggcctgctcctgccttaactgatgacattaccttgtgaaattccttctcctggctcagaagctcccccactgagcaccttgtgacccctgcccctgcctgcaagagaaaaaccccctttgactgtaattttccactacccacccaaatcctataaaatggccccacccctatctccttttgctgactcttttcggactcagcccacctgcacccaggtgaaataaacagccttgttgctcacaaaaaaaaaaaagtaatttgctataaggtacaaaaagtactgaaaaaacacaaaggacaaaggtgtgtatcagttagctattgctgtgtgacaaaccaccttaaacttactggttttattttaaaaacaattctgtggtcagcaatttaggctgggctcatctgggtagttctctggtctcagctgaactccttcctgctggttttgggttgactttgcagattgtggctgggctcccttacatatttgagttatcagtggagacaagagggctggctagactctgatgcacatggtttctcattctctagcaggttaatctgggattattcccatggcaatcatagggttccaaaagagtgaggagaagatggtgagtccccttgaggcctaagcttagcactatcacaacgtcattttcactgttttctattgttcaaagtaaggaataaagccagcctagattcggagagagaagaaataaattttactttttatgggaagagctgcaaagtcacattgaaaaaggtcatggaaagggagagaaagaattttggctagttttacaattcattacagtatgttttacctagagaccagaaagctctactactcctgagctgggacccacaacccatcacttaatgctgatctgtgagtgatgctaacactgctgcttttgggggtgctgctcccactgagtaggaatacaggatgccatagctttactaatgctgttaaaactgccacagatgttttggaaagaaatggctgctatagtcactgttgctgctgctattactgctggagggatttccagagacagaaaaaagaagcttatttttctcctcacctcatagtctctccaccagtgcttcccaatagcaaacctaacaggaggctaattaggaaaggaatctgaaaaatgtagtttgtgggtttctagctccctgtgatacagagagaacattgaaagtataactgggagccaagtgaaaaattgctgcacaacaatataatgttttaaactgatctcctgtgtggagacacaacataagcgtggaaagcaaagccatcagtgggacagtttctgaatccagtggacaatgatatttaatttctaggagaggtatttaagaagggatatgttctccttcagctcagtgagaaaaaggtaatacataaaacagagcacctctaagtaactttgttctagacatccaagagcagatttgtgttcattataaagggaagaacactggagttctgtgcatgaggagcaacaattatatagttgacctcaaaaattgttttcttcacattatattcccatttggttgagatctgcagattattcttaagttataatttttgtaccttgaaatacacaaaaattttacttgcattgctctatataacagtagtcacagaataactataaggtcctgaaaatactttttcaaaatgtgtttttagggtgtagcctctatacacaacattttagaaatgttttaatttttattataaaaataattcttgtataaaatcaagtgagcgcctgcagaggtagaatttcttcttaataccatacagagatggtcatgtatgtttatcctgattttttcccataaacactctaatgtattttgtgattataatcactgaagtaggatattataattctcttctctaacttagaagttaaaaattatgtataatgtgttttgccttgtagatcttgagttttaatacagttaaatgtatctactattttaaaattgcgtcattgaattctatagcatggatatactgaaatttattttatcgtttgtcttcccatgtagagtacaaactcccttaggacaagggccttgtttttttggctcacagctatatccccagtgctaagaaaagtgtctggcaaatagtaggtacttaaaaaatttgtagaatgaacgaatatatggcaaaacattattgatgaatatttagatattttccattttcactattccaataatgaattttgcaattagtattcttgcagatatattttatacatgtatttatctttctagggcaattcatagagaaggaattactgggtcaaggaacaaaaccaaattaaagaactctaacccctctcaaattcgtcccatgttcaggaagtacccaatgtgaagggaggtggcacttatatttacaaacccagtctccctagctatcacttgagtgctaccactgaaaatctcacgaatgtagtcctgttactaagtggcattggctttttaatttgttctgttttggggaagttgtctgagtctcttatgtttctacctcatgttctgatccattcaactgtcattctgttgaaatgagaacagtaccttttgtccctgctattttttgttaagcaagctatattggctacaaaactttgtgctcccaatatctttatgaactttttttctaatctggctttgttaaaatcatcccattaacccccaaggctcagggtaaatccctatggaggaaaggtaagggctcacatcattcattttatgccaatattgggctatcctcagaacagttctaatcctctgacgctaaccaaggctccttgaaccaagttttcaaagctcagttctttcccatcttcagtcgagtgacttgcaaacatacccttgacaggtctagtctcagtcctgtagatgtttctgaatcccagggtaaaatgtcatttgggctgctcaggtagggatcctagaaatactcagatatattcataaatatagaaacagatgaacaggggtatgttcaaatttcatatcagcaagttttcaagatagttcagggttcccccccttaaatcctaaaactttaatattttaatctttggggtagaaggcttcctttatagaatattcttttctgattacaaatgtaatatatgatcatttagaaatgttcagaaatagaggaaatataaaatagagaaaataaaatcacctataacctccttcccagaggcaccactgtgaaaattttatacacattttcatccaaactcttttctatatgtttttacatagttaaagtcatattgcatatacttttttgttgttgtttgcccttttcttcataacaaaacttttcctttttgactacaaatgctcttcatatacatactttctaataattgtatattagtccactgtttggatataccacatattatcagggttgtgtgttttaaaagctgtcttgcaagtttactcagaataaaaagtcagtcatattttctttcctcacccagatccactcagtcctgagtgctgtctattctatttccaaacagtttatctgtcccagaggttttaatccaagctggaacatctgggaagcttttaaaaaatactgattgttggggtcctgccacagactgattcagtcagaatccctgagggatagacctcaggtattcacatacctaaaatctccccagtggattttcatatagccagagttgagatgaagtggtcaggccagccccttctctccagccccactgccacatccctaggtggagccctccctcaactcccaattaggcaagtgcaattacctcctaactcttttcctgtttctcgtctctttctctggcaacgtctcatccttcatactccttcccaagttactttcctaaaacacaggtcagatcacatagctcccctattgagagaccttccactgctccctactgcctacactggtgagtctaatttggcctgagcaaggccttctaccaccacagcccaacctatatttccatattttttcctcctctaggtccttgtattagtttgttttattttgctgataatagaatacctgacactgagtaatttataaagaaaaggaatttatttcttacagttatggaggccgagaagtccaaggttgcagagctgtatctaataagggccttcttgctgatggggactctgcagagtcctgaggcagtgcaggacatcacatggggagggggctgagcatgctaatgtgctagcttaggtctctcttcctcttcttataaagccaccagctcccctctcattataactcattaatccattaacccattaattcattaatctataaatggattaatcccttcatgactgcagagccctcatgacccaatcacttcttagaggccacatttctcaatactgctacattggggaatacgtttcagcatgattttgatgggggcattgaaaccatagcagtgttctagtgtgccttgccacttttcttagcgagctttctgcttttgttcaaactgccttttttcacactgttcctaacctgtaatgatctccttctccaatcctcaaagaacaccatcatagtattcatacttcaaggcccatttctaatatcatatccctattcaactagtcaacaatcatctattgagggactactgtgcaccattcattagttcaacaagtttttgagttctactgtatctaggtgctaaggagataagagtgaacaaaacagacagaaatacctttccccgtagaacttacattttagtaggagacacaggaaagaaaaaaacacctaagcacattttcataaataagaaaatgttagataagtgctatgcagagaattagaacgtatagtgactgggtggctattttggtttgaaatagcctctctgaggaggtgacatttataccgagatctgaatgacaggaaggaagggaccaatcattcaaagtttagggggcaaagcattccaaagagaggatcagccaatgtgaaggctctgaggtggaatgaagcctacttgtttgaagaacagaaagaaggccagagcagctgaagcacagatccaaagggggagtagtggcagagagagtcagagccagcttatatacgcttttgtggttgttgttgttttgtttgttttgagacagagtctcactctgtcgcccaagctggagtgcaatggtgtgatcttggctcactgcaacctctgcctcctgggttcaagcaattctcctgcctcagcctcctgagtagctaggattataggcacatgcccccacacccagctaatttttgtatttttagtagagacagggttttgccatgtcggccaggctcatctcgaactcctgagctcaagaaatccacccgcctcagcctcccaaaatgctgggattacaggcgtgagccaccacgcctggcctcatatatgctttctaagtcagggcaaagagttaaaatttgattccaagtgcaacgatgagaagccactagataattttaagccatagagtgatatgaaatggtttgtgtttgaacaagatcactctggttgttgtgtgaacaagagatagagggggtaacagtaggaggagggaccaggtagatgctttggtagcagtccagttttccttgaactacttgctgaatttgaagcaaataaaaagcaaacacttctcttactcttaggcaaaagattaaaattcttaatgtcacctaaaaagacctggatgggctggcctctctccagccttctctataccttcattgcctcctgctattgagccttgctgaccttccttcagctccgcaacctacatcattccttcaggccacaggacacttggacttgctgtggttacatattatttctgtgtgttataaaatacacataacatgcaatttaccactttacctattttaaggtgtacaattcaacattaagtacattcccactgttgcacaaccatcaccactatctagctccaggacttattcgtcaccacaagaataaaccccatatccattaaacggtgactctccattagggttagcccttggcaaccactaatctgcctatggatttgactattacggacagttcatataaatagaattatacatatgcatccttctgcatctggctttcgctcagcataatgttttcaaggttcatccaagttgtatcatgcatcagtacttcatctctttttatggctgaataatattccctagtgtagatatgccacaaaatagatttcattaatctacttgtcactggacatttatttaggttgttttcatattttggctattgtaaatggtgctactgtgagttgcttggtgatatggcagctgtgattatatattgatgcattatagatcagtgaatcttagacacgtgatagtttcctacagctgctgtaacaaagtaccacaagctgggtggctttaaaaaaaacagaaatgtattatctcacagttctagaggctaggagtctgacatcaaagtgtcagcagggccatcctctctctgagactctgggtagaatccttccttgcctcctcctagcttctggaggtgaccatcaatccttggcagtctttggcttgtagctgcatcactctgatctctacttctgttgtcacaatggccttctccctgtgtgtctttgtgttttcctatggccctctccctgtgtctcttcttttaaggatatgagcccttaaaagtgcttggattatgggcccccactactccagtatgaccttgtcttaattatatttgcaacaaccctatttccaaataagatcacattctgaggtactggggttaggacttcagccgcacctagcctggacttcaatatatcttttgggaggacacaattcaatccataatacatgacagacattactgtgcatctgactcccctggagatcttgttaacatgggcttggagtggggcttgaggttctgcatgttcaaacagctcttccagtggatgtcaatgctgccagctcagggttagtgtgactaatatgttctggtttgcgcaaggccttcctggttttagcaatgaaaatcctgaatgcagggaaacccctcagtcctgggcaaactgggatggcttgtcaccctatatatatgtcatgggccacaattggagagcaaggatctagctacaagctatgttaatttatctactaattacattactgaatattcatatttatctttatatttaaatggtttatttttgctagaacagtccaagttttcaagaatctggacctaagagatattccaaaaatgctccaaactgtgagacggtgagttagcttaaactgatgggtgtcttctgtgaatgtcatatattaactcaccaaattatctatgatgcttagcagtgtcactgttgggctgaacattgagatttctgacctctttacaaaataattatacatggccaagatcttttgatgctaaggatacccactgggcttgaagtcttcagtatcctttccctgctgctgcagcagttggaatcagcctggagtctgtaagaatgaaagagaaagctcctctctgaagttgggtttaagttcattgcagtatggggcaatgcccctcaactcttgcttaatattcagaccacctgaagagcttctaaaacgcggagctttcaccccacaccaaatgactccaaatagctgggattgggcacaggcattcataattgttttaaaacaccaggtgatgcaaatgagcacccagcatcgagaatcagtgtgccaagacccctttataacagacaccttgctcaacctgtcccttctttcacctgcacctatattccacccttgtatgcccacatacctttttgttatagttgacaatttccttaaacaggttctcctcttcctcatatttttgtcctgttcatacagttaccttattgacctgagaccacatataactggatagaggtaataattactcctgtaacaactgaccttagcaggcttttcccaagccttattgactctgtttttcactctttcacaaatatgtatccttaacatcatcatccacgattgagttaacctgtgatagtgttgctgtttttgactagtctcttagcaatcaagctaaatctcccactgaatctgtgtgttcctctacaaaccatatctgggtggaatgtacgtttttattgtgatataattaatatatcataaaagtcatcctcttaaagtatacaactcagtggtttttagtaattcacagtattgtgcaaccatcatcactatgtaattctagaacattctcattactctaaaaagaagccgcttacccattaaaagtcacctcattcctgcctcccactcgctgcaaccactaatctcttttgtctctatggatttgtctattttggatatttcctatacatgaatcattcaatatgtggtcttttgtgtctggcgtctttcgcttagcatattttcaaggttcatccacgttgcagcatttaccagtagtacttcattcttttttgtggccgaataattttccgttgtatggaggcaccgaattttggtcatccactcatcagctgacggatatttgagttgtttccaatttttggctattgtgaataatgccgctataaacattcatgtatatggttttgtgtgggcatatattttcatttctcttgggtaaatacccaggaatggagttgctagatcatatgcaaactctgttcaactttttgaggaactccaaattggttgtgaacattattttttgacctcaatgcagctttcctttacaggagggaggtggactgtacttgttagcgcgctgcaaatgattctcaggcatattaaacatttttctgtattctgttaaacattgtatgcgcagcaagaatgacgcctcatacagacctttcttgtcatttcgttttattatttcaaaatgtaagacaaatctgaaaaatggaggagcctgcagatacctgtggtggcgaggatttggggtctgtctgagctccggcgttcctgcccatccctccagctgtatctctggccacctgtctgttcctggcacaaacaaggcctgctggttgccaaggacatgactacggggccatttccatgtgagaaggccctggggggtgtcaaaatgcagaaacgtgactgatgggcagcggggcacccataaacttcccatagccaggtgcaggcatacctgcaaatgtaacgcccaactgtgtacaaagcagaaatctaaatgccagggcggactgggagaggttcccgtgacctctgacccggcctctaaattctcccattccctccccactgtcctgccgcgccccgtgtcgcctcgcctggcctcgcctggcctcgcctccctcctccgctgggggtctaagcctgcgcagtattgcgaacgcgggcggcgtttcccgcatgcgcagtcactgcccggcccggctttttcagtaggagccccgcgcggtgcgcgctcacgcacgcgcacggcctcgcctgcgcgctcacgaggcctctcgcggcacgcgcccccgccccgcgccgccccgccccgccccgcctcttccccctcccgcgcgcccgcccgccgcctgccgccgccgccgccgccgccggagctctgtagtatggcatcgaggagaatggagaccaaacctgtgataacctgtctcaaaaccctcctcatcatctactccttcgtcttctgggtaagtgcccacgccgggccggtggccgagtcgctgtccatcggtccgtatgatgatgctctgagaaaagaagtggggaggaaaacccaaaccaaaaatcaaatctgggacccctctttaaggagacaggcgcggggtgctgggtcggggctgcaggatggcagggtgcgggtcggggctgctggaaccctagacctcgctccgcgcaggctgcaaggggctgcggagtgtcggtgactgcaggttgtcgaccttccaaaaaaaaaatgttaatgcattagtttcttttataatctcccgggatagggtcagctcctggggaaagttgcgggtttattcgtctgttttcctcgctgtacacctttctctcccttcccctaccagccggttcgcggcgcctcttggagctaacctgtggcgggctaggagaggacacgggagcgtggggtttaatctcagattcccagttattcctgaccccacggggctgcgggagggaggcaccagaagcaccgtgcctgcctggctgggcaagggcgaccgaagtctcccaagcgcacgatggggagcaggcgttgtcaccgcgtggaggcgcacgaaagggagagggtcttacataagccgggggcatctttgaggtttcttggtgacccaagagatgagtctttggattcctttcccacctccctgcatccttacactccctatctggtggttctgtcactgcatgagcacaatccgcagcgccctggcagagggtcccctccacttggtgatagagatagcgccccaactctactccccatctatccagtgctgccgccggtccttgaagctcaatgcagaagggtgacgtcacccctcagccagggccgcggggggctgcgtggtgcacctcgcggagggatgcgcctttctgcgcgggggaggggggaggaggaggagggggaggaggaggaggaggagggggctccaggcttgtgccttacctcatcctgtttggcaaatcatggaatcagtgcagggctgacactgcagtgattcactgagagaggtgcgtggtacttaaagaccattccctgttatttctcttttcatgtcggtgaccccgtcttccctagttccttacgcccataatcaagctacagctaccccgcaggggaatgaatatcgaccctcttccccccttgtcccccaaatctgggtcattttagcttctacggcagtcattttgaaatctgaggctctgtaggaaaagccagttcaacctttgcttgttttcttcttgcacccctcacccccgcccctcacccaccaccatatattagccctatttttgctttgaaactggagcacagtgctgtatgaggtaccgagaatcagctagatggcaaaccggactgtttgcaatggtcaaggaagaagcagagatttattgaggatcaaaaatattcctaatgcacccggacatttccttatcgctggcgttggtggttcttcaagtcagggaaggtatggactccccagaccacacataccaggagctctgcaatgagctaggatagattaactggcatattgcacaaggcaaacacagaaacggactttatttggactgacaacgacacaggttgaaatgtctcagtagtggaattgtgagctatgcacagatcatatcatcttatgctctgcctgtaaaaagcagtaacacatgctgattgctgaaacttcccagtagccattcctgggaactggtttagctttttatgtgtttccttaaatctctttttgtttggccctttatcatttacttgacttcctatttgttactggagtgaatcatattgggaggggggaggtatttttatcttccttaaaaataaggttaacagtgcacatgaagaaatattgttctttcagaatcactgcaagctggtaaagaagggggtcttccaggctgaggcttttcatatgagcactttaactctccttgcttacattccacccctatgaatctaattacttaatgcccccaatacatcttaaacaatcactgcattttatgtcctccggaagttccttgatgccttcattttaattttttctactttcaagattttcatagtcttaaatgttaacctggaacattttcaatagtttaaataccaaagccagttctggctttggttgttgtaatcatttcatacttacaaccaaaagaataagatctcttcggatgtgtgaggatattttaaacaagacgttatttttaagtagccttattgaggcatgattcatatgccataaaagccacctatttaaagtatacgattcagtgagttttagtataagtagcacatattttagtatataagtggtatatatttctgtatatttagtatattcatagatatgtgcaaccatcaccccagtcaattttagaacattgcatcatttcacaagaaacctgtttctttagctgttatcccgtttaccccccaatttcaacttcccaccctcatgcccaccccctgccagccctaagcaaccactactttctgtctctagagatttccatattgcaggcatttcatataaatgtaatcatacaatagttgcccttttgtgactgtttttttcactcagcataattacttcaaggttcatccatgttgtagtgtatatcagtacttcattcctttttatggttgaataatattccattgaatgattatagcacattttgtttatccatttgtctgttgggggacatttgagttgattgggtcatttagctatcatggataatggtgctataaacattcatgtacagatttttgtgtgaacatgtcttcatttctattgggtatgtacctgggagttgaattgctaggtcacatggtaattctaagtttaattgtttgaagaactgccagcctgtttcacaaagcaaagcactccttccctttgaccatgaggattccaatttctccacatccttgccaacatttgttattgcctgacttttttattatagccttagtaggtgtgaaggtggtatctcactgtggttctggtatgaatttccctgatgtgtaatgatgctgagtgtcttttttatgtgcttgttggtcatttgtgtatctttcttgaagaaatatttattcatatcttttgaccatcttaagatgtggggtttttttatattaagtagtaagagccctttatatattctgagtacaagtccctcatcagatacatgatttacaagtgttttctcctattttgtgggttatctttagatggtgtcctttgaagtacaaaagtttatttttatgaagtccagcttacctattttttctttttttttgtttatgcttttggtgtcatatttgagaatcctttgccaaaaccaaggtcacaaatatttacctgttaaatgtttataagaattatctctcagttcagtaaatgcagttggtaaatctttcttcagcacttagaactatgtctggcacatagtaggtactcaaatatttgtcaaaacttctgggattatgctaggtagtttacaaaaagatgaccttactggtcttgtttgtttgtttgtttgtttgttcgaggcagagtctcgctgtgttgcccaggctggagtgcagtggtgtgacctcagctcactgcaacctccgcctcctggattcaagtgattctcctgcctcagcctgccgagtagctgggactacaggtgtgtgccaccacgcccggctaatttttgtatttttagtagagacggggtttcaccatgtgggccaggatggtctcgatcccttgacctcgtgatctgcccgcctcagcctcccaaagtgctgggattacaggcgtgagccaccacacccagccgaccttggtgttctttaaagtggaaggtggaggaaagattagacagaattatttcctttgtgttcgtgagttgttttaataggaatttttccctttcattaccttaatttagatttagaactagaaggcatttgaacttaaaatggtggtagagcagtagcatcataaaggttgacatacttgagcatatgttaaaccagaagtctacacttttgaaagagagattattgttttatctggctttctctcctgtctataatcacactctctctctgaggtgtttctctaaagtggtggttctcaaaagggggcagttttgcccccctcccatatttggcaatgtctggagacatttttggccatagctggaggggaggatgatactggcctttcgtgggtagaggccacagatgctgctaaacatcctacagtacatgagacaacccctcacaacaaagaattgccttgctcaaaatgtcaacagtgtaaccaacctctgcactactggacttacatagcagtaagtcctgtgaagaaaaaatggagcgttatgcaaaactgtatatttattggtgtttggaaccaccgtagcagagcatgcgcaacacaatcacgtgagaagaaaaacattctctattgtgtactatataattatttgaagacaaaaggtaggtacctctttatataattgtgtttgaatggatgggatgatttgtcttttggttaaataatatcacctgaatgctgtgtaaactgatccttcatttctcctgatttgtatgttttattttcaggtctatagaagaggagggaaaaacacacctaggagtaagttatcctgtgctttaaagactagcaaacaatgtcaggcttatagtaggtttactcactaaatacttatttccttaatgaatgaatgaattaatgaataaatgaaattttattgactactcttgggctcagttatttatttcaactcacctcaatgggaaagtttttttaaaacaatgttatttctagtctacctgtagtgatttaaatgtgctcctccaataaatatgtgaaaagatggaatagcagatttcacaaggacttgcttatcctaatgatagttcaatcattatatttttgtgatcagttagtttgtcagacattttggttatttaaatttttaattagaattttttaagcatgaataaaaaagatcttgccctatatatatataacaaaatatcctttcttcacaaccaatgtaactgtttcaagatcaagcaaagaaatgtaataaatattttgcttaccaggtgaatttttgttttatttatacatttttaatgtattttaaatactcatctgagttctaagctaagatttaaatccaccatgtgtgaagagaagttccccttgcttaattcaagtgtatattgggcctgatttcttgattatctaaggaggtaattagcttatcaatagtgctatcaaattcttctatgataaaatatcagcgatttgtttttcatttgagaaacatcactaatcttttctggaaaaataatttaaaacaatttttttttttgtccagaaagtttaggtacttgggatataaatagagggaaaagtcttaaagagcaactcctaacattttaaagagtgtttgaatttgggcactgtattagtctgttcttaagctgctaataaagacatacatgagactgtaatttataaaggaaaggggtttaattgactcacagttccacatggctggggaggccccaaaatcatggctgaaggcgaatgagcagcaaagttacatcttacatggtggtaggcaggaaagcttgtgcagaggaactcccatttataaaaccatcagatcttgtgagacttattcactatcaggagaacagcatgggaaaaacctaccttcatgattcaattatctcccactgggtccctcccacaacaagtgggaattatgggagctacaattcaaaatgagatttgagtggggacacagccaaaccatatcaggcacatactttagtttatagttattcttttgcacatcaatacaattcagtcattcactgaatgtctattacatgtcaggtattgagtagtcaatagaatgtgtaccaacgtttactagctgctgcttttggcattttacctgcattttaaaataacacatgtattctatttctcaacttttcagttttagatgttatgtactgtcttcccactatggaagatgaagatttagctctcttgcccttttctcccatacttgtatcttccctatattgtagtagaccctaatatatcattttatcattgtcatattttggttagagtggtcgtcagtgatttcattatgttaatgactaggtaaacctagtcacagctgagccatgtagtgtgtatattatgattacttgcatagctttttgttttctctacagttaagaattgccttgtttggtcctttgctttttagttgcgtgctcactcctaatttatccctgtactttccccaagatctgtttcttcactcagtctgttcaaacacttcatgtgtcatatcagattcttgttctcagaggcatttctcccaaagctttctgatcttcaatctggactagtattttctgggcctttgaaacagtggacatcaatatagtctcccttcaccatcatcctggtgaatcctgtctccttttacgttggatcctcggtttttgagatgtcatgtctttctcttccttggtgtttttttttttttcattttggtagagcaagtttaataattttctggaaaaaatgatgtattgggggttaattttttgagctcttacaggtatgaaaatcttatttttctcttgcacttaatttgatcatttggcttagtgtagaattgtagtttggaaatcatttatcctcagaatttttctgtttctccctattccaagtcttgttcttgttgttggtgttgagaaatcagatgttattctgattcttcttgaatcctgcttttcttctctgaaagttcttatgatctcttgcttgctctgaaatttcacaacaatatgctctggtatatgtctattttaaactatttcctgggtaccctttcaatctggaaattttctgtatacctttcaatctggtccttgagtttggggaaattttcttttgttttttgttttctttaccttcatttttttctgtcctatttggatgttggacctcctagactaatcctctaattttctccccttctattttctacctctttttcttcttgttctatttctgggagatcacttccactttatcttgctgctattgcatttttcatttgtttcatatgttaatttctagaagcttctttttgaggtctgaatgttctttttttctagcatcctgtttttgtttcatgagtgtaatatagttttaatatctctctgaaaatattagtaatttttttgagtttgcttcttcctgcatagtttccttcagactgttctgttttctggcatattacaggcttacctcaaatttctggtcatgttttgctcttttttctgtacgtgtttaagagggggcactacgaagctgattggaagctcttagcctgaagtacgtgtttatcaattgtaatttgggtgatttggctgggcagttgagttttaggaccaaggtcaatatctttaggtctcttcttttggtctcatcagatatcctacagaagaatcttctaattgctctctgagtaaagaaggtgagaatatagaagtctctatatacagtatataaacctttgcttaagctcctgtttccagtgtagaatccatgtccactgtgcttatattccccagttcagggaccatctctttcaccctccaaagaataaatatctgaacctatagtagaatgagtagaggccagagacaggaagttggtggcgggggtgggggtggggaatctaattgtttttcgaaaaactcttactggaacctacttattttagctcccctttcctccctacttccaggtgtgcatggagctgctaacccctgagtcttttggggatgtttgggtgcaaatattttattttgtgcttctctcacagctgccataagattttgctttttctcagctttgaagagatcattgtggttgtctcctctctttgttattgtaggttaaaaacattcttttagtgtcatttcagtggagttttgggagatagccagggtaaatggatgtgttcaatccgtcatctttaactggaagtcctttatatctttatctctacatcagatggtactaattaaatacccagttgattgtgagtgattgaatagagcatctaaaacagcaatagtcgggctattctaataaatattggtacccagttttcaatttttaaaaagcttttggatttcaagggaagtgttctaagttggaacagacttactaagacacatcctctgtaaggtcgtctggtcatcagcgactggacaaatggaaatgaagctctgaaggttgctgctgctttttctgcccctcttatttcttcccaccagatgaagtcccatgtgtcttctgacctaattcggaccttgctggattaatttagtgtttatagtgtggtgtgtgtgttggggagaggaccttgatgttaaactgattattgcttggctgtttttcttttactacagtgataacccttcatggttattatgggacttgtacattataatctggagttttttcttattttatcaacttaatttactatacgcaatatacagttaggatgtgtgaactaccttttataacatttggggaacattaagtctttttcacttagtcgttgcttagaaattagctgaattttggtctaaatagaatgaaatactcttctccattctaatcacaactagagttcttgatttgaccttattgtgagttgcattacttattcagtgattgttctttatatactgctttaagtaagtacctcagaaggtgctgaaaattgaaagtcattgtgactgtgtttctttgtttaaacatgttaaactcttgacatagatgactaatgcactgctaaacccatttgaaacacactttaaaaatatattcttatgtatttttctcctttagttccattacagcagcttccaatctgagttacctcctcattgcaagcagatttttggaatgctgctcttaaatttcttattttggctgttattccccttgccatgacagaatgattttcattcttggctgaacatttttttcatcttactgcagaaccccactattcatcaagaaaaggatgtagaggaaaaaggagagggttttctttgttttgtttttccttttggttatttgatcagttaaacaggtaagcattttatttatttgtttattgccttttgaaacatttattattttatagatttagggaatacaagtgcagttttgttacatatatatattgcatagtggtgaagtctgggcttttagtgtaaagcatttaaaatagtttaaacatcacattttgactctggaagattttctttggtgctttctgcaagatatagtgggattttcccatcatcatctgtttctaggagaaattccaggtgccttatactagaggatgatgagatgagtcagacacaggtactggtgaacagacataggtactagatcagtgattctcaccctgtttgcccatagaattgcctaaggggccctaaagaagatacttagaccccatcctaagagattctgattcaactggtctggacagagtgccagaattgatatgctaaaatatgctcccaggtgattcagctgtgcaattaggattgagaaacattgatccagggagaactcagtagataatagtaggcttggttcacttgagcctcctggatctgcaggtagctacggagtatctaacctagtactggcaatattaatttggtcttcgttgcctgagagtctggaaccaggcctgcagtgtctttcagtaaaccaaaatggccttgcactcttaggagaccatgctaatcattcctgactaaagcaatgtgtatcagaatcaccaaggacatttaaaaacacagattctcagccctatctcatagagtttaagttttaattgatatgaagagaaacctgggtgtgtgagttaaaaaaaaaaaatcccaaggtgattctgattcctgggatgtagctctatggggctgtgatgccatttgatataaatgagttcttacctcatgaatgctttcctatgatatgatctgtggtaccataaagctgaattgaggagagtattccagaaaacaagatgtagtcaatgtagcatttttcttacccacttaattggtctttggcaagggtcttcaagtgaactcttggagtttggagtagtttccattccttagggggaatctattttttttcacagttattctgagaagttagggaaaagtcttggtttgtcaaagacaaacctctgtcaaagagagaccataatccaacatgtaaaacaaaacccagaattcattacttaccaaagtaagagacagctgtgttaagcatagtctgtgagtgaagcagattactgatctttttgggaaacatagtggtgttttggttacagaggcatgagtggttgaacttgaccttagaagcatggctatttgagtgagactgttgttgattgagaagcatgttcactgcagtgtgtctgctgctgatttgctgaccttgaatcgtgtgaagctcattgtaattggcttccagaagtgtgttcctgaagcaagttgagttgtcattgatgattagtctgaggtgaattgccctcaatcaaacaggtttaaaagttggtgctggtggttactagttaccatggctattgaataatcaatctttttctcaccagtaatacagagacttttattcttacctcagactgctattcttcttagtgaaatgaagttgcttctgcacctcaattcccattcattcttcaaacatcatcatgatgatgtgtagaactcctggatcagttcattgttctaatcactccataaatacttgattgtttatgatttccagggattagactaggacttcccaaaggtagacccctttggggttgaaaaggaacccaaagcttgataagactgtggaaaatgttgctaaacatcccttctacatccccatctctatttgagttaaagttctgtttctggtgaagcttttgcggacttctagctcctccagatttctgtttcatattttgaactgtatcactcacttgatattcttttaaccattgcattctattgcagaggatttaaaattagacttaatgtgaagtctcggctagtacctttgctgtgtgaccttaggcaaatcacttattctctctgagccccagtttcctctttagaattgaggatatctatgattacccacctcagtcaagtgttgagggtcaaataacattcaagtgcattataaactaaagtgtgatacatatatattttggaaacattattccttagggtgtaaagtgtttctttcctagtttcttgtacatgggaggtactgtatcaatacttgttaaatgaataaattggtcagaatatgccctatcctggaaattaagaatgattcactttcagggttttatagtttgctaccaaagagagctgagttaacagagtggtttgaacaggaaccaaaaataggactcactgagtttggtcctgtcattgggataaaggtattcctatttaggatgaataaatataagtctgacacttacagtcaaatgaggaattggtgacttccattattctttttaaaataagcttttctttttggaacagctttaagtttacagaaaaattatagagatagtgcatagagttcccatatatcataccaccatttttccctattactaacagcttacattaatatgatacatttgttatagttaatcagtattgataaatttttattatcagaagtccatacttcattcctatttcattagtttttacctaatatcctttttctattacaggctaccccatattacatttagtagtcatgtctccttaggctccccttggctgtgacaatttctcagacttttcttgtttttgactgttaatagttttgaggactactgctgatgcattttgtagaatgtccctcaatttggatttgcctgatgtttttttcatgattacaatgtagttatgtgctctggggaagaagaccacagaggtaaagtgctatttcaatcatatcatattaaggatacataccaccaacattatttatcactgttgatattgactttgatcaccggggtgagataatttgtcaggtttctccaccgtaaagttgctctttcctcgcttctcatacggtactctttcaaagaaaatcacaatgcacagttcacacttatgtgaagagttatgttctacctccttaagggtggagtatctaccgttatctttattaacaaagatgattttcattcaacaaatgttaaaaccaacagtaagtatttgtttaaacaagtagtaaaatactaaaattatttgagccgatcagaaactggacagagattcttgtttaccattattatttatgacttggtttatctagcaaatgcagtaagaaaaaattaacattggagaaagagataaaattatctttttacagatgtagttgttgtaaactaaataacccaagagatgttaggaaaaaactactaagagaatttgataagatggatggatgtaagagaaatatacaataattaatttctttttattattttagcataagccttaggaaagagaggaaggcatttcattcacagcagcaacagaaatcataattacttcagaataaagttaataagaaaggcaaggctcttatatgaagaacaataaaatcctatcttgggtcataaaatgagatctgaacagattaaatgataccagatgttcttgggtggggagatttagtatcataaaaatatcagttttctaaaaatgtttttaatgtatttcccaatagaatactgacaggatttgggggagggggaggagatggtacttgataaaactgtattgtttacgtagaagaaaaaatacctgagaaatcaagagatattttcgggagggaaaggaagtatatgccttattatcagaatatactattgtggcaggtagactataagatgtcccccataatctcacctcctgatattcatgcccttgtttaatcccctctgcttgggtgtgggtgagacctgagactgtcgtctaattaatagaatataatgaagtgatcacatgcatatgactatgtgtgcatgattttattacataagattgtaaagtctatcttgctgaaagactctgttcctttctggctttgaagaatcaaacttttatgttatgaactgccctgtagagagggccacatgacaaggaactcagggcaatctctggctgacagctaccaagaaactaaggccctcagtaaccagcaagcaactgaatgctgccaatagtcaaatgatctgggaggcagattcttccccatttgtacctcagatgagactacagccctgtctgatgctttgatcgaagctttgcaaggccctgaaacagaagactcagctaagctgtgcccagatttttgacccacagaaactatgagataataaatgtgttttgttttgagcttctacatttgtggtaatattgttatggagcaatacaaaattaatacaactctaaaatcaattcaatatgatgtttgcttagaaatacataggtcggtggaacaataaagaatccagaaataaattctagtgaatatgatttaataaatgaaaaggagcattcatttcagtgagagaaactagatttaaacgatcctgatactacgggatatctatatgtgagaaaataaaattggagccctcacttagatgatatgaaaacttccaattagtttaaatgctcaaatataaaaataaaatcctatgagaaaatgtacataccatatgtacaaattaggagagagactgccttatgtaagctggaaatttggaagcaattaaataaaaaataaatgtggttataaaatttttaaaaattatgtgacaaaaggtacaataaagtcaaacagttgtagtgggataaaaagcttgtcagactattaattaatatactgcttccttcattcagaaagctttgtttaaaaaaaagtctgtttactttctggtacaaacttcttctcaatgtggactgacaacagtttgctgaccagacactggtttgtccactaaccacactttgggaattattgctctagagaagtggtaggcaaacgttttctgtaaagggccagatagcaaatattttattttatttatattgtgggccatatagtctctgttgcaactagtcacctttgccattgtagtgtgaaagcagcatagacaatatgtaaatgaatgagtaaggctatagtccaataaaactttatttgcagccagatttgacccatgggctacaatttgctgattcctgttctaggggatacaactagaaggaaagtccgatccttaccctcaagaattaaaatctaaagtttaatatgggcctattggagtgggaatgaagaaaggctcatgatttttatcttgaaagagctggtaacgcactgtctaataaattaaccgcctgagcacttcaaatgtggatagtccaaacttgggatgtctctatgtgtaaataccagactttaaagagttagtatgaacactgtaaaatatctcattttttacattaattgcatgttgaaatggtaatattttggatatagtggtttaaatatactagtaagattaatttcaccagtttctttttactttgaatgtgatttttgattgaagctttgtaatatgctaatttaaagttagatatgtgcctcttggacagcaatgaactgtaagagagagagcttgtggggctggggaatttggaaaggtcacgtggacagagttcacttggagaatgacaggattttgacaagtggttcttggagaggataatgaaggctatcagcagaatggtttctgtgtttaggacaggaataagtttagctgtaataaaaagtgaggcatgcagcaagtctaggtaagtagacataagccttattgtgggttgattgcatgagttagggttttgggcctgctttggccagtaggtgaagactagtccatacttttgagcagggagcagtaactttgggagctacactttgcaggccttatctggaagtagtaagttggttgggttgaaataggaaaagcaagaagtggtgaaaccaggttaactaggtaagaatgaaggtctaatatagggtgacaatgggaatgaagaatggaggacaggggacagctacttcatgatgtggcaagaatatttgtgagagagaaccccagtattctgtgcttaaagagcatggatgatggtgatactctcatgaaaatgcagaccttagaaaaagcgggtttgagactaatatgatgtgttccattttgcatgtgtttagtttgagacaaaggtagatttaaaagataggctggttctcagaagcttgtttgcctatatttttcattgatagaggtggccctaggaaattatttatttttgaccatctctatacttcctcaccctccccaccatctgccatggtcacagttgattgacctggagagcagatctgacctttaaatatttgtttgttgggtgttcagtggaacttgagataatcagccttgtaagatgtgaatggagaagttcttttttaggcattcaaactcaagatattcatgtcctttgtagggacatggatgaagctggaaaccatcattctcagcaaactatcgcaaggacaaaaaaccaaacaccgcatgctctcactcataggtgggaattgaacaatgagaacaatggacataggaaggggaacatcacacaccggggcctgttgtggggtggggggaggggggagggatagcattaggagatatacctaatgctaaatgatgagttaatgggtgcagcacactaacatggcacatgtatacatatgtaacaaacctgcacgttgtgcacatgtaccctaaaacttaaagtataaaaaaaaaaaagagacgtggttggtgtaggggcagaaggagaaagtgacccagagaagtagcagagacatgtgagcggtgaacagctggagttggaccagtgaactcctggtcactagactgtgtaggcccctggacagctctactgtagcccatgcttttcccttctggcctgaagagtggcttttcatagttgggatgaggcctggctgagtgggtatgattcctagccacctcatttcctcctctcttaaacccccttggctaaccaaaatgggtgatcaggtagatgtttgaagtggctagaaaggcaggattggaattaaaggagggggttggggtggagatacaaagttgtgaaaggccatatgttcatttaagaggcataagatagtaaatggtattcttttcaactgcacagtaagcccagagttctaaatgcagttaatgctgagttgcttgctgataataggtgtaataggtacagcaaagcatttggccggcagcattaatggatgcctacgattccagtagagacttgtctaagggataaaggttctcctacagggtaagagcaagttacttattaatctccttaacagctgctgctgtatttgggaagggaggctgcaggttgttttagtttatatccttcagagatgttttgaggacaaacaagtaactgcttggtatgttgtgtttttcaaaagatagccctggtatacagaggtggtagctagcctgagggttatgtaaatgacttagaacaggccgctctttgagtggtgcctcaatgagcactttggggggcttttttctcatctagatgacaaatggaggaaaggtacacttctccacatcactggaaattcagtcttttaaactaagatgttagaagtgaactctgagatatagcatgctaataattttgagagaaaaaaatacaggaaaagaaaggtacataagtgaatattgtactaaaaacgctgttcaaatgagctatctacaaattacatatataagcatatgtgtacatgtatacatatacacatatgtatgggtgtacatatgtgtatatgtattatgtacatatatgtatacatatgtgggtgtatatgtacacacatatacataaatatatggcaagccatttttgtaaagaaaacaatgcatgtaacaaatcctgagggggatccacatcaaatgttaacagctgtggttgggtgataagacaattaatatactacttctttctgtgtgcttttcttttccaaggtgttttccttcttttatatataacatgaactactttcataatgaagagaaccgttaattcttttttaaaaaatcagaattactctggacattttctagtatataattttatgtctcaaaggtagagtgcctttattttttaccacatcatctcatttgtaatgtagttcattaacccagtgcattttatggatttgattaaattaatgcaaggccgggcatggtggctcacacctgtaatcccagcactttgggaggctgaggcgggcagatcacatgaggtcaggagtttgagaccagcctggccaacatggtaaaaccccgtctctactaaaaaaaaaaatacaaatattagccaggtgtggtagcatgcgcctataatcccagctactcaggaggctgaggcaggagaatcacttgaaccttggaggcagaggttgcagtgagccaagattgtgccagcctgggtgacagagcgagactgtgtctcaaaaaataataataataataatgcaaagcaaaaatgcattaacttgatttttaagccttgtctcttcaaaataaagaattttattttgttcctattaggcatttaaattttttggtgatgtatttcaaatgtaatcctaaaacagagaacgatatgataattttctgtgtatctactaactaaattgtgtatctactactacacctactagatagtagattttggcattatgccttatttgcctcaggtattcagtttttaaagaaatatgaaaaatttacagttgatgcccctacatctcctcctctctgtcataaattcagagtttatcagttgggcttatttttatacacatattaacatttacatatctataatgattatacagtattttcatattttaaaactataaatgaatcatgccatgcatattgttttgaaacttacatttttgctcaacattgtttaatatgtttccatgtcgacagacctggctttagtttagaggctggcaaactttggcctgtgagctaaatctagccagccacctctttttgtaaataaactttatgtattgtctatggctgctttcacaccaaaacagcagagttgaatagctacaacagagactgtatgacccagaaagcctaaaatatttactatctggccctttgcagaagaagtttgccaacccctagtctagttcattctttgtgagagggtctccagtgtagcctattgaacattaaacaatttggcttttatatattttgtccccgttttccatacttagcaaaaaaataaataaacttaaggcagctatgggctctgttcctagatgttttatttagtggttttggagagagaagatacttttattcttgatttagtttttctcaaagtggattattattgcttgaagagagaaaagggctgtgtggtccatgtggagcaaaatgagagttatgaatttttctgtcagcaacaaaggagtaaccactgcatgcagttaactgtcttaggttattgtgatgttgttactacaattaatagctactactatgatcactgagcatttagtaaaggtcaaggatagtactaagcactccacatgcattatcttgtttattccttgtaacagtctattgaggaagtaattactcctcattttgagaggaggcagctgaggtccagagtgtgccccaaggtcgtgtttaaagtgaggtttcaacttggacctctccagccccactgagcccagtgcacgattccaggagtacagttctctggggtaaacctttgaagagatgggttagagggtactctgagaatccctgctgccccaagggataaattctcactgactccagccttggcttctaaaatctggccaaggcttgatgcacaagggagaagcctctgttttccgcaaaggtcaaagtttacaactgtagtggggatagttattccacatggctcctttgtagaaaacttaggccaggtccatcttgtcacattttttgctatcgtcccagctcaaaactttagtttctcaaggtttacatatagtggatgctggagatggtccaagggaccttaatgtcaggcccagtgctcttgcgagcaacttagcaactgctcattcactttcaaaggtttgactcttgtgttagtcggttctcacactgctaataaagacatacccgagactgggtaatttatgaagaaaaagatgtttaatggactcacggttccacatggctggggaagcctcacaatcatggcggaaggcaaaagaggagaaagacacatcttacatgcggcaggcaagagagagagcatgtgtaggagaactccctttataaaaccatcagatcttgtgagacttattcactatcacaagaacagcacgggaaagacccccccctcatgattcaattacctcccactgggtccctcccacgacaagtgggaattataggagctacaattcaagatttgggtggggacatggccaaaccatatcaaatctataaatatttcttctcccctttagtttatggctgctgtgggtaagacataagaaatcttgaagactttcatggggatagatagtcttttcactctgtcatttaaaacaaaattaccttgtgcctaaaactctccaaattgctggctcagacacctgggtattatttctcctgctgctgtgaaatatagtaagaatgtgaacttgcctcctatggctataagcccccaaccactttgaacaagacagaagccaaggcattaaaagctgctggagatgcagggtttacttttgctttgctttaaagaaacaaagctgaaagcaatgggaatcttcaggcattttcccatgagctgacactagctagacacagtaatctgcacacggacacacaggtaaggctcattggcacatggccaagtaaaagtttgtcagctgggatgatcttgcctcctctacctgaacctgctttcagaaaataatttgaccagtcacgtatactgcctatgaatggtaacaggaattcctgcctgtatcaggataattagctatattacctctggtgagaatttaaggtattagcattggagaaagtctcgttttaaaaaagaaattcctcccaggctgttaaaattacatcctatagatggacctctttttctgcttgtaagaccagctacacgccaacatcaatgacaataatttatcatatgttacaaatacaaagctcaacacaaaatgtttcttaagttatattagttaatgcacatgtattctacttctattactaccatcacaccaaactgagataccattctcctgtcccagatctatcaagtggcagaaggaagtgttatagaccctggggtctaactttaacagacctggcttaaatcgagtgttcatttgtaaccatgtcaatatttttccaaccctgctttggggcctctgacctccctttgcacgaggtctctatgattgtaaaggtttgactaataaggattttggaggatttgtattttaaaaacaatctatttgtaagatggggcattgatcagatagactgagaaagctgcattcagattaagtctaaatttagcagaatgtgtaaagttgtgttaccttttgtgtgaaaagtaaccccctacacctgctccagcaattaaagaatggagtttgtctttcttctctcactcctgcctctcacaaatcttttcttgtgtctattgtatccagttgcctcaactataaatcctaggttttttctttcagcctcattgacatcccatgaatcaccaagccgtggtgaatttcattcttagattaaattagtagctcttgcatccctttccttcttttcatctcaccactgttttttcattcacttggacctttacagcagtttcctggttttcctacctctagcctcattttatcccatccattctgttgaaatagttattttaaaacaatctcataaagccagtgtgataaaattggtagtttcatgttatctacaagactaagttcaaaattccatgcatgtgctgataaaagacccattatggtcctcactgtacttcctccccattttttagctttcattctggtcaccagctctagttcctctgcttagcgaatctcgcttgtcttcaagatttcattcaaatgtcacattttgtgggaagccttgccttttttgacacgctctccctgccactctagagtcattttctttcctttataccttctttgaactttgcccatccatcatagtactcatgttgtatcgtaatcatttgcttacctgtcagccttcctcaattactcatcgcatttattcaagaaatatgctagaaatattgagtgcctgttcaaatccagatgctgagatttaattgtgaataaaatgaacaagatgatctgtcaggaagggaggaaaatagacaataaacaagaaaataaatatgttaacttcaagcattgataagtgttccaaaggaaagagttcacgaggtgctggtgtgggagcctacttgatagagtcatcacagaaggcctctctgaggagttgacatttgagctgagtactgaaggataagaaggtccataatctacaattcagatgatgcagaattcagtgttttttgctatttgctgaccattgttaacctgatcgttctagttattgatatctgctgaagcacgtaacttagaagtcagtttatggttttggtttgctgtcactctccctgcgttgacagcatcgccagatttacctttctaatcaattattttagcatgaagaaacataaacctgatttttttttcttttttttcttttcttttttttttttttttttttttgagatagagtcttgctctgtcgcccaggctggagtgcagtggcacaatctcatctcactgcaagctccacctcccggattcatgccattctcctgcctcagccttctgagtagctgggactacaggcgcccacccccatgcccagctaattttttgtatttttagtagagacggggtttcaccgtgttagccaggatggtctcgatttcctgacctcatgatccactcgcctcggcctcccaaagtgctaggattatgggcatgagccacagcgcctggcaaacctgattttttttaagggagatatataaataatgtagtagaaatggaaaaggactgttttagataacgtccacatgggcattattaaaagatggccatgatttaaagcacttcattgttgatgcaattgtgattgggatgaactaatgaaattagggtgggccattctgccatttcctgaaactcacatgatcctttatttctctcttctttttccttatatctaaacttgaaaatttctccactcatttctcttatccaaattgatctctcaaatcatctcaaacgtgtggagttctgcttttcctagttaatgttattcaggtgtggacttgcatatgtataaatggttgtgtgtcttttttgtgtttgaaagactctttatgttgtgagagatgtgtaaaaggctgcaaaaatatttatgtacagtttagagaataatttaattaaaaatcacatactcacacagttaatctcccaggttaagaaagagaacattgtcagtactcccagaagccacttcagttcccctctccctctctatcatgttctcctcattcccctcttccctttcctgagaaactccatacaaacttatttaccatctccttgattttctttatagttgtaccacctatgaatgaactcttaagtggccaaattcttttctcttttttggtgtatttttgaacattatataaattgaataatactctttgtattttgtaacttctttcacttaacgttgtttgagatccatccatgttgctgcttggaggtatatttattctttttcattgctgtagagtatttagttatatgactataccataaattatctgttccattatcggacatttgggtggtcctcaatttgcttttatgaataatgctgctacgagcactcttttctttcctgttgaacgtgtgtgaagatatagatgcatctttaacttaatatgtaactgttaaactggttttttaaatggttgtatattggtgataattctagttgtctgcatcttcttcagcacttcctcttattaaacttctcaatatttttccaatctggtagatgtgctttcaatttgcattctctgggtaataatgaggaagtacatatttttgtttgttgcccattcttatatcagtttctgggccatatttcattttcccataagaggcatcttatttttcccctaacttctataagttgaaagatttttgattaataaattacatttttaagaaaattttttatttctataattcttggaatttttatataatatgtataaaatatttgtatacagataataattttaatacaatacaaaatatgtaattattcaatggatgtgatatagtttggagatttttcccctccaagcttcatgttgaatatgattcctcatgttggaggtgggatgtagtgggaggtgtttcgatcacggaggcagatccctcattaatggcttggtgccatcctggtaatgagtaagttcttgctctgttaggttcctgagagttcctgcaagaactggtgaaaaaagcgtggaacctttctcccctctctgttgctccctcttcttgctatgtgacatgggggctccccactgccttccaccatgtgtggaagtagcctgagtccctcaccagaagcagatgctggtaccatgtggtaccatgtacagcctgcagaaccgtgagccaaataaacctctttataaatcacagagtcttaggtattcctttatagcaatgcaatgcaaatgaatgaatacaggatcactcatagtgttctgactgatcttgtttctttgcttctctgaatcttgcagcttatcaccaccaactggaatcttggcctaggcattttcttttaagtcctaaaaatgcccagtgagccttctttactaccttcaagtcccctcagtggctcagagacctggcattggactagatggattactcagatttctttcaaccatcatttatgtgtctgataaagtattgtgtcttttgcttcacctcagtttgcagaattgggagtttttcaatatttgatatcaggaaggctttgaatatttttcatctaatttcttttgggggttatttccttggaatatattcccaaatgtggaattataaaacaatgtatttcttttaacctggtatgtcatatgttaggagatgaaaagattaaatgacctatttgcccagagtctgtcccacacaggggcttatttaaactgcattttgttagtttaatgagtagtatagatttttcttttaatttgactaaatgttgaactcagggacttgaatttttaaaaagccgatttcttgaaaaatcatttattgaaagtctaatgcatattttcattatgtcctcagagtatatgatcaattctttaattcttctgtgttctactggaacaaatgaccaatttatgaagttgttgagagacttggtcaatggcaatgatttatggctacaaaacttgagacatgagtataatgatgactcctggaaaaatgtacttgagatgtttccagattagcatgtgctctttagctatggaggaaggcattgatcatattgattacctatatttgaaagtgtcctaaataacccctcagccatgaatattcttcattttttccctctctgccagtttgttacctttcaccaccagccttagctgactttacataataggttttgtaataagtgtctaatgcaaaagttttcaactgggggtggttttcccttccccacaggggatatttgacaatgtctggaaagatctttggatgtcacaactgaagaggaaaggtgcaactggcatctagtgggtaaaagccagggatgttggttaagtatcctacaatgctcaggatggccctgcacgacaaagaattatgtggcccaaaatgtcagtagggctgagactgagaaaccctgttttagtggaaataagtttttatctttccttacattttctccccattcactgttattttcatgttttgtcagtgaattatcagttcacatttatgatctgtggagctctaatatgattgtttaatctgctttgttgtggagagtctatatatgtacacatatacacaataaaatttgccaattttaagtgtataatttgatgagtgttgacaaatgcatacagttgtgtgaccaccatcataacagtgtttgatatgtttaaatttcatgtagtttccaatatgcattcattaaataatattatattctaggacagaaggaaacctgaagtaattcaggtactgacaggtagcttgtgactgataggtagaatatacatggtaattaatgaaggataacacccttgaactgacttctgaattttaccatattttaatattaatctaaagattcttaattttacttggacatgatttgacccctggatgattggctgagaggagtttctatattgtgaaacaggaaatctatattaacatctctcataaaatactgagttttatgtccacaaattcctagattctctttgcatcttctaggtcttttttattcctgcaggtataaaacaagactgagtgtttgaagggaaaaacagaatatatacttctttcctaaaggataatttccagaatgttggttgctttggtagttgaatttaaccttggtaagtagtagcagttgtctgcagtaaagtggatggaaacccttgattccattgctgaaccaccttcttagagtgagaggtttgtcttgaccactaattgctataattggagcttgagagatggtttgagatgagtcttgaaatgataagtgtgtctatctgcttggcaggtgttttctctttccttttaattccctttccaaatcaaggtggtatttgtagtcaaggtttcatagggagtttgctaatgcgtctctaggagaaacatagaaaagctagatagaagggtggtctaacttgatttgtgtcctcatcattgtggtgtaatgagaatataccaatttttgcatgatggcaaaaaatgaggtaagcactggagcactgaaacatttagaggtatttaactacatcttaatactataggctatggctcagaataaccataggaatcttgctgtttttatttgtgggtttattttaggcaaactatcaacagtgctgaaatgatactctgtgaaaaggaagaaagaatgtacccacaaatttaaaatgctgtgcttgctggttttcttctcttagccttatccatcaatcaagaattgttggagaaaagtcacgttgaataattctgccagttccactatgtaatcttgggatgaattgtgtcgctctgcatggtaacctcagtatttcataactgaggatgaaaatggtttttcaacttgagaaaaatcaggactcttttggaacaatatttcaaattccaataaaagactattttttgtttggatgttcatcctctgtcccttcttccttagcctcttagcccaaggtgctatttttatgtactggcagtcgagttccagaagtgagtgtcttatcctgaagtgctattttgaaatggccttattctattttttgaaagaaatgactaataaaatgatcccagtttatcattgtaatggactagaatatgaacaaaaacctcaggcatttaaattcccatttgtctctactcttcttcactgcgtactcttctactgtttactttcagcatgcttcttgacatggaagccattttgctaatggatctgtggctatttcaccccaggtcgcagccaggttagcattagaaggatggattggattttctgagttcagaatttctatttggtattgctcaagcctttagttgcttagccacttcaggccacaatttggtgaaagagcttaaagagcagtgcaaaactttcaaaacctggggtgtgagacagatttggaatcttgctgtaccagatttgtgtcctgatatttattcgatcagaattttctcgtgtctttaaaaatcctttaacaataccattaaatggccatgtattttttcatcctgaggttcatttatttagcaatttccctactgttgcatatgtaggtgtttccacttttttactaatataagattatgattagtagcacttaaatctttgtcttcgcatttcattatgtgtttaaactaatttccttgtggtagaattaagcatgaatatttttaaatattgaaaatttttgctagaagagctttctcaaaggatgcttaccaatatgcccattaattgtataagaaaatgtgaatcacaacacactcttgccattgacaaagatttttaaaaatttggaatgtatagatttaaagatggtaaatgatatataccttttatattataaggtgaaacttaaatatttgtattttatgaattttctgttcttttgctctttttctaccttctgttagtggtatttgattgtttcattagaatgtttatacattaaagctaccaatccattgtttttgttgcagaaaaccagatttatcattccccccttaatttatgaggtagacgctaaatacattatgcgtttgataaaacataaattcatatatagctatgatgctatagagtaggttgacgttaatttccatttacttctctataaagacctaactggtgataattctaaggtattgtgactacaaatttctggtctgatctggattctacttttctccaacattcttatgacataaccccttgcatttctgcaaaataatatttggtcataatgtattatcctttttatgttgttggattcgatttgctaaaaattttttttgtgacttttttttgtgacattctgttgcccaggctggagtacagtggcatgatcatggcttactgcagccctgacctcctaggctcaggcagtccttccacctcagcctcctgactagctgggagtacaggtgtgcactactatgcctggctaattttttattttttgtagagatggagtctcattgtgttgcccaaactggtaattttgctaaaattttaattagaatttatgcatcaattttcatgggggttgttggtgcatagttttcttataatgttgttgctttttgtaataacagaatgctggcctcataaactgaattggtaagtgttcctttttattctgttttctggaagtgattacatagaattggtactggtcttccttaaatgtttcagagatttcaccagtgaagccatctgggcctggagttttctttgtgggaaagtttttatctatgatttcaacttctttagtagatatagatcaattcaggttgtctggggttttttgagggagctgtggtagtttgtgtctttcaaggaatcagtccatttcatctaggttattaaattttttcagcttttgtatatctgaaaaaatttttacctttgtttttgaaagctatcttttgctagtatagattctaggttgatagttgttttcatttttgtattttgtattaaatgtattggcataacatttttaataatattctttgattatgcttacagtatctgtagaagctgtagtgttgttacctttctcagtacttacattggtaattcatgtcttccctctgctttttcaaatcagtccaactagagatttatcaagtttgattttctcaataagcaagttttttatttcattaatttttctttcttgttctttcattgtcttattgtattgattttagctctgatctcattttgttccttctacttgctttggaatcagttttctcttttttttctgatttctgaaggtagaagctgaagtcattgattggagacctttcttcttttcccatatagccattcaatgctataaatttttccctaagtactgttttagctgcatcccaaaatttttgatatgttgtcttttcattttccttcagttcaaaattatttttaatttctcttttgatttttttctttaatccgtggatgacttggaagtgtattatttcattttcaaatggagatttttccagagatctttcttttattaatttctaaattaatttatttgtgggaagaacatactttgtatgacttgaatcctttacagatttattgggttttgtttaatagccaagaatgtagcctatcttggcagatattccatttgtgctagaaaagattgtgtattctactgttgttgggtggaatgtcatgtcaacattgataatgtttaaacctttcatatccttaactaattttctcaatacttgttctatcaataaagagagtctttttgaaatctccagttataattgcggatatgtctgtttctcctgacagttctgtaagttttgctttatgtgttttgaagctgttctgaagcataatgtttaaatgtttaggattgttatgtccttgtgataaatggagccctttatcattatgaaataagcttctttatccatgttaatattctttcctctgaaatgtattttgtctgatattaacataacaacataaccactccagttcttttttgaatagtgttagtatgtgtattaatctgttatcgcactgctataaagaactacctgagactgagtaattgataaagaaaagaggtttaattagctcatgtttccacaggctgcataggaagcatggctggcggaggcctcaggaaacttacaagcatggtggaaggcaaaggggaagccagcatgttctacatggctggagcaggaggaagagagtgaagggggaagtgctacacacttttaaacaaccagatctcatgagaactcactcgctatcatgagaacagcaagggggaaatccgccttatgatccagtcaccccctgtcaggcccctcccacaacactggagattacaattcaacatgagatttgggtggggacacagagccaaaccatatctcttcccactccaaatttaaacctatttgtacctttatatgtaaagtgtctttcttgtagccagcatgtagttgacccttgctttttaatttaatctgacaatctctgccttttaattgggatgtttagtctacttacacttaatataattgtttatatttttaggttcagatctattatcttgccatgttttctatttgtcccatcacttctttatttcctttatctcctttattttttatttttatgattctattttatcttacctgttagcttattagctataattctttattttgtgcttttatttgttgctttatggttcatagtatacatatttaacttatcaaagtctaccttcaagtgatagtataccaccttgcttatagtctatgaaccctgtgatagtataaaatacagccatttctccattcctagcctttttttctattgtttaatacattttatttttatttctttttaatttttgtgggtacattgtaggtgtatgtacttatggggtaccaccacactccattgttatttttgtgtagtcagttatattttagatatttaaataagaaaaaataattttatattttcccaagcagttatttcagtgcccttcattcctttacatagacccatatttatatctaatatcattttctttcttcttgaacaacttattttaacatattttatgattcactgataattttttcagcttttatatatctgaaaaaatctttacctttgtttttgaaagatatttttgctagtatagattctaggttgatagttgtttttatttttgtattttaaagatgtttctcctagatttttttgcttatattgtttctaatgagaagtatgtcatccttatctttgttcttccatatgtaactttttttcccctctggtggtttttaattttttttcttaatgatttttagcaattttttaataatatatcttggtatagttcatgttttgcttggggtttgttgagcttcttgaatatgtgggcttattgtttgcataaaatttagaaaattctgaccattaattctataaatattttttctatcccacccttttgtggttccttttatggaaggatggtatttagaaactaggggctgggtgctaggtatgtttgttgccactggagtgtcattgcttcttggccctagcaacagctaggaaatatacttgagtgtaataactgtgcaaacacacgtctatatttatctgctatgttttaaaagtttgtcccctccgaaactcatgttgaaatttaattgtcattcagtattaagaagtgggacccttaagaggtgattaggctatgagagctctgcccccataaatggattaatgctgttattgcaagaatgggtttgttatttcaaaagtgggtttcttacaagaggatgggtgttgcttccttttggctctctcttgccttctctttgccctttgccatgggatgacacagcaagaaggcccttgccagattccagcaccttaatcttggatttcccagcctccagaaatgtgagaaaataagtttatgttttttataaattatacagtctcaggttttctgctatagcagcacaaaatgaactaaaacattttctgagtttctctttttctatccatctatttatctgtccatctattcattcatctataaaaactatgagttcatactgaaacctctgattctaatctaataccacatggttcattatagccttctttctctgatagtgagaaacctggttttcattatctacaatatatgtaaacatgtgtctgtatttctttaatccttgtagacatggagtattttcagaactgctaacctgtacccttgtaagaaacacatttactaactagagtagttctgggtactgtttttttgtttgtttgttttttgtttttttgtttttgtttttgtcttaaaatgcagtagccagtagccagtcatgatgctgttttatacagttaataaggttagttcttttcttccccactctcttcattatggttacattattcacttgtgatataattaggttctttgttagtgtttatattccattttgtccccttcccccaaacacactgggtgattttattactgacttatattttcagtacattaaacatgacaatgcttctcagagtcagggctatacaaaacagtatacacagaagtgacatttcctttttgttcttagcaccccttcccatccccttgctttttcatccctttctctattgccttagataccaatatctttagtttctggtttattcttaatgtatttattttgcacaaatgagaagatacatgaatgttttcattcttaaatgaagggtagcatactacagatacttttttgcactttgctttttaaaaatgtttacacatttatagaaatacaataaaatttgtttttatgcaagtaaaaattgtctatattcgaagcaaacaatgtgatgatttcatatctgtgtcattgtataatgattgccatggtcaaattaattaacatatccattatcgctcagagttaccattttgtgcatgcatggagtgggtggcggtgaggacacttaaagtctgtattttgccttttttacttctaacagtttatcctacaaatcatttcatatcagtttatagagatcttcctcttccttttttttatagcagcttggtactccatcatgtaactgtatcatagttaaccattctcctatttatggacatttaggttgcttccaatattttgtaattgcaaactatttttaacgaataatcttgtacatatgtatttttttattgggggtgctttcttagtgcagattcctaaaagtgggattcctgggacaaatagttctttttgtccctccatttgcttgaagaatttctgatgtgtatcagaaaataacaacttttctttgcatttcttttctcctatggttttgagcaaagcaaaaacaaatttgtacaggaatatagatgaggacattttccaatgtgtctattgtttcaagtacactcctcctaatatctaacttttatcccttgagcattacatttttactatcatctctgctctttctttaatcatttcttttcatataactcattacatatgttctgaaatgttctcaattcatagcttgagctaagatgtgatgtcctcatttgaagtataattatctgcattttgcctttttgttgtcagatttaaaaatacaacaaaaacaaggttacattagtgagaagaagtcaaatgaagacagttattttttctccttaattgcaactggtaccatgtgtactgaaataaaattggtataaggaaaataaaacagctatgaacagtcctcaagtagcatggaaaatcagacttgctcaagtggtgaagaaccctatgtttggtttcaaatggaactttgaattgttaaatttaaattattaaacacaaactatcaagttggaatcagtggcctgaaagaatcagtcttgagtgtcccagaggcctttcttactttctgccttctacaattgtctgcccctctgcagtagtagtgaacacagtcttctttttatctggtttgtggttatttttgtagctctacaaatctttgtgggagactaacgttcctctgaattatatcttaaaaatcaaatttccactggggcatttgcatcaaactgctcttcttgctggctctttagtgccagatttccttccaaaatgacaggttgtgtgatctgtgcttctactgccctttatttcacaaagtagtctttgatgtattctgtgtatctgggggtaagagcatagaggcaatgagaagcaaatgcctttatctgcagataacagcttcccttatctgcatgttaaaatggacaagtggtactttgcccacttgtgtgtcagttgcctgcaagtgaagcattctgtatctttcagatgactgtttctttacttccttaatgctgctaatggtcagttgagagaagagaaaaatactcccaaacctgagattctatttggaaagcagtattgagatcctaattactttgttttattttccatacaacactaatagacttaggcagtaaaatcaatggcattgtcacttctagactgctttatatgtggaactgttgatattctgaaagtttacttactttttagtatctaatatataaccttaaactgaagtgctttttaaaatctaagtaattatcatctattggacgtaggtctatattgaggctgataaatttcttgggggagcttgtgatctacacccttgctacccgaagtctgtgcaacatcagcatcatctgggtgctagttagaaatgcagaatcctcaggtctcacctcagaccttctgaaccagaagttacattattcacaagttcccaggggattcacgggcacactaaagtttgagaagcactaccacagaagatgggacatttgtttaggtgtttaggaatcaggccatctagaattcattcctggtccttttcattctttttttctgaaataagaacttgctgctcaatttttcaaagctttggtcttcttatatttaaaacctgatttaaaactgagctttttccaggctcatggaagatgagcaaaggggtcatcttgatatgaagtctgagagacacttttgaactcattctggaaaagaacataactaaaagtttggcattgttactgactttctctgtccacctacgaaagtgctttttgaggcctcaaggtaggacatgatctcttggaaatatagtcaattctcataatttgtggattctatatttgcaaatttgctgacttgctagaatctattactatttgtaacccccaaatcggtacttctggtgcttttgctgtcactcacagacatgcacagagaagtgaaaaaatttgagtcacctgacatgcacattccctgttaaagtcaaacaaggcaatgctctactttcttatttcagctctcatactataaacaagtatttttttttgtaatctatttagtgctgtgtttttcctgatttttgtgctttatgttgttgattttggtgtttaaggtggtctttaactatagtgctgaagggctgttcagtgttcctaagcacaagaagcctgcgatgtgccttacagagaaaatttgtgtattagatgagcttcctttgggtatgagttagagcagtgttggctgcgagttaatgataatgaaccaaaaatatatgttaagtacagtgtctttaaacaaacacatataaaacaaggttatgtattgattaggtaacaaaaatgttgtgaccagaggcttgtaggaacttactcctgtatttcccctaggagcaatggttcagtatttgttaattcagtctttgtggtgacttcataaaacataagtgctgtgaatattgagaatgaactatatgtttaaaacacaattagactaagatttcaactgggtgtcacattttctcttctgtgggtgataacaagattagcttgttataagaaattttggggttgtattctgtgagtataatttcaaataataataactggtaatttatgaaaacatacttcagtatttggaaggtttcttgggatggaagcgatattccagagaggcttttctcttcctatgggcaactttttattcttttaggcatggcacttgaaacaattgtactgcagttacttttagaccaccaatgtgtatgttaagctcattttttgttgagtctgtgtcttctttttggtcaactttgctgcataaatatcacagaaatctgtgtcctcctctcctgtatccatgatccatgcagctgcttcagtccaggtccacatcacgtattgcttggatcatagactagtattctaactgttcttacccatagcccactctctagtgccacccattttgtagtatagtaaatctgatcctatccctcctctctgtgaaatctctatgtggctccctgggataaagttgctttgggacaaagttcaagatgctctaagttttaactcttgattttcttaccaccgtgcttggagacctctgatcacttgataactctcccacctctgtgcctttgcataatgtccctctgtttagtataccctttttttcttcttcttctaccaggaagttgattcctgggctaagactctgcaattacctcttgtattattgtagatttttaaaattattatttcccccctccattaggcagtgagaactttgaggaaaaggaatggttttgttcagcttggtgtcactaatgccttatatcttttataggagtttctggccatgagatcactggaaatgttgaataaattagaatttgggggtgagtctaatttgactactgttataacaaactgactttggattggcagccctaatctgcaccagttctaatatcactaatctttaagaaaacccagtatagaacccataatgagcattcaattttggaaaatatgaaaaaaggaaagtgaagaaattagttataaagtacaataaacacagtagcaacttgttatatatggtcaattgttttaaaacaagtgatgcttcatataacatttgtctgcttaagaagtaacaaaggtaaaataaattaatgcaatgaagtattcatactctaaattttactttctgctttccctgattcatacaatgagtagtatacagcagtagaaatgaatgaattattgcaatacacaacactgcggatgaatcttattaagttaaagtaagtcacccaggattgcatgacaggaatatatcaaagatcaacacaacacatggttcttaatagtggctatcctgggatgagggaggcaggggaaggaaatggagatcactacatagggagatgtaagttattatccatgttctagtctcttttgggtagtgggttcatgtgtgtatgtgcatattaatataataaacacaagaatgccatgatgagtcctcatgaatcaaggattttgattaataggatttatctaattctcttcacccaagttccacacttatttaaaaaaaaatcttatttggaaattttaggggagcctccacccctttatcctctcttgaatgtgaattaagcacatatgtaagaattgtacatattttgtatgggaaagaaggggaacaaaatgaccaaatataaaatgtaatattaatggtgaattcaaagacaataggcattatgaaaatgagaaaataatgggaaaatcacacaaatagccagccttttttgagtcaatcaagtactggggatgtggagatgaattgcaatcaggtttaatggagtcccccattttgcagtgcttgtattagcttgccctacattttcttggcagcaggaagcaagcaaagggcattattcaaagaaaagcaactgtgcgagacttgtgagaaaaatatgcatcctgtttcttccatgttgcatatcatagaaagaaagctttgccttccaattttgtgagaaatacccttcatttgaaaatgattttgttttacatttctcccaatagcactcccatgctcaatttcttgtcaatcctctcttttctgctagaatccttgaaatctctttctagtagcagttggtgcaagacaatgtgcatttattttggtggcagcattttctagttttcctgccagaatgtctgccttcacaatgaactagttttaaggcactttagatttcagctgattcccagtatcagatgtgaacagacaaaattctatctgagaagaaaatctctttttaggcagaaactttagttaccctcttggcagagtccagagagaggaatcaagggttgcttggattctcaagtcattttaaaaaccatatcatgagtatcttcctgtctccttggtgatatgtgaccgttttcctcctggaagagctgttccatatatttttagtaacagcaggagaggatagatatttgggtgagctgtgtacccagctggaaagcctaaacatacaaagggtcttaagtttcccttgatcttgtttttctccccaaccccctacattctttttttgtaaagcacagaaatggaaggcccacttgtgaaaagcatctcacttcgggcttactgactgccattcacttctttggccctttgttctgtttcttctatcagcaagggaagcacgtaagctctgccagctgtttgtcacttccagagatatgctgtttctgtctcatctgtccagcccagctaagagtggaatcttacaatttgacaacctataaataggagggatgagagggtataatttagcaatgttttttgttttccaagcctcatttctcttgcctacatagctagcaagtgtcatagacttattgcttgattgaatttgggcagtttctaacaaaaagtgatgttcttttcttccaataagcaggaaggctgctttatattctttctaatagcaatgggcattacattagcacctctctttcaaaatcacatacccagggctttgaatgaactgtggctttagaacaagattttttgagaaggtgggagtggtgttttcatgaaataggctaatttgtctgtttaagccaaactgtgacctcatgaacaccatcatccaaggaatcagccagcattatgtacacattagattgaattctataaatttcccttcatatagggaagtcccttgagtagacgttggtctgcccttcccaagtctcttttgcagaaggtatcccttcatgaatacctcagcacagggatcaatactacaaggtagagtatagaagaccatgatattctgaaacaggcgtggaaactggatgtgaaaatatgcagttgttaattagtaagcagggatacttcgctttctggaagtacatatcatgtagggtatatcatacagataggatgatattattttgagacttagataatcacataaaactgctcaaacaagagtcaagggagtaatttctaagaacacaatggtagagactgtggtccctgccatggggtaagtatagttgtgggagaagacccagaatagatactctacagatggatcttaaaggctgttttactaaaagaatttccatttaaaaccttgtaaaatttacatgaaataaatataaatgcaatcagtaattatggaaattggcataaaccatctaccatttaatttatccccattgacacaaatatttatcctccatgtttttcctctaacccagcataaaaatgttttatgtttttgtgtgtgttttgaaagatatactggccacatagcacttcattgaactgaattataagatacatctactggtaagggaatgattagctattgttgtataaaaatccatccccaaacttcgcagctgaagacaataatttatttgttcacaattaggcaagttggtagtatgggcttgactcagctgggatggcccatctctgttccacatggtgtcatctagccctcctcatgcatttggaccttagctggggtggcacactacattctctcccatcttccaggaggccagcctaagcttttcacatcatagcagatgagttctcaggaataatgaacaagcagtcttgatgcttctgtctacataacattggcccatgtctcactgaccaaagcaagtcacatcaccaagcccagtgtcattgtgggagggaagactacacaagggcttagatatggggaagtgtgacttactggggttgttaatgtagtcatctcccacagtggaccttttagttgctaaatgcttttaatataatgaaagcaactctactagttgctgtgatgaggtatgagagctgagcatgaaggaaaaccaagtttctgcagtagtatgatgtatgtgctttctgaatgagaaatcatagggcagtatgacaaagggattgttatgataagtgttttaagtataatacctaatcactttttttattcctggaaaaagaatgcatcaaaggcaatgaataaatataaatagact

SEQ ID NO: 22 - DNA, 59 bp, Homo sapiens
  source 1..59: mol_type = genomic DNA
agcacaacatccttttaataaaacattctcagtaatcaaaaattcatatacctccagaa

SEQ ID NO: 23 - DNA, 145710 bp, Homo sapiens
  source 1..145710: mol_type = genomic DNA
ccttgccacattaatgctgcatagcaaccataaatcctagagagcattcaataattactttattttgcatgtttctggagtcagatttggtgggggggtgcctaggtggctctaatggtcttggttgaacttacatgtctgggagttacctagctgtcagctaatctatactggctttggctggggtaatttggctctgcttcgtgtgtatctcatctttcttctgggatcaatggactagcctgggtatggccttatcatagtaaagacagagacaagaatgaaagcaagcagaattgcttaagtgctcttcaagcttctgcttgagtcgcctttgctaacatctaattagtccaagaaagtcacatagctaagtttcaaagtcacaaaattatgtagcaaagggtagggatgtaagaagaggtgcagaattggggcattttttgcaatttatcacacattgggaaagtgggtaaagagagaaattgaagagactatggctggaagaatttgcactgagggatgagcaaggatgacttgtaagttaagccagtgtgatggttggctggcagaagcattaggttccagtaggcatctgatggattggcagtgggcactccgagcctcctcagaggaaactgatccacttaccctcttggccttagtttctgcatatgtaaatggagatgctaacacttttcagattgttacgtcagtgaggtaatactttctaaagcattttgtaaacaacttaaaatatgggggtaggtgtgaatgtgtgtactagtccaatacccttttccagcatagataaactgccaggtagctagtccccaggcatgtgagtaagcccagtcaagatcatgagagccacagtgaggaatgttggggccagattaccatgtaaagtctgtgtagttgtctcaaacccctgccaaagctaaagtgactcaaaccctatggtttaaaaaaaagtctcttaaaaattattttatctctagtatactttcaaactgagtggtttttgccccttgtggggggatggcacagatatacatatgtatctggcatatgatggcacagagtacagacactaaactggtaataatgcatgcttcctctagagggcagtgccctccacccagcccttgctaagtcctctggtggccacagtaggactctatagctctttctttcagatcacctgctgagagccctctggacttgaatatgggaagcaagtctgcctaacttcaagtggcttgcactgggctgtctctctgaactcccttggatgaaggtgaacttccctactgtctagaacaggcttttcagatgcagagttctagatcctattgttttctcctgagcaatgtccagaaataggggtccattggcattaatgccaagtactctttttatacccccctccacaatgcccgctgtggggcatgggagctgtgttggtaagtggactcccaggagcatcctgtaagtcccaagcaaggtatgcaaatgactccgggagtgatcctggtcacatctatgaatgaggacctatttatggatgtggctttggaaagactttggcaaatatgtttttttttgtttttgtttttgttttgttttttgtcttaggaacacttacggtggcaattctgttaaaaataaaaagagaaaaaaacaactccagtcctcttttactgagcagggaaagagtccttaccggtgcatagtgggcagagtatagtacccctctgtggaggctttcaaatgaatgtcgtgcattttgacttaagtagcacaataaatatctctgcatgcaagattgtactatctgccttattcttctgtttcatctcaggtcaatattggagttgaatgtcaaagctccttatgttatattcagctgtcaactaggtattctgatggtttttaacacctctgacctcttgaccattccttggtggatttggaaaactgagttatttatcaatttatttacttgattctcatttcacatttaccaggtatttgtttttgggggatttgatgacatcatcattaaaaggaatgccattcactggagtatattaaggtttgtgcaatgcaggtggctttgcatttttatagctatttttaatggccagtaagttttaggccttggatggtctttgggcctgtcctaagtaacacagatataatcaagaaccatgttgtgtatttcaaatgtttttctcccttgatatttttgttttctttttaaagaaaatctatggcagttttgttcaatagaaacaatatgtgagccttgtgagtgattttaaattatctagtacccacattaaaaagtaaaaagaaataagtaatatgcatgaaatgttctgtattctttgtttttcatattctttgcaatctggtgtggatttcacacttagagcacatctcagtttgcactagccacgtttcgagtgctcagtagccactggctagtgcaatgaatcacacagacctgtagcattaagacggtgatgtgatacaatgtggagaatcttccaccacggtttgtgtactttgttgttgttgtaagcagcagcatcttgattaaatttgggacaatacacttgaattacttaaattgcatccctaattatcacacggttcacttgattaccctttagcaccttgttgctttttgagtagcactggaagaaaacgtgttgagaaccactatactgtttccgaaaaagctttagaatagcaaagctaagcagaaatattgagcctagctgctctgagagacagtatttatgtggatgcatacacacgataaaagactcaccactttagagcactcctcttaggaaaaagggacgggaggtgtgatgcttaggaccaaatatctaagagcactacagcttgttccaccttaatgttccactgacctgagggcctccagtgctccttaagtatggctaacattgcatgtatatgtaggacttacaggcatttggccttctcctgggctttttagaaaaaaagtctggggaaactcagacttgtatcaatttaagtctctgctcaatttagtatttcctgttctacaatgatagagtgcctttagaatcttgtctatagactctggaaaccagtccattctcatttaaaaggtattgacttttatttttttcctttgggctctaaaattggcctaattgtatagttgcagccagaatgagtttggcttccagtttacaatcttgtactatggaaggtttaggattcttatggttatgcttgagaagaatgagatgttttcaaaatttagaatgttgttaaggagaaatgaacaaaaggggataacttaaatttccccattttaatttagctattttatgccaagtttcaatccaaaatgtccagatcagtttagaaaatgattgtgtccttcatgtagtctaaaaagtgttaccatgccctgttaagtttatgattttgatttattgccaaatgtgtaattgtttctagaagaaaatatataatggatatattgctctgttctgtagccatctttatattcatgatttttagaaatcaacaacccacatgcttaaagggtggtaaatacacagatatttcctaacaaatattaatctaaaaggttttttttagtttgtttctacctcttatagtaggactgaatttacctccatctaacctcaaagttaggcctgatggtggggactatgtcacattggtaagtccaggtaaagactgtttatgagtatagcagtatcctcagtataatgtaattttaaatccacacatacaaatggggaccaaatacgtgtaatatggtagttatgtatacatctctactattctgatgtaatgattatgtcatgttcacggtatacctttaggccatttggggagccagcatgtctttttaaatccctctcattttttcttttaacctttagaactctctttttaatgtgatctgggatagatccagatgatctctttgtactcccaagttgccttgagaagatcccagtgatcagcaccacaattggtcagaaataccccatctgtgatgacaagtgaacagtgctcatttctacctctgcgctatgtgagaacagaaatacagcaccaagaactagataaatcttgaatactaaccttttcatctgtgctgtccatttatacatttctttgagtcaaagagggatggatatatttttcccctttaaattggatagcaaatgatcagtgggctagaattcttcattattcatagatgtaataatttaaaaaatacaagtggcttattttcttaatttttgaaaactccaaacatgaaagtaaatatttaccatctgagtctttaaacattgtttataaatgttttaattctggcatttttatagtggtggtctcggtgcattttatggcaggaagtttgagaaaaatgtaaagaactggtgaggattggggtggatgtgtttttgaattgccacagttcttttgagaatttcagtgccccatcaatttgcatagacaccatttgaataaacatggcctctgccaacaaatacactgaaaataattttcttttttaaaaaaaggaaagagaaaattccagtgaacagtttgcaaacttgagaaatgcagccttcggtataaaacaaaggtgtgctcagatagaacaaaaagaggagttgtcttttatatagaaagttcccactctgatcctcttatgcaaattaggaatgcaaacttgcttacttctgattggttgatgcaggccacagactattggttaattcaaacaatgtaaacagaaacagacagctatggaagtcccagaattaagtgaatttaggggttttctgggaatgcacatgtatgatgtgcctctattttggatttaggtcgttagccactcaggatccatcttgaaggattggctctttcaggattcacatttcattccttgttttgatgtttttccagaatcccaggtttaaatggagtaattgctacactttcaagacatctgtctgttgctttcctaatgtgagggatgtggattaaagaaacagcagttgcttcttgctatatgatccattgtaccttatgcaaagttaaacatacctaaactcttggctttcatattgtgaccataccccactaggacaatgctttcaataggtgtaaaacttccaaaggctttttcagctctggcacatctttgatatatcttttgcaattttttttttaggtctgatgactgtgttaaactatggagaagacacatcatttagagaacattctctagtggattgattctaaaattagacttgtcttaattggcgtaaactctcaccttctaattatgctaatgccattaagatttcaacagcacagcatcctgaagttgctgcagacaattgatctgtgttttctaccagtagcaatgatgacgctaattggtaaaattctcctggacaatattataggattctgaactagtatattattcatttagtttgcataaaactctccttctacactcaaatgctccaaaatcagtggctttttaccctttatacaaaattttatttctaagcaacactgttataagatattctaaaaaattgaatcactaaaatgctaagtttgagctgggggcatagagaatcgtgttaacaagaaccaccagagttaatttcagctactaattctgttgagctactttcactttacaagttcacttctgtttgcctgccggcagccagaaaggaagatttgaaatggttgtccttatgacatcgaattaatcttggaaaaagttgaaatctggttcaatttcataatttaatgttttaacattcattgactttcatttgccaccattatactgtcaggaagatgtctctaccaagtgttacacatgtgtatatctacaaaatggctgttaccaggagggaacactataaggcttcagtattacttgttgtcatcactattagtgagatttttttgcttcagtactcaagaatacaaaccagatcattaactgatagagaggaagaaagataatctgtaggaggataaattggaggaggatatttaaccatacaatgatagaagaccagaggttatctggtccagttcatgaactacagaagtctcttctgccatttcctggatcaaggagcatccaagctccagagatggggagcatacgacctcacccagtagtctgaggcagtgtgtgccataggtttacttactgggaatttttcttaagtatgtcttgttgaaacttctttttggtcttggttttgttttaggtaacaaagcagaataaatctatttgtacttgcatgtgatagatttttaggatatttaaagatatccataatacttttgtgatgctgaagccaactcaatttaaactatttctcagagagaagatttattttagtttttctattaaggagctgattctcctaattgatttagccgtcaagtagttgttgagcacatactttgattaaggccttacaaagttaagtaatgcctaaatttggccttaagggagcttgtccaataatagaagctatatacacaaatgaaggttacaaactgggccaatactcttatatacatgatgatataaagacatccttaattgattattttagcaaaataaatgttaggtttaaaaattttatgttaactatttagtgtatttataacactgagtgtgatagtaatatagctacttctccaagtaaatctaactagttaacttaactatgagcattttcttcaacatacacatgacaaagcaagcacttattttgaccttccatctttttttgtagaatttgaaattttgatactttattcatgtcaacatggacttcttatcgggtttcacagctaactgagcatttcttatttatagattagtgtcatttggtttcttaaatttttttctgtttacatttgcaagtcctttgtcaatttgaataaagtagaccataaaaggaataatattttaatacctatagattatattgctgcttgtctaagaaaatgcttaagcgacctcttatactgtgttcttagatgatattcactaacttgtttattcttgctaaaattttctttaagattttgttaagtacagccttcaaatttatacatgagatgattgctagatgcctgtcagaactatttcattcatattagtaaaagattgatgtaagatagcactgttattctagttcatggtggctggtgcttgaaaggatgtaaataaaaatttttaggaccagtcattgtcacttttaattcgaatcggaataattaaattggaattaatttaaatatgtatacagatggtcttagtgcaaagaaataactgacaagaaagtccttgaagttgggtgcctgataggagagactactgaggtattcgaagatttgggggagaggaaaagtcaaattggaacacatccttaagaatctaaaatctccagtagacctgcataaggctttaaaaggtaaacaccatcaagtacttattcctgtatcattccacaactcatgcatatatgtgaagaattgcagaattttgtaaaacgtttgtccatatcctgttagagatctgtcctgcagctaatttaaaactgaaccatgttcctcgtttctgggacttggcacttgactcattctcctgttaggactgtgaccttgctggtctgtgtttcaccccacagatctacatccagttgttttggctaggcccctgattctacctcatctgtctctgagatgggctgagttttataagtgggctggagaaaaccaccatggtagcagcagaccaatttctccatctacttagggactttattcccagcatccagattttcttttccttcttgctccttttccttcatgagggacctcacatttattgatacaactctctgcagcctccaggggtcctcataaaacttctttccagcctctcaggggtatgagaaaattgagactcaagaggtgcaaggatgagcacttgaacctcagccagatggtatttctgaactactgccgctcatgtgcataacctgataagaagccatggtcaggagggatccaggaagtgagcccctcccccaagcacaagcatgaagacatttatctagggcaaaggccacaaggggagaaggatgtggcccctgggtcggggtgggagaacaagcatagccctggttctgactccatggtgatcttccaggcagtgaacttgaatacctgctgcctggactcttgctgtctcttcagattatccttcctctctctctctctctttaatctgccttatatagatgtgtacttgggaatacttctatgacataacttccttccatgaaaataaattatacctttacttggaaccctgaagtttggaagagaaaggagctaattagtccagtcaattaagtcaattttaagttaattttaaatgaaacacacccctagatctagtttgaattttttaccttgggtgcaaggattttctagttgaggccaagatgccctcaaaggtagaaaaatactatgaaatacctcttctgttaggctttggcaagacttttgggggcagaggtggtgtcataaagggatcttctatactatttccatttcctgaggaagatgatgtaggtctctggttacatttcttaagaaattcacaccatttcccatctcagttgatgaaaattaatgctcttttgttcttagaaacatccttgccggaaagagaggaaaagtaaattctggaataatctaaaatgatgatgatgatacttaatgtctattgaacacttactatatgccccatgctatgtgttaacctcattcagtccttagtataaccttgtgaaaaaagtatgaatattatcttcatttgtagatgaggaaattgaagcagaaataacttgtcccaagttctacagcaataaattgcagagtaggactcaaacgcaactctgtctcaccccaaagcccattttctaaaacactgttaccactagctatgtgggcccttccagttgaggtaggccatggttctgagtggccctgtgctgtgcaggcctttatgagtagtaccccatgaagttcatcacaaacttcccatttctggcaaaggattctattattcattttcaggtgaaacttttaaaagtccttctttgtagccccattaattttatgcatttgctaattagggttttttttcattttgttatttatttatttatttatttatttatttattttgcaaaacataagggggctataccccagaatcaggccacatttgagtgcaataaacctctcactgttgatcagaacagctaagtatacctgccctgtccactgtttaataagtcaacctacttaacagcaggacagaagccattttcttttattgttttcttttcccttgctcatacaaaattctttcataactatcaccctgactttgagtgaataaccgttactcattctcttctcgtagagaaacatttaaaattgcaagttactttctgttcaaacagttgtccctgttcaaaatcaaatttcttgcacttaggatcagtgagactgctaagcaaatccccaagataagttttggatgagaatgaactcaaagatcagagcatcatggaaaatggtggaactccagccccaaggctatcatattgagcagaagtgaaagacaacaccagcagtagaggacagtgctgagtcacctggtgggaggcaggcccacagaggccaagactgtataccctgtgacagaatcagcatgaggggtagggcagggatttctttctttcttttttcttttttttttagtcagacagagtctcactctgtcacccaggctggagtgcaatcgcgcgatcttggctcactgcaacctccgcctcccgggttcaagcaattctcctgcctcagcctccggagtagctgggattacaggcatctgccaccactcccagctgatttttgtatttttagtacaaaaaggaggtctcgaactcctgacctcaggtgatccgccagccgtgggctcccaaagtgctgggattataggcgtgagccaccacgcctggccggatttctttttgtccataatttctctaataaaactacagtcctgttgaagaaacatcacgggacaaatagccaagatgttacaaagcacacgactatgtaagaaataaccccttcataattgaggctcattgttacatcctgactttctgggaggtgtttccttagctagcaaccctggaagttcctgtgtcctggttaggatttcagcttactgctgctgttggtgtcttgcaaattggcctttgggtattctagtgggcagatttccttcctgtaaaattccaaaaatactgtttttaattcatatgacctgtatgttcccatgaatacagttattctgatgttgctttaaccttgtgcaccatggcaaatatttgcttcctctaaaactccctccccagtttgcttccgttttacacgctcaaggccagtctattctaaaagagatatataatcttgtgtccttgctcctagacttagaaatgtcatggctatcattgcttcagttcaaccccagatcccttgggtggcccagctcagcagagcttgttttccttcatgtgctgcttagttattgttgaggctgctgaactcactttttccttcccagtgcctcttgaaacccagccatctttccccacaggagagtaagcccctgctgataggaatcttcccatgtgccacatgcacacagcagtttgccaacgtggatggctgccaatggttttctcctagttgcaagtttattttccctggatggcagtgctgtgccacacgggtggtccgtgacacactaggcttcccattgatagaagcttctttgtggagaagtgcctctggtgtacttggggttcccacagacatatgtgacagttgaataagtgaaaaaatattttcatattttagtgatttttagcttattttgcagcagaaggatgtgtcaatattagtgtacgctataggcccctcaagaggtaacagattgctccagccccgggggacttcactgactgttacatcagacctggagccaccagagagcaccctataggcagccacccatgattggcctattaatgaaagtgttaaggattccacactatgtacccctactttgtagggcatggcatgggtccctggctaactctgcaaagcagggagaatgagcaccttcctacaactgcacgttagggagctatacctctctccccgctaacttcccacttctggtaaaatgctacagtctttaatcttctgcccatttttaaaaaattgaaattgtattgacttacctccttcaccctatgtgactttctctctccaaaatcacagggcaggccccctatggtacaatctgagtgctacctataaaaaggtttttcacactgtgggttacaaagatcatcttagtgagtcatgatcaacattttaaaatattgaatacaatggagtagaaaatagaatacatgctcatagtgagggtaagtattgttttgagaaagccatgtttaagctgtatatgtgtacgtatatggatattcagcataaatctgattttttatgtagatcgtggtcaagtctggaagcccctgattgtagagccctatcttctaccttagtctcaaagtacctaccattcccatcagcttgcctttaaagttgggccagctcctgctctgcaaagcctcaattgtgtggaaccttccttaattatatgggccttgggcactccaggtcttaaatcattaaagacagattaaattatggccacactgcatgttctaaggcaaggggtgtactcatgggcttcagatttttttgaattaagacaaattggtcttctattaattcttggttaataagaaaattcaatttagcccagtatgatgctctgtaagcattttggatattcaaggcttttctctggaatgcaggggtttaagacatacagcaagcagggactttgctggggaaagacgaagtgtcttttcttttcatgctttaataggtagaaagaagcctcctagtgtacatggagaaatatatttagctatctttacgacaccctttgcctctgactgattatatggataaggaattgttttagcaagctctccccagccacatctagaaagtctcctcaaaggcatgtttatttagtctttagaagggacttctcgtgtgataatgagataagaatagcagcaactctgggttattgggcatttagtgttagtcacagacctaagtgatttactttacattatttcatctgatccttgtaacagcccccctgaggtgtctgttgtcatcccccttttacagagaaaaaaaataaactgggtactaaggaagttatgtaacttgtccaaggtcacatacctgtgagtggtggagaggggattccactgagcgtagcacacaagtccagcattcatatgccatgtgagatggccactttacatcgtctgatttggttcttatattttcccttctgcctggaatattctctcttgttcatccccagccatcagaatccattctatctcgtaggccctagtttgaatcccaccttttgtgaaatctttttttgcttttcctggtgagaagtgatttcctgctctctgtactcttgtggcacatggttgtctctctcttggcacatcacattctgccacatactgggttactgttagatgtaaatatgacccgttcttgggttgcggttcttatgggatggttctattgcttcttctttggtttgggtgagaatgtatgcactgtcttcatcagtggggtctgctttggcaacttcaagttcaggcttagtctttccctcatctctgagcaatgattcatgtcctaaagggatgagagtattttttttctcactttcattgtaattgccacatttcatatgaggaccacttattttctaattgtgattctatttaccagaattcttctagatttttctagattcttctttctggattcttctagaaaactcagccatgaatgagataggattttaaaaaatatatacccaagtaaaaatggacagttttgtactacaatggatctgtcccatattttactgtcatgtgccttcatgggttttgaaatggagcaaggaggatgccaggagaaggagaagtaggtttaaaacatgatggtgtgaaaactgaattttcattgcattttagaagcctgaaggtaattgaaatttagtttttcaggattgaatgtttagggtgcctttcttttaggggaagggaaactaccatttctttagccccttctctgtgctggactccacatttaacatgtttctgcttctcctggcttcttcctcacccgctttcaaaactcataaatagcataatagcgaaatatgagaacaaaagggcaactcccaagattgcatcttattgtgtttacagatatggaaactgaggctcagtgagattgtactcaaatcagctaggtacttattacctatctgataaagcctgaaatggaacccaggccaactttaccccaaagctctttgtccacagcatttactgttcaaggagaagcctggaaattttctgtttgtgatgagagagagactttcagtggacatctcctcaacaagcaagcccttccttcccttgccaaagctgacttgattaaatcacatattctttaagaagagtcactattttattgccttttaaaggtattttctctcttaaaatgctaacatttaactacagaatatgcatttaaaattaaattataagaagtctggcatttactgtgtaggaaggaaagattggagaaagatctatctcacacttctcaaatcacattaagtaggagacatcttcctaagagctgaggctgattctgctttggaggttgaataacagtggttagaagtacatttcttaagcacttgtatgtttcaggcacaatactaagcactttagctatatttcatttaatacccactatacctctgtgagattggttatcctcatttacatgaggtaagggaggctttgcccaaggtcatctgttaggtattcatgggagctgggttttgtgcctggtcagattaaaagccaaagcgtgtgctcagtctttctgctagaggatttgtgtgtagaatcttggccttggatacttggtacacaacctcccagtgggagatctcaagtatgtttgcagcatgattaatgcccagagtgcagccccctctccaagaatttctactgtctgcagttctgaagagaggctttgaactttcacaagtgaaggttttctcttccaggtgtgtgtttgtagttgaagaacaaagaaaactgtgcgatactagtaatgcaagttcccttgggaaggcatgtatgttgttcttaactgctgaacctattattgcttatctttaccttcagggtggcgttgacagagttaactatgacgaaaggagtccaaacccctctctgaaggaagtagctgtcctctgaccatctctacccgatagcggagttctctctgtgatgcccttctctggtataccctaaaactgaaatcttagaaaagaactatgtgcctctttcctcctccttcctttcactctcccctcttaattcaccttctgatcctttctttaaattttgttcatgtactccttcaaactctcaccaacaataaggtctgaattttgtctgatggtatgtaattttcacggtgctttcccattttgtccccatgatgcagacattatcttcattttgcagattggaggttgaggctcggaggtcttagccaagatcacagcaaaggtaggatgaaagagagagtaaataggtaccggaaaaggaaagaagaaatgcttttctcctggaatttcctccttctagtcttttggaaagtcctcttaccattttttctcaggccttatgaagcctttctccactagctgatgcctcatgctgctactgcctcttcattttcattacaaagtataaaatcattatttcacttaggtacaaagagctctcctccttttacagtagatacttgtcatgtttctcctgaaagccattaacaatttctgtttttctgtttccggcatgctctggggtgtgcgtttgtgttgccagagtgaatgtgcagcttctcttcaaccctgtctgcagtggttcccagagattaaagggagcacaccttgaggttatttgtatgattaaattgagcagctgtggctaggacatttcaagattggactggggattcagggtgactgtgactaattgaaaaactcaacaaaatgatgttgaataaggacaagtggacaataccatcatgagaggaaaaaagccacccaatctcccagtgggtatttataggacaattatgctttgctcattattgtgctgagtactgaggttgactcagaaaaagctgagaggttgtctctactctccaagagtttaaaatctagttggagagcaaagacctaaacacacgaaacaaataaggaaggaataaatggctataaacagtggcctttgtaatctatggtgctcagagaaatagacttaaatgccgcaaaatccagaggatgaaagattcaataagaaacaacctctgaccaaaccaaggctcctgctactgagaaggtgcacatgtaaatgattaagatagagtgtaatcacataatacaaacaactacaagagtaagcagctggagggcagtggttaaaagcatagactgcagtgatgctgcttgggttcaaatcctgtccctggcatttcctgatcatgtaatcttgggcagtttatttaaccactccttacctccatttcctcatctgtaaaatggggagtaataatcctacctcccatgaggtaggattattataagggttgaataagttgatacatgcttctgagagttcctagcccatggcagtgctttgtatgctgtggtgatagtgatgatgatgatgtcagtgaccagcagcccagaaaggggagagaacctctgctggggaagaatgggatggagagtggggaaacttgcacaatgggtccttagcaaagtttcttaaatgtccaggcagatgatgaggaaagacacaaaattacatgataggttggtaagggggctgcagcttgttgggtattgttgcagcgtcaggtttgagtataagggattcaaatcctgggagaagatataacccacattgggctataaaggatgggtagaacattagtagtggaggaggagggcttttcagtatgaacaaaggtatacagttgggctgtttgttcaaataaatataaaaaaggatgtgtaaataaagcaaaaaaagccacaagggggggaatgtgtctgcaatgtggttggtagctaagactcagcagaaagtacttaatactgaaacatcacattgagatttagcctatattaaactaaaatctccccaattttactaagaaaagcaaaattgttagaatggaagctgggtgtgacaggaaaaagatcagttccaaagggacaaagtataggttaaggagtgaaattttaaaaaatttaaaccagggccgggcacggtggctcatgcctgtaatcccagcactttgggaggctaaggcaggtggatcatgaggtcaggagatcaagaccatcctggctaacacaatgaaaccccgtctctaccaaaaaaaaaaaaaaaaaaaaaaattagccagatgtggtggcgggtgcctgtagtcccagctactcaggaggctgaggcaggagaatggcgtgaacccaggaggcggaacttgcagtgagccgagatcgcgccactgcactccagcctgggcgacagagcgagactccgtctcaaaaaataaaataaaataataaaacaaaataaaaataaaccagtttttgctttggtggtaatgaatgagagataatgggaaggaggggcagaaagggtggtatcttgcctgtaaaagaccaacaaggtaaatctctggggtttgtggaatcctgacaatgccctgtgcttctctcactctgacactatgaatgttgctttcagtgcaggatagatggctccagtgggtataataaaattaacggggcccaaactccctcttcttctcaaactgtgctgacctcagtaaactatgcacaggagagaggttttgtttcagtagggtgatgtataggctaaaattattctgagtcacctgtttgggggaacattttgctgagaagtgctgatgcttctgaccttgagcttaaggaatagctgcactgttgttctggtgacattctatgatgttaaatctttatttcaaccttgtgtgaccagacagtttactgggaatgaggagaaagcacactagtatcaaaataaatcttcatatagtctatcatagcttgttttttcagataatgagtgtccctttcgatttatatcttttgcatttccttaatgaattttgattttcagaataaattaagtattgtcactatatacagtcctgataaggctgaccttgttccccagagactcttttacactgccctcaacccccgtctgtaatagaagttgtttagaggcctttaaaggtgacattttgaagcaatctgtagggatgaataaatgacgtggattctagtcctggctctgcctccaactcactgtgtgatcttaggcaaatattttgcctctccaagcctcaatcttctcatttgtaaaattgtgagggttggactagagatgatattgatgaagatagtagctaacattgattgaatgcttctgatgtacaaggtgttattccaagcactttataaatatcaatttgtttaatcctcccatcagccttgtcaggcaggtactcgatcatcattgactccctcttacagatgagggaatgcacacacacaggtcacttgccaaaggtctcccggccggtaagtggtgtggaacaggattattctaacccaggaagacaacccctaagcctgctctcatggccactgtggcctcctgcccctcactgtcttgctgctgacagtgatgtctaatgtggtatccagtgagggtttagaaaatgtcatgacatccgtatttgcagtgaagtcaccccacccatctgcactcatacaccaacaccagtttgatcctactcaggctgctcattgctactgtgatgtttggcatcacttcagttggctggagtagggacaggggcagccttggagcccttgctaattcccaggagcttctaattctgctgctctgtgagcccattgcttcctggatgggtctgtccaccttgacagggtccccacagtaatcctatggtagacctgcaaacaaaggagttgacaaattttatgcctcttccaagagctcaatttaaaacagctgctattgctgatttgcaaatgaatgacaaagctgtgcacctgtagtcccagctacttggaaggctgagatgggaagatggcgagctcaagcccagcctgggcaaaatagcaagactcccgtctccaaattaattaaacttgtattcaagggatgatttgaaggaaaaaaaaaaaagaaaatgaatgacagcaaactttctcttgaacagtgagcataggaggggctgtgcagaaagtaaggagatgactattttctagctgcaaaacaacgcttatttttcccaaaagccagagcaaacctctggatttataactgtctagaagcttaacagaatgaaagattctctcaggaggcaattcagaacataaaaggattctggacggtacagattcttggtagcgtgcatggctgtggaaatacttggaagcactcaataataacataaataataataaaaatagcaatgggaaaattactgcttttgtttgacatttcctgtttaccagacctgaatgcctggttagtatattagagaaattatctgtttaaacctttcatcagcacaacagtttacatatgaagaacctgaaagtatagggttgttttttgggtgcctgcacaatttatgtttaagttaaggtacttcttgtcaattacctggcagtgaattactgacctgataaattccagacttattggtcaaacagacttaaaactctggtttttaaactagtaatagttggtgtactttctataaaaaaaaaacctgtaaatacattaaaactctggaaaaagtaatctggcaaaaagtatagatccaataccatagagcttttctataatatcttttgtattacatgttcataaaagaaagaaaaggctgcaggattttgtggcagacaggatgtggctatggctttggtaagtaaattttgttgcagggttggctcctacaaatattaatgtgtgtagctgtgggattttgtgaaggtagtgtttgtttttactctccctgaagtggcagtggaatagagtagaaatattaggagcagtgaatgcacgtaaaacaggggttcttagcaggggcatgtcagaaaccaaaggagggaggtgtatgtagttggagaaagtgcgttcgcaattaccattgcttggaagaacttgtgaaatgccagataatcttaaaggagggcatcaggtattttatgcttaccaaaagttgagaagctctaattacttccttgttcaagtgaatgatgatgtgtaatttacatgctgtaattatatgcattcatgtggagtggaatgtccccaaatttcaaaaattgcattaaggtgatagaatttggggataatatttattttaaaattctgcctttaagaacgagaatgtgcaagcacaggtgcaattatgtacttcattgcttttatctgtacttctgggacatttgtgtcttcatattgccagagaccagtggccacgggaaaacagattgtctcagttcacggtccctcactgaggtcagagcttaaatttcccagtgttccacttaggaagaacagtgctaatgtgtatcttttaagataactcagcctgaaagccatctgactttcagtgagaatgaggggtacactaggggagaaaataggcatcaaagtttggagagggctgtgctgcctatagattttcttctaattacattcacccagaaatgcatactttaaaaaaattatgcttactactcttttaacacagaagcttctactggttggttttgctagttaaaatccttcagttaagctctgtaaaattattcccccacttggattaaagggatagaacacatgcagttaatacataaaccctcatggtacatttgtcctgagttttactgaaatatttttggtagagatggggctttaccatgttggccaggctggtctcgaactcctgacctcaggtcatccgcctgcctcggcctcccaaagtcctgggattacaggcataagccaccgtgcccagccttgtctgtgatacaaaattttgtgtcacagaattctatttttaacactattactttctagaaggtaccaaacatactataaaataagcatttattgagtgtgtactaaatttaggacaccatattgggtgctcctggaaatgtaaaacacaatgatttggtccctaacctcaattgtttgcatgctattaagaggacaagatggacatttgtgaagtttcaagacaaattgaaactgtaatctgcaaagcaacataattgtggcagcattgactgaacaggctttcttttagccctttgatgtttagtccttattctcatggtttgattatggaagagtccaagatgctgaatgttagtcacagattgagtcctgtggttccggcagcttgtcaactctggttgctatacgtttggataatgttaataaattcattgttcaggggagcttacagtgtagagaaccaggttgagcacaagtcagatacacaaaatacaattaactataccaagtaaccaagaaaactaacttataaaagttcctggcatggtgtagtcaaaatgacttggcctatgattaaggacattgggtttttgctttgtcttggtccctaacagactgtgggacatggggcactacttagctttctctgagcctgcattcttatcttgaaatgggtatgctgattatgtgagcctcatgggattattatgaatactaaatggaattttatgaatgaatatactttataaactgtaaagcagcttacaaatgttagaggatattttaatttcacttgttgcataaaatccaagagccatttttcttcctcctactgtctctaatgattatataataacattttttcacttattctttttctgcttgtgttttgaggttctccctcacaatacactccaatcaaaataaagattatttgcatcactacatgtgtcccctcctattattcctgaccccttcatggacagtcacttttaggatttctattgctgtagcttagttgagccatttacattttatttattacttatagttgggatcttgctctgttgcccaggctggagtgccatggcacaattatggctcactgtagcctcaaactcctgggctcaagtgattctcctgcctcacccttggagtagctaggactacaggtgtgggccaccatgcctggctaattttttaaatttttgtcatcgtgacagggtctcgctgtgttgtccaggctggtctcaaactcctggccttaaacagtcctcccacctcaacctcccaaagtgctgggattacaggcgggagtcaccacacccagccaggcatctgcattttaactttagccaggcatggtggcataagcctgtaatcccagctactctggaggatgaggcaggagactcacttgagcccgggaggtggaggttgcagtaagctgagatcacaccattgtactccagcctgggcaagagcaaaactctgtctcaaaaaaaaaaaaaaaaagaagtaacagatgccaatattatgttattcctgttaggtaaggagggtccctggtgtaatcccaaatgtgcttgcttttttatttactatattatttactttttaaacatttatttttattataccctctagcattttggaaggcacttattttatatatgcttggtccttaggccctttcttcaccccaaatgagtatgttaacagattgtgacacagtgtgacacctcttcgtatgctgtattgtccacactgacacatttctgatgaccgccaagccctcattcttgcatgggaagagtccctgctgcagtaatgttagccacttgctgagctcacaagtcagaaggggggtggtggttcaagaggtgtggtgagaggctcagtgatggtgaaaggatatccaaaggatcctgccaatgccattggatcatttaagagagacctactttgaatggtccatagagtatggtgagtttggcaacaagccaattccttcaagatagtgtcttcatttatttgaagtcacttggcatgtagccttatgtggtcaaggacctaagccacacttttgggaggagctgagggaagggcctggcctcctgagaattgccagtattgcaccctccttgtaggccccctggttagccaaccagggattctgttctctcgctggtacaggctgcttgtggctacccgagttgggtttccccagggtccgttcagggcaaagggttgtgctgttaataggtctatcaccacagttttctgatgctgtacaggatgcagtgtttaaagtcaggctgaacacataggctgcttcacagtccctatcctttatttcaggaggaaagggatagccaagtctcgcagtgacaggcatgttaatctgtgggttgcccggctcacagccttttctgaccatctgttctcctagcacttgctgataagatggggcattgggacatggccttgccctcatcacagctgatggcttccgggaggtcacctgacctgagacaggcccctcagattctctcttccatgaatttgaaatttgtgttcaaggctgctcatcagtctctgttggatgtttgaattgggaatgctctaatgggaggcttttggacagagagagccagtgtgcatagatagagaagaatgcagctgatgtgcaagagaagtacatcccagagccctgactatagggaagggtagctcctttggcttcctgtcccaggaagtgccagcggcttgtgcttccctacaggatgcccatggccctcaggaagccccttgctcaaggtggcttgtatcatctcttgctagtagccacatgatttgtggttaagatactttacgtttgaataatgcgaggcaaaatgagttgagagaatggtttactaaaaataatatcaattgatgtaagaggtcagaatatagccatggtgcctgctggtccatcctgccagcaagccagtgcagtccttggtcacagtcactcacagtgtgtgccagggcttcagacagcccttggctgtgagtgaagacatgtggtaagagccaggggctttcctgtgcccaggaaagcatgtccttggccataacttgtgtggagcacaggtaggactcaaccattctggcccttcaatgcagctttaaagagtggtcactgggccagtcactttcagctgacactgtcaaaggggaaggatttctgcttcttgctgagaagccttagctttctaaaataagttgttttggtgactcttggggaaggaagaggcttatatcactggtctttgagttgagggacctgattaccaggttatacttttctggacttctcatttgtctaagaccacaacagtcatatttatttctaagcacaacatggaaggaatgcaacagcttctgatgctgtttccagacttgactattgcatctctctagccgtttttacatgtaaggatccctgcccaacctctcccatctcatgccctcttagcaacctcagaaaccaaagaaaaatgccctgttaatgtgtccttgatgagagctatttgcaaacaaagcactctttctagtcatatttcattatcagaaatgtgattacatatatatatatatatatatatagttaataacaatcccatgagggactcatctctttttcagggagcagatgactggggatgcagataaggtgtacccaaagtcttagaatacaaggtaaaaatgtcagtaatggccggatgcggtggctcacgcctgtaatcccagcactttgggaggccgaggcgggtggatcatgaggtcaggagatcgagaccggcctggccaacatggtgaaactccgtctctactaaaaatacaaaaaattagccgggcgtggtggcgggcgcctataatcccagctactcgggaggctgaggcaggagaatggcatgaacccgggagccgaagcttgcagtgagctgagatcacaccactgcactccagcctgggcgacagagcgagactccatccccccaaaaagaagtcagtcataagaggtatgtggaaaatcttaagcacatttagaagaggatgaaatgattattgtctttgagtgtcaggaaaggcctcttggtgaaaggacatcttcgttgtgctttgaaaggcaggtaggacctggctgagcagcgatggggcaggagggctgagcaggtagagccctgcatgtatcctgcaggagcaagcttgatggttgtgttgcctcagggtccaaagtgtagttgtatttgcccccatagccatgtaacgagctatgtaattttctataggaatagatctctggtgcaatataccattactaatagcaccttattagatacttcctctttttagttccaatatatgtcaggtttttgacagaatccttgtctatatgtgaaaagtatgaaggttgcaactatagtttttgtaaatttatctttaaccagcttcactgattcttaaagtcatccaggatttctgactctaagtgatgtagagtgtatttgcttatggaaaatagaagaattaaaataataaggcaaatactccttccagtgccatatcctcttttaaagaacacagctcattttcattgcagccccattacactgaacaggcttttctcttgctcttaatgtgtcaaaattgtatgacctatcgcttcctttgaagatcaaaggaaatgaaactccagatctgggaaaatggtttccccaattcctgtgctgttaatgctcctattcatccatgtatgaaaatccagggagataattggctagcaaaggctagccaattagctagcacaagtcttctgggacaatagtcagaatgagaacaggttttgagaaacagtgtaacttaggccttcctgctgggttcccagtcataggacttctgtcccatggttgcatccagagtctctatggggctgcccagaaagctgtttaccttctgttgtaacacctcccaaggcaacccactccattttgggcagtgcctattattagaaagttcttccttgtaatgagccaaaaatctgtttccctataactttccctaatactggcttaaatatagatttttgaggactggcctagaaacaagccaccaggtataacatggtttctcaaagaaaatacattttgagtttcaaacaagtaatgtataaataatccagaacacagcccagttcataaaatggagtatgcccaataaggggcacgggaggcccgtcccaggaaaggagaagggaaaaggccagtgcccccagggtcagtctgtagagtccgtttcttcccactctgcgtttacccatgtttcctggctattgacaattagaaactgcccaagaaacctcgctgtggaaattggttcagggtactggtttcctcacagctcactcgtaggaagcccttaggcagtataaagaaaaccaggcttctctttagcgttcacctacctagacgagagggtcagtgactgggtaatattggacagaggaactcagcccttggccttgactgctgttacttacactgccgcaagaggcagaatataataatggccaagaaaactgccttcgagttggacagaaattgattggactccgggctataccacttatttgctttgtgactttgagcacgttgctgaaagtcaacaaccgaaagcctcaggttttcatctgcaaaacagagattaagaataaatgtgatgaagcgtataaggagcacggtactgctcaataaatgtcgtttatcacacacatacatggttaactctgtttccagactgtgcccttcgttcatgaacagccaatcaaatccccctcccaggctgtggggtgagcagatacgatgcggttgccttatctcgtgactcagcccatcacttttggttagagctactttgaaaggcaattccacagtttcagagtgggttcttctcatatatgttgcacctgtggcctcttgtttctcttctcagggccaaaaccagagtacttaagtttcttaagctttcgttctagaatgtgcttggtggaaaaccaatactcaagacactacagttttccatgtgtttgtcaagctttattgattcttcagatcagtcctcccataggtttgttcctggtgctaatgatattgaacatttctggttcacgtcgacatacacatgaagatatttatttcccatactggcttttaaagtatcaaactatagcttggagtggaacatgctttcatttctatagatttacctgcttgaaggaggggaataatgcatagccttttattattttttttattatactttaagttctagggtacatgtgcacaacgtgcaggtttgttacatatgtatacatgtgccatgttggtgtgctgcacccattaactcgtcatttacattaggtatatctcctaatgctaatggatagccttttaaaataaatgaattattggccatgcctatagatcttatttatttttaattatggcagccaaattctcagggttgattcaaggaaaaatcagtgccaggatggacgatgctggcttatgaactcctcttatggaagagttaggagtaaagggttgaggagaaagaaccttctacagacaggctaaagaggacattaaaggaaagcagtagtggagggtcagggctttgagtaactgttctgccatttagtggcgatgaccttgggcacgtttcatagggttattaagaagattgagccagataaagcattaaagcacttagcatagtacagggcacacagatagtaagcacctcagttgtacattttttaagagacagggaaatcttacttaaatgctgttcattatcttggctcctaaccatcagctacagacctcatagagttataggatattagagcttcaaattacttttctattagtggtgatggattagaaggaactattcccatgctttctcatttagtcccccttgtggccaaaagcagacatttatgaagcaatgtgctggattagaagcaattggctaaagcacaggtttttatctgagtgcaactgccagggccttacagtagtcaggcccaccatttagcctccttgatgcagtgctagtgagaatagactttatgcctccaaagctcatacttacttacctgcctgctgtcttgtatttggtcagttagcaaatatttaactaagcccctcctgtgagccggcatttgtattggccctggggatacacccatgaataggatgaataggacaaaaatcctgccctcacagaacttaacattcattttggtagacagacaaagtgagtaaggtaaatagtatacaaaggtgataggtgcagtggcgaaagataaagcaggagccccgtgggggagtggaattctggtttcaaatacggtcatcagggaagggctcatggaggagcagagacctgaaatgagagatcttggaattccaggcagaaggaagagcaagtgtgaaatctctgaggcaagagcatgccaagagttttgagggtgaacacagaggcctgtgaggctgcagcagagtgaaccagtgggggctgcaggtcaagtaggaccttgcaggccaggataagaacattgactttctctctgagagatgaaatgttgtgggaggattttgagcaaagtcacgtattattggacttaggtttcagcaggatcatctcaactgctgtgttgaatagagaatgggggcaagggtggatgcaaggggagatggaggcttggcctagggtggtagtggtagaagtggtgaagtgtcctctttgtgcttttccaaaatgtctgatttttaggggggccaaaaacatattactattaccttaaagttatttttttcatagtactctgtcaatattagacatctgaattttccctgtacattgcatttagtagcagtaccatatatatatatgcagtgtggacatatgagtgttgaaaggaaagctaattaagtcactaataccagtttttaagttttttttttccttaaatcacctcaggagaaagttaggatcattgaaaggagaatcctaccttactatttatatgagaatcttgctcttgaacactgcatacatgctttcttttccaggtttttccacatttaatagtaggtcctcttctaacattatgtcttattggctccagtttcacctgaaaggaggcatgagttcttcagaccaacccacctcatcacaccccatcaatgcatagccacataaagcgtgggaattcagtgacttttttgccatctgagttctagcttcttcctgtgtataaagtatttattaggactatggttttggtttcagtattttgaagatgataatcctatatataaattatgcaaagaagattctcccttttgaaaataatggaactccaggaaagccaaataggttcaacataattatgagaaagaagtgtgccactgtcagattggcatttatggaaaaattgttacgattcgtttttccagattcattcccatccaaaattcacgaggacacagccaataaaagggagctgaatttgaagaagagctcgtcactaagattcattctgtatttattgagctgattctgtttgatggatattaggacagaatatttgaacagcatgttgtcttggaaaatcaggtacgaggtatggctgaggctttggtggatataaaggaggaaaggatttattccttccccacatgactcttaaaatcttgatgtattaatacaattaatacagggcagaacaaatgtgtagtcagtacaaacattctgtcaacacacattaatatgtggctcttgtttataagcttattctgacatgatctttttaaaaagtatcttattagtgtagaatttgatccgtcttttcacagtgctggttacctgaggaatggaagcaagggaaggggtttcttgccgtaactcttctttcactggtggttggctatctgctaatggcgctaagactgttagtgctcctggcactcacacggccttagtgtgtattcaactgtgccaaaagataaaggaggtggggcatacagggaatcccccaaacattaagcttctgtcactttagccactacagctggtgcagatttctaagtacataaatctcctggtaagtggctttgctggccccaattcctaataggcatttacctatatgatgtctatttatatatctgggtcatcatgaaaccagaggtatgagctatattcatatagtcttaacctctggtttgcttgcttcttcctttcacatgctcttggactctcaaagttgaaataagaccttcactattagtatagatcaaaaacctaagtcctgttttaaacatttgctaggagaactcaacaatgcttataaagaaaaaataatgccaagaggctcagaataagctacccttaacattcttctctgatgtaatagaacatttctcaatgtacggatatgtgtgcagttaaattctttcttttctttttgcttctgggcctttttggggaatttagtttttaagggagaagaaacctaagtctgtaagcttttagggtaatataaaagaaatgagaaaccaattcaatagggctgaccatttttttctcttttcccagtgtgatatacagagtacctaataacatgttcaggaattttctgtgactctatttgttgaataatggaattaagtataaggtagagctgtgtgggcctcatttgaaggagtttagttattcaagtagtaaaaggctctcttaacaaggtggcatttattattattttagcagctgtatagccctgattttctgtgacaggccaatttcaaagatctttaccgtgttcagattctgtttttaattctgaaaatactgtcaccatatgggtccatttttaccacttcatgggcccacaggacattagagagtattcagtctctagccagccacctccttgagccaccctccagctaaactccccaggatgagtacagagcccagcaggtgcagccccttggtgaatgctgttgaccagtctttggcatctgagctaacagttgaatttgatatttgcccctctgaggaccactgggcaattcaaagaaacaagtaactctagcactggaagggccctggggctagtcctgccactttgtagatgatgaactaagacacagatatgcaacatgactggtgtaagctagtggttgcaacttagagaaggaagtattgtttgctggacttacagcatgcctggagccatttcctatgaaatgattagttgtttcactacacatatgaagagactgtaatagacccacagtcaaagctagaatttctgacttttcatagtgctattcaaagccattttcatattttcaaaagcatctgtgatttgttataccttgttagacaatctgcattttagactctggctatctgatccctgataaaatccaaatagaagctagagtttgtgacaaatcactctagcttcatgacctagctcctgaaacttgaagtctatgaattggatctaggatgtaataatattaaaatacaaaatgtaatctcagtgggctgtactgggtacaaaaataaagagtaccctgtctggtcattagtgtatgcaggatcaatgaattgtgctggtgttttgtttcccataagtctttttttaaaaaaataagatcttgctctgtcacccaggctggagtgtggtggtacaatcttagctcactgcagcctcgacctcctgggctcaggtgatcctcccacctcagcctcccaagtagctgggactacaggcatgtgctgacacacctggctaatttttttttttttttagagatggggtctcactatgttgcccaggctggtcttgaactcctggcctcaagtgatcctcccgccttggcctcccaaagtgctgggattataggcacaagccactgtgcttggccttgtttccaataaatctttaaaggagaaaatgtctctttcttccatgtcctacttctcatattggcagccacctttatagacttgtccactctgttttgcgtctctttgctgtcccctgtcttccagcattgtcctctcatgttctagtgacagtcttcctcaagccttagtccttgaacttcccaccatcttctgcttctgtttcccaagattcgttgttcccgcttagctgtcacttctggcctcagccctcacctgcagctctgacttactcctaaattcaagccccacattcacaactgccttctgaacatgttgcctctgtgacctttggtcaccccaaacccaatagaaaacagagcctggaccagacggtctctggatttcttattggttctcagattcaattttaacaagtcagcacttaagattatctcactcctctcccgcttcttaacttccctgtctccttttaatgataccaccaacctgtcagccatataacatgtattatcttccatacacacacacacacacacacacacacacacacacacacccacagacgtacacatgtatacatgtacacgagacaaaaatggagtaaaaaggttgaattggtcaaaatacttgcctagagagagttcaaagcacatgtcttgataacagtgggatcttcttataaaaagtaaagcttttgttatgctagtgagcttataaatttttgcgtgtctgtgtaaaactacaaacgcatgtcctgctgggcattcttcctaccctttcttacccaggagcctctcgccacctgggaaagctgacagaacagtgggcttcaggtccagaaatgagccaactttcctacccctgctgctggtggtttatcagatacagggagaatcttagaaactctcttttgtttgcttaaaggcacagctataaatatatttcagcgtgactgagtgtgtcaagtttgagattctgatttgttgtatcagaatgttagagctgggagggaagcactggcaatcaggtttctctacttcctgattttattgaagagtgagctgaggcccagaaatatcaggtgatctgcccaaagtcacacagctcattaatgacaaaactacaactgaagccctggtcttctaaaccccagccaagagctctaacatttttaattctaatttttttttttttttgagatggaggtcttgctatgctgccaagtctggcctcgaactcctgggctcaagtgatcctcctgtctcagtctcctgagcagctgggattacaggcgtgagccaccacattcagctaacattctttttttctttttctttttctttttttttttttttttttttgagacagagtaaagctctgtcacccaggctggagtacagtggcatgatcttggctcactgcaacctctgccctgtgggttcaagtgattctcccgcctcagcctcccaagtagctgggattacaggcacgcaccaccacagccggctaatttttgtatttttagtagagatggggtttcaccatgttggccaggctggtctcgaactcctggcctcaagtgatccgcccacctctgcctctgccttccaaagtgctaggattacaggcatgagtcaccacgtctggccccagctaatgttcttttaaatatattgagtccctttctgccactcatctggaatgggttctcaagcccagtgaggaatcccaataaattctggttcttagtctattttaaaaacactaagtatacatacaatttgtaataaaattttaagttataaatataatggatgcacactgttacttcttaaaataagaccataacattatacaagctgctggtttctttgcttttctggtcactttctccacctctacctaatcaggtcccaacattgtgcaaagacttctcctcctctttgtccccttggcacacacactcacataagaatcagctaagagaatagtttgtcaggtacttttcctcttaaaacctaacatctgaggaacgtggattttaattattgatgatgtgtgtggagtttcagtgtcacgcattttcttctgagttacagaatcctctgggggatatttcacaatacctttgtgtgtagttgctatgaaggaattaacctgtaaacctctgggatgattgaattgtgggtcaactaaaatgcaatctagctaagacttctgcctacgatctcgcctgtgtgtttctttttgttggtttttagatacagtgctttctattccatatggctatttagtaagcagtctctttttgatagcttgtacctctgtgattcaatttctgttgtcttttttttctttaattgaatgatatagtaaatatgaacttgtgccatcattagaataatgtgcatatattcacatagaaggtggggcttatgaaccttgtattaaggatttagtgagaggaaataaggactttgccctctcagacctggcacagcagctgcagcagtttcatcataaggtctgtggtctgcacgcacaaaacagcgtgggctcaagtaaaatgcctctggacaggtgagaaggatggaagcctctatttctggcacctctctgaagatcaggatgctacaagatccacagagagacttatcagtattagccaggttgacctggcaagagcaaggggaattgtttatgttggctactcgttcccctaatggccattttaggatgaaaataaaccttagtaagtctgtttcagagcattttggataccccttggcatattgccaaacctatctgtaagttttctttgagtataattttaaagtaatatgtatcatcacacagaagccttttcagttctgatctaacttttctgatgccatgattatagctttactctgtctcatcaccaagcctaaattaatagtagctagtggtactttgctacccataaaatttgagctgtgttgtaagcacacagaaaatgagatgccaggaataagcaagaaagggagagcctcagcctggttacttctgatggaaggctgggcctgccatcctggcttgtggttgatttgggagcatataaggtggtgctggtccttcaccaggccagtcatgtagtttatccacggtctcctatctctctcctccccgaaccacagcgttggctgcttgctggtcaattcttctgagaaagaagcaaaacctccatgagaaaggtaacatatgctgatgattgatttagggatttgaggtctctgaggagctcagacacacaattgctttggtgaactccgaacttactcattgcacctcacagcaggagagagatgttttaaaaaaaaaagtcccttgcttttcagttcgaaagtcatgtttgagacatgactttcctgtgggtgcttgcaaaagtacatgtgtggagtgaatgtgtgttgatgagagccaagaaaaaatttatacatatgatagtggcttttgtcttgggcttatctttgtatggtttttatccttagtgagaaacatttttatagcaagaagaatgtgataaaatgccagttagagtgttttatggatctttagccctttgcttgtaggtgagttttttccttcaactacctggcaatttctttgaacacccgccgcacgtccaccaccaaccactactaccaccacatatggtcttagtcacctaagggtatgccgcagcctaaccattttctcccttgtctgtttaatcttttcttctttgtctttagccttgttatttccccagattactggccctttctggtccagagtggcattcttatcatttctgatagttcttcacagaggttcagagggtatagcaaatagatggctaacatgaaacttcttctcctttcttaactctacaattggttgcttattcatttgttaaatggacaggtacagaacattgactgtgtgcaaggtacacagctcccaccctcaagaggttgtgctcctggatatgcacaggaggatgggtagggtacagaaggaccatggtatactgcagagtgactttgaggaggctgagaggagtgagtacagtgtgtaccataagaatttaggatatagagtgataggatggataggtaagaagataggatggatagaattctaggtaagaggatcatcatgaacaaaggttgggaactgcccagagaatagctgttttcctggaaccatatagagtggagttcaagcttctgaacagagctggttcatcaggagtgtttgagtatgacaatagcaatattggagaaggccttcctcttctggttattcttagattcctagcacatgagtgctggaaggggcgtgtctaacccagtttccacgttattgagaggaacatgagtccctctaaggcttaaccttgacttggtcaaggttagaatgttggatgttttctctcccatgcaatatggtgttcatagtattgtgtttgtttgcacccactggcaaacttataaagaccaccaaggtctttataaggagtctttctctgagaagtcattatacaaaaaagaaacacgtttatagcagcacgattcgcaattgcaaaaatatagaaccagtccaaatgcccatcaatcaatgagtggataaagaaaatgtggtgtatacacacacacacacacacacacacacacagacacacacacacacacaccatggaatgctactaagccataaaaaggaatgaagtaatggcatttgcagcaacctggatggaattggagaccattattctaagtgaagtaactcagaaatggaaaaccaaacatcgtatgttctcactcataagtgggagctaatctgtgagaatgcaaaaagcataggaatgatacaatgcactttggggactggggagaaaggatgggagcaggatgagtgataaaagactacacattgggtacagtgtacactgctcaggtgatgagtgcaccaaaatctcagaaatcaccgctaaagaatttattcatctaaccaaacaccacttgttccccaaaaacctattgaaattaaaaagtctttttctgaaaatggagtatttgtgtaatttacattttatgaccattttaacaaactggtataggttttgcacttacatgaggagagggttcatatacaaagcaatgattgcattaggataaattatgttatgaaagaaaaggcattaaaatgatcttggtactgtttgccttaaaatcaggatttgtgttaactttgacatactgcatgtaagatttgtttctggtagtaactgaacttcatgaaatcactggtcacagaaatgtaagttatcagactctcatacttgattagcagtatacattttcattaaagcaatcacattccaataaggaccagcaatagcagttcacggaatgcagctgctcagtttgtatttgaagtgttcgtgtatctttgggagcaataccatgaagtcacaagtttccgaatgaggcatatattcagcctaaacaccgactagcttaactgaatttttgcttttgttcaatacatttacattgtgatgtttacagcttaggctgataatgctacagtggaaagtatgggggaaatttctctttggtcccattttaaatcacctcgcagtatttaccagatgtagaagttgtgtacgtatgtggtatctgataagctctgttttataaaatacaggttctaagacccagagaaatgaaaaaaatatattttttttctcaatggaatagtaagcatttactctgtgcctggcactgtgctaggcattagtaaaagatggcacaggcactgtccttttctacatagtgtccattgcatttttacccctaatgacttgacagttgattcttaaaatttgattttagcaggtaaaaggcattttatgtttccgtgttggggagtatggcagaagaggctgctcaaggaaagtacttttttaaacaaccaccgggtgtcagcagaggacttagaactcttggcaacatctgtgttcttggttttcttggatttaatttgctaggccatctccattggaatttttgaaaggcagtcaacctccacggggccactttctcccaaatattagtgtcaaacactttcaccgcaacactgcatcacgattgtttatctttgcctaataaaactagcactagttcctcaatctttttctgatttaaaacctttaattctgtctttcatggtgaaggttctacaaagtagacaggctgccagggtggggaagtgtcaccaaactctagttgtttttactgacctctccccccatacaggtaaagctcacacttaccttatgcagtgaaaagtacagggaccattcttcgtcctgcacacacacacaaaaatctgataatggagcttgatggttccaaattacagaaagtattttcagagtataaaggagagaggtctaagcatcttcactggcccagccatttggttcatggtatagcatatatttggtggtggtcacagatattaggaactgtgtattgattgacaagggaaaccttggcaaggtgggtatggatttgtatcatgccaattctctccagttttctcaccttgactcctcacttgagtgagcaaactagacagggatccaaggcatttggtatgagacattaggctctagggtggggccaaactggagatggtctttcttggacacccaggtttctttcaagcttcatgcggtatcagaagtggtagcagttacaaggctgtcagtttgagttgctaagctattggtgacctgaaagaccagcttgggagatggttagagacataaagcaaccccagtggctttagcagctaaagctgccagggcgtgtggcctgcagggggtggggtgttaggcatagtatgcaccctggaatctatcccataaagtaaaggcctgattgatgcagggttctagtttagacatgctatagggatttcctttggactgatcagtgggatttggcaaatcgcattacagctaattccaggaactatgcagattcttctgttgttttatattgaataaaatattaagacaacacatcaatagggattcaaaaatatttggaatattttgtttttgtggaaatttctgcaataatagtcaaagggaatcactgtgttcctgaaaacattgtgcaggatgtccataaaatatactgtgtacacacatgccatcaaagagggcagctgtcattcttcatggggttatacccagcttggtgtcaggcagcagctgggggaaggctctcagacctgtcgtatgatgtgctttgtaaactgctttttaaaaaagaagttctttattgttggcttgacttctaattaacacaataattgcatatgggattgtgtaaggggcacgtttattggggaaaataaatgaagtgtctttatgatgattttagttaacactctctgacatttctcgttgctcagggaatcctacagcaagtaccgtcttattcacggaaacttgagtcttcaaatttggccacattgctctgtgctgattctcacctctcttggcaatagcttcacactctcctctccctctttcagatcactggggtgatcctgctggctgttggagtctggggcaaacttactctgggcacctatatctcccttattgccgagaactccacaaatgctccctatgtgctcatcggaactggcaccactattgttgtctttggcctgtttggatgctttgctacatgtcgtggtagcccatggatgctgaaactggtgagtatgtcacaacataatactgctttctcaactatatttttgtaaaaatataaattacatggaggtgaagtggttcgtcttgaggtcacagacaagaccttaacaatttcagtccagactctttcctaatccatcctttaatcccctagaggtaaaaacaaccccaaacacagcctggcacactaaatctagtcccagtccctctgggtagatgatgacaaagcagtggccagtgattgcagtagtccatttgtatcctcatgacaagatgccctgtttcttttcttttttttttttttcttttgagatggagtctcgctctgttgcccaggctggagttcaatggcgcaatctctgctcactgcaagctccaccccctgggttcatgccattctcctgcctcagcctcccaagtagctgggactacaggcgcccgccaccacgcccagctaattttttttgtatttttagtagagacggggtttcaccatgttggccaggatggtcttgatctcctgacctcgtgatccacctgcctcggcctcccaaagtgctgggattacaggcttgagccatcgtgcccggcctcgccctgtttcaattttgaactatatcttagaagtctccttaagcatgtgatatgcagctttggtggcaaggcagcatcctgaacataagcagactttcacctccaagttcctattggagaaatactttccacctccttgagcctggccatgcatggatgcatgtgtgtggtcttctctgaacctgtactccctgtctcagtgctatgagagttgagctaagccagagcctgccacccagaggacttatgcagtgtcaagtgttggctaccaggaccagtgcagggtgcatactctcatgggacagataaagcagtgatgcttcccagatgataagggcagactattgaaaggctattactgtgatttttaacttttaggtacagcagttaactaattctctattcactgttcatgttcttcactgatggggattaatggtaaaggattttatagataaaaattagcaaggacctgtcctcaaaataaaattttgtttaaaaatatttatttcaggcatcttactccgtgaagggagaagcaaagattccatcagggccatgttgcctgtccctgtgtagccctaggttgtagtaacatttaataccatctagtgatatatgtgggtgtgagagtggttcattccaaaggaaccatcttcccaactggcactgggcagtcagtctctgttgtcaacctcatagaagtggtgcttgactttgccattttctatcctgcagaccatacaggaggctgatgcctcagccgccactgattcttcaggttgatgggcaagccataatgaggcccatcctgattatgggccaggcttctgctgctgtcacctggcactctattctaacaccctgagtctaccttctagtacttctcataaacactagggtttcttttggtctagtgccatagtcctcaactccagatacatgattaaatcacctgggaagccatttgcaaaaacctttgccagcatcccaccactagctggttgaagtagactcctcagtggtggtgaggccctggcatcttattttctaaaaagctctccagaggattcaatcttgtagccagtattgagaaccttttgtttagcacaatgagtagcaaggggagaattaacttcaaaagcagagaaaagaaaaaattctaaaaaaccatccattcaaacaagaagggaagtgatgtggtgttgagacctgactgattccaactaactgtttaaagtctttagcggcaaggatgtaacctccttggacctttgtctccaattgtaacaaaatagaattggactaaatcaccaaagtttctcccggcccaaatactatgactggagaggggtgggagaggtgatatttttatgttctaattctcaatttgcttgtggggcagaagtatcccatagctgagtataatgtcataaaataggatatgtgtataaacaatggaatagttagttctggcctcttctggaggtggcttcacaccacactaccattttcttctcctaacacaagttcactggcaggtgagcattttgggaagtagagaagttttttggtttggggcttaatttgggtctttaaaaatgtcttttagatcaaattttagattctacatatgtgtaagatcaggcagttattagtcttttctttccctgacttatttcacttaatcctctagattcattcatgttgtcgcaagtgacaggatttcattcttgtttatggccaaatagtattccattgtgtatagacacattgtgtccagtgtgtatggacacttaggttggctattgtcaatagtgctgcaatatacatgggggcgtggctatctcctcaacatattgatttcattttctttgggtatataccccgcagtaggattgctggatcatatggtagttctacttttaattttttgaggaacctctactctgttatccatagtggttgtactaatttacattccaatcagcagtgtataagagttctcccttttccacatcctcatcagcatttatttttttttttgtctagagacaggggaggagggagaagcagaggttggccaatgggtacaaagtcacagctagataggaggaattatctggtgttttattgcatagtagggtaactatagttaatgtattacatatttagcaatagctagaagagaggatttagaatgttcccaccacaaagaaatattttaggtaatggatatgctaactactctgatttgatcattacacagagtatgcatgtatcaaaacatcatactgtaccccataaatatgtacaattattatatgttagttaaaaacaataaaatttttaaaatatgatttggtccttttatgtgatagaggctatactgggtgcgtatgatattttatttttctcctcactaccaccatgcagtgtaggttatattttcatataatgtgataggaacttgggggtttagataacccacccaaattcacacagctaatgtatggaaggctgggatttgaacccttgtatgtttccttccaaagctaggactatttcaactccaatgtttacatttgggaaaaaagctctaacccctactgacctgtatttagtacaagctcgtcccaataggcttttggcaaatgctttctgtaggtaaaacggccactctctgaaagctcctagaggcaggaaacttgccagacacagaaaactgctgattcggctgatgagagcggaagtcacttgattaactgtcagtctagaattttgcagtccttatataacctcattaattgcaaaacaactgaaaataactatgtctactttatggaagcccagagaggctgcctcctttctaagaggtagttcataacaagataggattcaaacctaggaggacttctgactacagagataaatgccctttcttccacctgcctgctaacagttattttcccacccaactttctggaagagtctaggcttatcccatcagcaaaatgggagagtctcacatcaaactctgctttgaattgcattttgtatgaagttgggaaagaagtcatgtacatggggcattctcataactacatgtttagtatttgagtggctgtgctttctagagaattttgttaatatttagaaagaaattaatattttaagccaacatttcctttttcgatatatgtgccactagatgagaaaaaaaaattatgactcagcatacatatgtatactttatgagacatgtgtatactttacaggtaagtaatgtggccacatgcaatctatccaaattccacagcattgtttagggccattgcaaatgttcaaaaccattatatttcattttgaaataagaagcagattgtaagacatgtgccttgtaggtaaggaatcaattcttgtttttatctgcctttcaaagttatccttaatgtttcgtaaataccatgtactacccttgaatttaggcgtgcttgcatgtgcatgcacatgcaaaaaacttgagaagtatcagcagcatgagatgaaaagcactaaaggcgttagatgcttgcaaatgtcattagtagtatagtgcatttactttttgaaaggctttaaactccacgcagcatcccgaacaagaaaggcaggcaactccacaggaaagctgcagtggctactgtgtccagtgatgaccaccaatctgaagaggaacatcatcttgcacacgtttggcttcttgggcccagatgggagggatacaattccaaatgaagcagttttgtaactgtttcatctgagatgtggttgagactactggaggcgtttgcctaggcagcaggttctcatcctggccgtgttcacaaacatgatgggctagcgttagagaaaagacattgggctggttcttatttcttctgaaagcagcaccaatgccagtgagtggaagttagaagtaggcagacttgtggccaaagggaaaggaagtctttccaacaattggaacagtttcaaaatggaatgggccgcagggaattggcttgcagaccgtcgtgaggaagttggtaaaaaaggacccccagacagggcagaatgtgtcctgtgaccttcagagcagtttggtttttttctagctcaaagattctagtgtaacaaatagtggataccttagttgtgaaagttccttccagatttctccaggtgagccaagctgataggcacaatgccagtctctcagtgaattctccccagcctgtgtactccaaaatgcatatgcatattaaacacacattcctagattgaggcttatgtgggtaaatttagagacgaatgttttatatttttttctaaactttgtctagggagtgtgaggacttgtctaattcccgctgattgaaagtaacctaccctgaagaagccctcttcttaatcctgatgtatctgactttgtctttgtgtgcttaattttcagtatgccatgtttctgtccctggtgttcctggctgagctcgtagctggcatttcagggtttgtgtttcgtcatgaggtgagtatacacaaaatgcagaactcagttaaggggtgtttgggaggaggattcttgaaacctcttgaaatgtgtaaagggtgcatataggctagctgttttcctcagtggtgttgttgttttccaaagatcatgtcatatgacctgaaattttcatgaaattctaaatgtgggaattccaccaagcttgaaaccttcattgttgatcttcactgtttctctgtgtagccattgcataaaatgattctctcccgttataaagcagtgaccttcaatatggatttcatactccttaaaaatagctgcttcaggctgggcatggtggctcatatctgcaataccagagctttgcaaggcctggggcaggaggatctcttgaggccagaagttcaagagcagcctgggcaacatagtgagaaccccatctctaaaaaataaaaaaaataaattagctgggtgtggtggcttgcttctatagtcccagctacttaggaggctgaggagggaggatcacttgagcttgggaggtcgaggctgcagtgagctaatatcacactgctgtactccagcctgggcaagagagtgagatcctgtctctattttttgtttttaaaaatagctgcttcagtaaggcacaagtgtatatctgtataacaagatttctaagactataaaggcaagccaaactaattgtcttgctgcctcaaaattttatcattgactctccataaataatagtaaagccagaagtagatacacatgtgttaaaaagaaaaagaaaaaaaatatatacaggtggaaaacagagagtgttactgtgggtctcgaaaggctggcatcatctgttcccaggccctgtttttttttttaatttttttaaaaaatttttcattaacccatcttgctgcacacttaaagatcccactattgtgcttggccaagttcagttccccctgagcttgactgtatgctctctgctcccctactgccttgtttttcccctttaccaaagacagtatcccagatgccaaagctgattcccagaacccagtttgtatgggtgctgcatttggaattagaaccccattcatagtctctagtgaagtgagacctgatgaagtttcagcctcaacagccctaataagtgcccctcgtgcatgtatgaacaccaggagcagcctggcttgttcctacctgagcctcttgtttgttgctgggagtgcgctctgtggagaggtttttctcttaatggtgcttgctgcctagggcctggaaatcctcatgtacctaatctcttttggctgaaaccctgagggctgttgtgggaggaaggtacaatgccactctgaccaccagcgctggtcttgagtttggctagtcaaactcacatgatgacaataggtctcatttagtgccatttaacaaaagcagaaagatataacaaaggaagcacagtttgcctgctaggcagtagtgggcttgtttctccaccatgagtcctcaaaatagtctagtgcctattctgtgtacagtcccccatcctaagagacagcttaagtgtagcgaaatgagatgacacagctgggtgtggtagccaccttagcttagaagctgcatgtaactggtatctctatctcttgtaactgtcccatggacatagtttacagcattttagcaaagaatatgcctagttaggagagtcaccatacttagccctaagcttcccaccaagtagttattgtcatttgctgtcctcccaatctggaggcattttaccaattgggggtcagttttatcaataaactcagtggcctggtaacacatttgacattccaccttcatcaggtttccagggaaacagagcttgaaagttaccccaaagtcaaatgtggtaacagaaaaggttttgttaactttttttttttttttttttttgagacagagccttgctctgttgccaaggctggagtgctgtggcacaatctctgcttactgcaacctctgcctcctgggttcaagcgattctcttgactcagccacccaagtagctgggattactggcgcctgccaccatgcctgactaattttttttttgtatttttagtagagactgggttttgccatcttggccaggctggtcttgaactcctgacctcaagttatctgcccatgtcggcctcccaaagcactgggattacaggcatgagccactgcacctagccaacctttttaagttcttgtcctttattatcttttttttttaatttgcctcaataaagacaggtaagtgaaagttggttttgcctcactcctatggtaaaacagggatcagtttttgaccaaaacatcagtcatcctgtccacccaagtggtttgtcttttatgagcctcctgtgtaagggcagagaaagttatagaaagatgggtattaatcaattcaaagaaaataagtagaaagctcatgcctgaggtttggcagctcaccatcacaggcctttcagaaatggacaggcccctccagtaggtcattcagcaggtcaggctttctctggattgaggctgaggggaacaattttttaaattccggagcttaaaaaccccctggtgaattttctgagcttttccatctcagaaaatggggcattgcctccctggcctacatttatacagagactttcagaagaggctatgttagggtagaatttggtaagaattggagtcagtttgggctgtggtggactgcaatcacatccctccttgtcttccatagatcaaggacaccttcctgaggacttacacggacgctatgcagacttacaatggcaatgatgagaggagccgggcagtggaccatgtgcagcgcagcgtaagttccagaggagatgagggtgtgaactaactatgaagtctaggcttagacttatggactgcctgtaggttggcccagtagttgctatttgttcccgttcttcaactcttagtccagttccattgccaagagttgacacccagtccttgtccaggctccagttattcaggtaattaatgtcaaggaggaccactcccttgagtgtgccttgtatcagtaagggttgcaagtatggcaaggacagctcatttgctcttcagatctgaacccttgtgaaggagttaggcagtgagtgtgtgacaaccttgcttagagttggctcccggaggctggctttctggaatcgatgtcttcaggctgggtggagagctcaggcgagctgcattcactggctggggcagtggagtgggcatagagtggacctagaagaaactgaggctctgttaggtatgtgaaggtggtgagctgcctgatgctttgcggaggatatgggggaaatagaagagagatttcctgtctgggtggcaagtgctggcactcaagcataactgcccatcaggaatcactaagggggattttgctttggtttttcttggttttgtttacttcagaagaagtcttttttctaatttattttgataaaagttccaacatatacagaaaagtctcaggaatactacaaggaactgtatactcagatttaccaattaattatatttttgccccgtttgctttaatattctctacattggggttggcaaacttcttctgtaaaggatcaaatagtaaatattttaggctttgagggccataaactctgtcacaactactcatctctgccactgtagcacaaaagcagccacagacagtatgtgaacacatagttgtggctgtgtcccagtaaaactttatttacaaaaacaggtagctcctgggctatagattaccagctttggctctccctttctgtatgtgcatctttttttcttaagaactatttatttacttattagtagatatcccaggggagagttttttgaaaccatatttgcctcaactcaccaatcaatagtcctgatttagtggatgagtacatctatatcaataggtgattgtgagttggacacagacgcactgctttgctttgtggaggtaataagaaagccaatgtgatatataatttagaacttccttcttggagatcaaacaagcatcaatatgggtataattgttattggagcttccattcatcttgactcaccaaagctgcacatgttgtcttagggcttttgcctgtgtttctcttataaaagtcacaaggcagtgattgaggagaccacatttgatctgccatttttttattcttttcctttccctgttaatagctgagctgctgtggtgtgcagaactacaccaactggagcaccagcccctacttcctggagcatggcatcccccccagctgctgcatgaacgaaactgattgtaatccccaggatctacacaatctgactgtggccgccaccaaagttaaccagaaggtacccgctttctcctggcccagatgggaccagtggtgaatgtttgggggggcttttttatttccatgaaattatgacaaatagatttgaaatagtagtcaagggaaagagaatcttactttgtggttccttgattgcctgggagaggcacttgaggctgctcacttctaaaagagaaagctgtgactcagatcagccttgtctttctctcccacagcaaggatctaccaggcatagttaggaaggtttagcaagcagttcctgttaaccctgatgcttatgtcagacagcgagtgttggctttcttcttttggggtgtccgtcttctgcttaatataccatctaaacatgaaattgtttgcagctgggtgtcagtttttgacagcaagaggggagtagagttgacagacagcatctgcttctgctaggagggtggcctttattttagggagtttactgccataggaaaagaaatcagcaactctgattcaactcactgtcaacctcccgactcccaaagaaattagagaggggaaaaaagaggactaaacgaaatttaaaagttagtacatagtgaaaatgagggaaatgaagttttagtagtcagagaagaggaaaatcaattctgcattccattttacagagaatacgatgaagacatgatataactgcatgtgaagattatctacatcttaaatgtttagagaaataccatatataacatatattttggtaaacaaaagggaggaaaaaacctactattgtgtttacttcctgttattcagtcaaggggtaaatcttttcttgctaaggtaaaattctgttcatatgatgccttcaaaattctatgtgatctggaccagctactgaataattcagagaaaaaaagatagttcagtaagattcagtactgactgcttcttgtctaagttaaaaggacatctgtttctatttgaattttcttatgaacccaaacattgaggcttccttcatctcttattagttaataaggtaacttctggcttcctcatggacatccccactgagtacccatacgtgtcattatgcttccattttatgaagtgctaagcatacctggcatgtggtagatactccaatttatggaaggcaagaagtactctatggcagtgagatatttgatataacagagcttcagaaggttgttcatgaaagcagtacccaagtcttttttttccccccactcaagcttcctcttcttttgtgaaaattgaggatccagaagtcaggagcacagggtctagtgtcaggctccagtagaaattctgactgagccacttgttggttatgtgatctcggtcaagttacttaactttgtcagtcttgcttttcttgtctgtaaaatgcggataataatagtacatgttccttgtgcttgatttgaagatttaatgagataaagtgtcaaaagcacagtgcctggcacagattatgacacagatgtgatacatgttaactgtaatacaaatgatgatggtgaaatttgtcttctgtatcacatggagtcttttattaaaaatgatgcagcagtttcttatagggaggatcttttgttagtatgtaaaaacaagtttggagacgtatcttatagtgcatctataatccttacaattatttccagaaagagagatggggtcacattttttcatttcattgataaacctacacattgacctcactttccaccttcccactataatccaactttatattttcctggccacctcaaatacttagaagatctgcttaacttctctcttacttaccttatagcctccaacctggctccctcagaggagaaaaagtgaatgaaaactaaaatttgtctagcaagtttccttagacattcttatttaatgcccacctgaacttatgagacaaattacttttcctgactcaatgtcagacacctaatctatacaaggtggaagattggaatggggtaatagtagatgctcataaatgttacccttcctcccagtgactccttcccctaggaagcttaactactgccacattctagttatatggaatcctatgatttagaacaagtggatcatccctgtagatcctgtggtgtcttggaccctgtacttactctgatagcacagaaagatgattcttggctcttaccaggaagcttgagaaacctgtcttgtacagataactgggagagaacaggaggaaaatatgaacagttaaataggatatttattgtttggatttggggacaggttttattttgattttactagcaggatgatgaaatgtctgcacgttcagttggctaatagcattggctgaaatcctacttcatagggattctttgacagttcgtaagggcaagaggaacatagttactttgcttggcagttacagagatacctcttcccataacctgtctggaactagctttctacttctagtagttaaagtcggtcacttgcagatgttttccattggtgactattgatttagacgtgctgagagagtgagcaaatgaactgttctgagtgtttcctaggatacttagcaggtctgtgtagatttatctcacacctgacaaccgactttcatattaggaaattgagagagattgttgtgagtagataagatcatagtttaggggaaaatttaaggttgaatgtaaacatggcctgtggttgcagtattaaatcagctcttgcagtatgtggatctgtgctgagacatggaaaatgaacttcggggttcatgcagtaaataacggaaaaatccagagatggaaaacatttattttgacattggtctcttattgtttaaaaacaaaaaaactaagtcacttatatcttctcattttaattaatcctattactgatatgattcattaacttgctttcttatttggagtaaaaaataatgagaaaacatttcttatagaagagtgcttctcaccttttaatgggcatatgaagtgtcgggagatctggttaaaattcattaaaaatatgtcaaaagcaataacccatggatttggcagattctgattcagtaggtctggggtggagcctccaattctgcatttctaacaagctcctaggtgaagaaatactgctcattcaagatccatacattgaggaacaaggtttagagagaactatttcggctcagttgtactaatgccaggcagctatttcctttttctggtttctcctactggttggagtggccttaccaaaaataatgtgaccaagtctaaaatcttctagaatgaagtagaaatcatactttagaaaatatattcagcttaagtgtagaattgaagtgcccagaaaaaaatctatgccaaactgttttgcagaataagaaaatagctcattctgcttctctctcagttgtattatcaggcttgtgtttccaaattttgagcttacataacactggtgctgatctggacctcattctttagccccatcatcactgcagggagaagatatagtaatgatggccagcctggtaaactgctgtcttagctgctaccttttgggaaagtgttagaatatccacatctcttctcattttgtcttctttctaacacaaattcttctctcttctactaccttttgaaaaatagtgtgaggctgggcacggtggctcatgcctgtaatcccagcactttgggaagccgaagtgggtggatcacctgaggtcaggagtttgagactaacctggccaacatggtgaaaccccatctgtactaaaaatacaaaaattagccaggcatggtggcacacacctgtaatcccagctacagcctgagtgacagagtaagactctgtctcaaaaaaaaaagagaaaagaaaagaaaaaatgaaaaaaaaatgtgtgatatatagtctcactagtaaaagtgaaatcagtaagcttctactatggggaatcaaatttcaaaactccccatgagtgataatgtatttcctttcccactcctaccctggccttcaaatttgcatcagataactaaggagtatagtttgtcaattgcattgaaaacatgtgtcacacaaagggaccaacacacactggggcctataggagggtagagggtgggaggaggaagaagatcaggaaaaacaactatgggtactagccttaatacttgggtgacaaagttatctgtacaacaaaccccgacgacacaagtttacctatataacaaacttgcacatgtacccctgaacttaaaaaacgaaagaaaacatgtctcaaagcactactggtaagttaatgcaccatttttttttcctgcacacagactacaaatgtatatagataccacttaatagaagacacagcattgccagaatattttacaagctataagaaatgttaaattgttaaatttgaacttaaaaagggaaaacatggctggtttttttttttcttcaaatgttattaaaacttagtgtgccattcttggtaaacaagaaccagctttaatctgtttattaaattaatgtctttatttttcgcagactttatacattttagttgaagcccttttccagaaaactggaaaaagaccatgtcttcctagctgaataagtcagttcaggactctaggttgatttggccagtttcaaataaatatacttacaaattctctctctctctctctctctctctctctctctctctctctctctggaaaagatgaccctagaacataggttttccctatttaaaaaatcctaatggtctcattaggaagaaccctaaaactccataaagttggcagatattcaaacacttccctctagccagatgatttcggtttgtttattcaagatttcatcattcattgtcaaaatgctagtaactatgtttatgatcctgagatttcctgttcaaggatgcggaatgtcttttcaagtctacttctttgtctctatagtgtttgcttcatagatcttacagatttcttgctaaacttaatcctactacagaaacatttgtcaatgaaattgtgtctgggattggctttaaataggatgggatttggggaggttccaatgaagcaagattgaccaaatgttaatttgtgatgttaggggaagggtcatgtgtctctgtatttttgtgtatgtttgaaaccttttcttattgttttaagtttgaaaagaatgctaataaatccctagagtgagttgcaattgtatttgctgaattaaggttgaagtgtatgttgggagtgtttcgagtacacatagcccagcttggcctgagtgaaaacatgtctccaagacagtgtctttctctttccagggttgttatgatctggtaactagtttcatggagactaacatgggaatcatcgctggagtggcgtttggaatcgcattctcccaggtagcctacataattgtgcagaacctggtctaacctttcctctgcctccctccctggcctccagattctctgcctgccttcctgtgctttgggaaaagctgatagatggggtcaaagctccttgctcattagtcctcaggtgatctgtttattgatttttctttttcaactcaaatgaagttttgtcatcaagggaatatcagttacagttaaactaatgactagctccagaaaaacaactggctacttctgtaggtcaaatggaggttaactgaagaacgtgctggcataattggatcataaacaactcaaaacatcaaatggctgatctggatttgggggaagcttttttcctgattgacctaacccttttttgctctctcttagttcctatgtattacagatgagatctctccctttaaagaaagcctaaatttagcaaacttcaacttgtgatcattattttaatttctaagtttggctattcgtaacaggtttgactattcttatgtggtttcttaagaggaaatcaaattttgtgtattaaattttatatccctttatctgtacctaccctcaaaaaaaacaatgggagaagtactatgccaattaagtaaaccacacacactggaggatagaataagattaagctaaatctaaaatgtagcccacgtccaccaggcagggcatggttccacaggcttctgatctctcagacaaatgatacatccttgctataatgttgctttgggtagaagaatcaacatgtatagttaacaagcaagagcaaactttgtttatgtttaactcagactttgttcagaccaacagatcatgtttcaaacaaagctcgattaatgttgtctgagtaatgtctccacagctctcattttttattatttttttatttctttttatttaggacctggtgtctacaacaaaccacaactctaatttctacataggctatctcagactctaattactttttccctagccatctgtatctctggccctcctgcttagcaatgcagatgcactttaattttattccagtttgttcctaaaactttctaattgaaatgtggaatatacagaaaggtgcataaattatgtttacagcttaataagttaccacaaaatgaacatagctgtgtaaccctcgctaagattaaggaatagaactttagcctgatggtttgttttttactagacagccttagagaagtagaagagcttttcttcttaagcagttacaaaacctgtgagacattttatctcacaagagaacgtgggctcagccaacacaaatatgtttcttgttgcaatttcaaaactatcttttaccatgctttgttattttttgtttttgttttgcagctcatgaagtgaattaaaccctcaaccctccaacacatagacaaaccagagtggggtcacaaacaatgcaaattaactcagtctccagagacatttgaaaagtcattgctactctgaaatttcttctagttgctataatatttcaataataatactcagcaacatcactctaatgactgagggacattttagaggatccccaaaccctggtgactgatgcaaatgtgcaagatgcacttgacagccttgaacatcctgtttacttaacatatgtatgtgtagcatcatattgttaacatcaaaagggcgtcttgtgtttggcatttgaggagacctgtcccattggaggaaaaaaaaatattgctgaagtctcccctaatagctatcctagaaccataaagggagattatgctgatactgtacattaggagaagagagcctcaaagaacctggaatctcatgaatgaaacaccttatcatccaagaatattcccatgtggccatgagcatgagtgtgtgtgtggtattaagaggatcctattttcattaatgagatgaatcaaatcaaatggatccttctccaagtaatgaacctgattaatacctctcttccactcttctctcacacatcccaatgaagaaatgtatgattagacaaataattatctggcctgattaatctctctgtgctaccttaaagaaatctgtgatttgtgaattgttgaatatgcactgtgaccctctaggccagtaagagagcggctttggccttaaggaaccccaactctgaaactctctgcagtgagtttaagtctcatcaaggtgccacatagttgttggggtgataaaacacaaagcccagtggcatcataccatggtgcccatactgctcacccatgtggccaggcaggtccagcagggcagagacttgagacctgctcccaggttcaggcaggaagagaaatggctatggctggcttctgccagccagatgcaccaggaactgcagctatttatggtgctgtcagcctcaggggtcctgaaagctgaagttggcttccagacgtccatagatccagggcatccctgggacaatggtggccacttaccagatgcctgttcacaaagaaccagccctactgattctggtcagtgacctggaaccagacctttggctacatgtgttcagaaattttagagccaatgtcatagtaaaatttagcaaatgttggctgatattgatgaaccagttgtgttggcctatgccttagccttcctataataaagaaggctctactaagttagaggccacagagaggacaaagtaggtaggaaagaacagagctcgctctctctcttcctccctcccacttttgctctcctgccctcgacctttttcttgccctttgctttgcttgctcttgtgacctccgtgctatcatcttttggaagaaactggccatgcacatctattgtctcaaagattaaaggtggtataaagtattaggaaaactaagctgggtctagccttttaatagactgggcaagaactttgtcccctgttagctaacttagctaattgaaagctcctgagtgctgtttttgaacagcagcagggttgtgtcaagcattaaacacttctctctacaaacgtccattacctttgccctctcaaggtaaacctcatttgtctggacttgatgggcagggtctgctgccctataaatttatagcagaaggttgagtgtgtttagtagggtacctcttcgctgcatctttggcaactgctctttcactcgagggcttgtggggagagtgagagatggagcatgcacgcacatcacccctgtcctatccccacccccaaaatggcctggaagacaagagccatgggatgtctgggcatggacatgtttattgttcaatttgtgacattgtgtatatgtacatatgcatgtgtgtctgtggtggggtggtggggtgtcctctgggcttctgtatttagtacttctgtgtctaaatagacccagggctttgctagacttggaacctgttaggctggattaattccccatatcacgtaatattatagtcctgagtaaagacagtagagctgttttccagaaggggagggttgagtgactcgcttgaagttgggcagctactatagatccaggattataattctgacctcttcacctggcttgctgtattaacttttaaggccagagatcacccttgttcctgccactgatagcacctgaagggaattcattttgtgcttttataacaaaaagacttcagtctgtgaaattcaaaaggaaaaggtactcataagaaaacacagaccctattactacccatccattttctaaccctcaccctcctgtctggcctcctccagggtctaaatgctgctaaggtgattcattatgtgctggtcattcttttcttttggggggcccttgagaagacctgtttaccttttctatgtagagggcaggacagagctggggctattcttagataggacaagagggtacaaccttaagctctgagaattacctgtgtagcttggggtgtattctttaacctctcataaccctcagttttcttatctggaaaactgagattgtaatattgtacaggttgtggtaaatattcagtacaggctaggtacagtggctcatgcctgtaatcccagcactttgggaggctgaggcaggcacatcacttgagcccaggagttcaagaccagcccggtcaacatggcaaaaccccatctctactaaaaatacaaaaattagctgaatgtggtggcgcacaaatgtaatcccagctactcaggaggctgaggcaggagaatcacttcaacctggaaggtggaggttgtagtgagccgagattgcaccactgcactccagcctggatattcaatatagtcatcactccgtatctgcaggttctgtatccatggattcaaccaactatggattgaaaataacagtacaacaaaaaataatgcaaataaaagcaatatagtatagcaactatttacacagcatttacattgtattaggtattatgagtaatcttgagatgacttaaaatataaaggaggatgtgcatgggttatatgcaaatattacaccattttgtatcaaggacttgagcatcctaggattttgctatccttgggaagtcctggaaccaatctccaacagatactaagggatgactgtaatctgttctacctgaatgtgttatatacctctgacacttatttgatttttgacattatcaagtgtgttctggtgtttgttggttctggaaaatggaagttctaataaaaaagacaagctataaggttcaaggtcgttacactcatattttagtttctcatttggcagaatattctaaaggttacagccatggtatcttcagccacttggcagtaagtgcatgcgactatgtattttatggcaccaaatgatgttggccagagccttggtaggagatagaacgagtccaataagatgatgatgcctccttacctgaaagcggttatagtttgcatatttcacagcacaattttaatttgaaaaaggaagataagagatgagaactggaacctgcatggataggttaagagccaggagaatggagttcaggtgttgccctgaccaacagtgggacctgaagtggcagcaggtgtttcacctataagataagggtgactaggtggactggatgagcagttccctgccctggaagacttgttaaaacaccagttactgggccccaccccccagcatatctgattcagcaggtctggggcgagatctgagaatgtgcatttctaaaaagatcccaggcgatcgtgatgctcttggtcctggggtcacacttctagtgaaacagtttattcccacctctgatccagtaaaacatgcccagttatctaaggaggagggactacattggccaagagaaagcagcctgtagactcaagtgcacaattgggctcctctctaaagaatgctgatcctccagattcatgaatggaaattttcttttctaatgaacagaacaagatgtgcttaagggtgtcttgagagtatcacagtcatctttattagattcacttgtgccacagtttagatcaaggcacaaagacaagtggaggactagaatcttctgaggaggtggaggtactacatcactggtggtcctgaggcccctaaaaaaactgggaggtgggccctgggtgtagatgagcccacttaggcctaagatatctacatggccgagagacagaatataaagccccactttcccctagcccctcctaccttttcataagccttggctttcttacctcactggtgaatgtgcctgatcaagaatagtgtctctattcttgcctcaaggaaagaactattattttgtcagctgggtatggctgagacatcatagtatgctgagaaatcttccaaatgcatgtgctatagatgtgaattaaattttagccttctagttaatatatcactaaattctgtgttccttaatttttttattactctcataacatgaacaaattttaatactccttaagtgtcaaaagttgttcttaaatggccagagtgagctacagctgcaacatgatggccagtttgagaacttccagttggctctgcagttagactcccaacagctgagatcccatggttgaaatctggttttatcttttgctctagtgccctttccccatttacatacagaaacacttggttgttaaaaaattatgtctagtgatacgcatatgtcaaaaatcacataccccataaatatataaaattattaattaaatattaaaagggtgtggttcggtgacttgagattctcattttcgtttttctccctggcaacagttaattggcatgctgctggcctgctgtctgtcccggttcatcacggccaatcagtatgagatggtgtaaggagaaggtaggtgacagtggggagtgtttaattttgaggggtcccctttgggacacttactacccttcaaatgtgcaggagtactccctggccattgagctacctgatcttggtggcacttgtccatgttcagaaatctcatttctgtggttctgggaaggaagtataattggttcttttgtggaaaatgtggaaatgcttttttcagcttgttatctttcaagtccttattactggtgaatcactcacatgttctcatttctctcttagtctttcaagaatgacggaataagagacctgttttaaaaaggaactgcagcaatctttgaaagacttccaaagaatgttagagcacagtacataatacacttgccctgctccctctcccccttaccccacaacgtgcaactgacactcccacccagtctctgctccacctttcagcccacgtcacgtgtagtgtccattttgtgaagccctgttgtgccacagagtgtagccaggtccccctgcagctagtcctagtgaacctcaccccgaggccctgcatgggccagcccctccatctgtacttggtccaactgcaactcatcatcggtgactggttatcacaccatcgctggcccctttgggccctgcatgtagtgtgggaggctcctgttagctcctcactgtggtaaatgccacacacctttaagtagataagcagacgatagttatctgttcttttgacttaatctcatttggtttgattttccctctactaaggctttcctaccttcttcaggctgcctaagacatgtaacgaaacacttcaataattgtccatgaggagaaaaaaagcatgtgtcatgcatgaaggaaactgaacttgaggtggcctccttgcttgttacatacctgggtatgtgtaggcagtttagtgcatctttgcctctcggttgaaacctgtataaccctgttacaaagctgtgttgttgcttcttgtgaaggccatgatattttgtttttccccaattaattgctattgtgttattttactacttctctctgtattttttcttgcattgacattatagacattgaggacctcatccaaacaatttaaaaatgagtgtgaagggggaacaagtcaaaatatttttaaaagatcttcaaaagtaatgcctctgtctagcatgccaacaagaatgcattgatattgtgaacatttgtgatatatgtattaataaatagagcaattacaagcagctgtgttctggttctgttctttggttcttatgaaagttttaaaacacatttcttttccatcttgctcttcaggacatcgcaggcaggtggaccatctcacacactgacacacctctccatgtgtgctcccaccccactaaaatagcatcagcagcagagaagctaaagggttaggtttttttaattattgttatggacacttcagaaactttaaccatttatcatgaacagaatacattgttgtctgtggaaatagagccttcatatcatttcaggcctctgaaatccttgggcctgaaatccgtgaaataaatacaaagatttcagctgagtttttaaagtctggatttcattttgttaaaaaggaaatgagcctctattctttccttcatcgcttctaatgagcatgaattctcctctttcctctttcttttctgtgttggattgaaaaaacacgatctagagaagagattacatcctacgattcagccatcccaatgtcccagtttgtactgaagtatggaatgcttacacttgatttaaagagcattttaccaataggtgcagtgtattatttgcaatccatttcttcttgatgagtcatccaaaaaacaaaaacctagtaaaagcataaattgatctgttaccaaaatgagtggatctaaaaggctccctcttctctatagcacagactgtaattagaatagagatgactttctaactgtatgcatttattagcctgatctctgcatagagtaaaccctactacaacattgacaaaggacactgcttaaacctttagtataccctcttcaaaaggtcagcatttttagtgaattaaggagagctcttctatggaaatatatgtagctcaaaattttttcacatttctgtttgtaatttctatttcattatatatcgaaatgaggcttttctgtaaaatcctaaatagagcccaacccatggtttatctttttgcaaactatgtgcttattggtatactttggtaagtaagaaatctatatactttctaaattaaattcagatctcagaataacatacttttaatgtgaaacatttggaccaaggttgattttactttaaaactatcaagtgttcatgtttcaactctgagtgacttgtgtgtaatgtcctttcttctttcaaaggaaacttaaaagacacaaattgaaatactttcttgttttcttttattatcttcccctgccctttttttgaaatataacatttacttatggtaaaaaacacaaaatgtgaagtgtgcaacttgaacttgcacatgtgtacaaaccagtgtaaacaactgcccagattatatacagagtatttcagcaccctcgaaggttccctggtgtcccttttcagtcagtaaccgcagccctctcacatcccctcgaccctgcccaggagtaccactaatctgaattatattcccatagattagttttgtctcttcttcaacttcatataaatagaatcacacagtgtggactgtttcgtgtaccttctttcactcaacattgtgtctgcaagagttagttacatggtgcatgtaaacatagtcttgtcttcattgtggtataggattacattatacaaatatagcacagtttacccattcttctggacatttgggttgttttttaggtttgggctactatgatagagctgcaatgagcattatggtatatgctttttggtggacataaataaacgtgtaagattgcttgaaaataaggtatgtttagctttagaaagtactacctaacattttcctaaagtggttatactaatttatacttccatcagcaatgtaaaaaaggtctagttgttccacatcctcaccaacacttgctattctcagtctgttttattttagccattctatagatatatagtgttatctagatttaatttgcctcacactttcactttttcattgacattgactatttcattgtattctgttcatgataaatagttaaagtttctgaagtgtccataacaataattttaaacatctaaccctttggcttccctgctgcctgatgttattttggtggggtgggagcacacatggagatttgatttcttcttttgtaagatgttcaagtattttgtgtattttaaaatcagttgtctttattgatttgtaggaattctttctatattctggacacaggtcctttcttggatgtatgtattgcaaatcttttctcccagcctgggacttgccttttcaagaaaagtgagttctggattaacaatacatctggttagatgtagaagcaatgacacaaataattcaaaatattaaaagtcctttcttcctagcaagagcaatgtttgattccacaatgcctccactatttgttggttgactttagaaagagctttgccttttatttgtgttgtgcttatgctaatgtaattagtttacattttctacaaataaaaagatttgcagttgggaggaggaaataattaaaacgtgtcatttgaaaatgtcaggagccaggcccagtgtctcatgcctgtaatccgagctactcagaaggctaaggcaggaggaacactttggcccaggagtttgaggctgcagtgagcaatgatcgtgccactgtactccagcctgggcagcagagcaagatcctgtctctaaaaataaaataaataaaatgaaataaaatattggggcatcccctagcaatcagactcagaaaaaaatattgggggacaggctaaggaatttaggtttaaagtaacaaaatacacaaaacaaaggttttcttgtttgcacacatttaattgtcaatgttaaaagcctttgaacaaaacttaggtaatagatttttgagattataaatcatagcccagcgcagagattgttgaggtttggcctgagctttttctttgttaaaactccccagttgattagaatgttcaggcagagtgggaaacgctgtactagaatacggcttcagcttacgtttttcaccttgtgctccgtgtctgtcccatttacttgagattcttttatcccatgctttcattctccctgtttggcatgccttctcccgaagcttcccatcttcaaacaccatcttatctgtgatgttcttttggtaactgcagtcctagcctactgtggcaactgtcttctatgccccacattttaaatcaagtattaatatttttcagaatgttgtccatttttcctgctttcaagtttataaagttgttatagtaatgtcttatttttgaaattttaatgacacctacttttgttccctttttcattcctagcattatttctttctttccttttttccattcatgctgaaaatttgtctattttatgtattttcaaaaaaccagcctttcggtttcatcctttctattgtttggtttttatttcattaatatctattcttccttctgttttctttgggtttccctggattttctcttttgtcaattcttagctcattaatatttttaaccatcttttctaataatttcatgaaaggctgtaaattctcatgtaagtactactttaactgcatttcagttttaatttgaaatttttgttgtctttcagttctagacatcttgcagtttccattagaatttatgcattgaactatacaatgagaatttttttttaaagtttccaaacatggattttagggcttttttgttcaaaaaacttggtttgtataataaagattcttcatttgttgagacttgctttgtgcttgggtatgtgggcagtgtttgttctgtgtgtacttgaaagtatgtatcttctctaattgttgggtgcaggattaggacaagcctttgaatatattcaaatggtaaattttatgaatattagtaaaatcatctgttcttatgaatattttatctgtttttcagtttttaagaatgatgcattaaaatcccccactatgactgtagattctttcagtttttgctttatatatttttaagctttattgttagggacatgcaagtttaagattatgtctcacagatgaatcatttcctttgtcattatggactttcttttccctcaattatgatttttttctttaacattcattttgtctgatattatagttacaattattttttcttttgatgagtatttgccaagagtattattctatatctctctggtttcagtctgtaatatttttgagttagacatgtctagacatgtgtgtttcacaacacataactgcattatgttttcttattcagtccagtctgagaaagctttaacaattaagtgttattactgatgttttggttttatttctaccatattattttttctgtctactattcatttctttcctattttgcttcttttctgtcttctcttgaatcagatatatatatatttcttctttggaaattatagattatatttttattgttttagaggttaacattaatctcttaacatgaatatttgcatgtaaaattaatcagaacaaggattcttgagaaagatagggctctttctccaaaataacaaaaagaccttggattgttttaattctagtcaccactcacttaacttctatatttttgttgcctgacattttatttctaccatctccccaaatgaatattaactattagtggctttacagtttatttagacttacctaaatgtgtacctaaattttgtttttgccccattgcttcttgcctcttaatccttctgggttcagagatctatatgtggtaaactcaatttgcaacagtaaagtatcatcaaaagacaaaattataacaagttaagtttaaagatcttcattggctttatttgtgattccagaattgggcaacacttcattccgtgaaacagaatcagtgttttaatgagatgagcagaaggaattggctttatcgacagagaaagtctgaagaaagcagaagcaaagaacaaagagcatagtagtcctttcaaatctacttttcttgtaaagcaggacaaggaaacagggcaacagaaaaataatagttaacatcaggttacttggggacacttttttgtgtaagaattaaagcagagggaacttcattatcaagcctattgaagattataaactggcctgctagggaaattagctgtttctccttgcaatgtcagaaaacaacttagttcaggtttagtagtgactttaggataggtgacttcatttggatttttagtctggtctgttggggcctagaacagaagcttggtccaaaacaatggcctcctgtaaatttcatttagcagtgtatatttatttcctaaacatatttttaatccactattagacgttttgcctaatgtatctaggtccatttatttccagtttgccatgttgccaggatgtatattatattatttgcagtgtattatatgctgccttctagttctctaattattttacatgtaagtaattttattcacagttgattaggatcttttaatagtgttcttgagggcaaggatgatgtcagtactgtctttgtatcccccccagtgactggcacagaagtaagcactttccaggttctcaaattactttatgagtaacgaatgaatgaactccaagtccttaaactgtgtgccagagcttatccggtcttacacgaatatatttttttaggttatttcagttgttccttacgtcctatttgcggttttatctctagaattctgtggcattccttttttgcctcatgtcttcttttctaccagttaatgcatcactatttttgtctcatagttatgtcataatttttcccaatgccctcaaaataactatgtgtcttgagtagaactggtatgatccaaccttgattctcacgtagacttatagccagaatccccagaattatgttccttggaggaggaaaaatggttgtctttgtttcctaatagaacctaaagcatgtaaaaatatgttaataaacactaaaagggtccaggaacagataaatgaactcctcctggccctgttagctctctgcaacaaacagtactggatgatatatatgcacagaacttttgacctagtgtgtggcatttccagggagtgatataatttaatttaaaaaatgattatttgaagacctactggatttagaccatgagacgtgaagaagaataagaaaatgctttcaagcagtgttgattaatttccatatatatagcagaagaataagaaaatgctttcaagcagtgttgattaatttccatatatatagcagatcttgtaatctagtagtctactataataattcaggtttgtacagttgattgtgaaaggccaatgtgatatctatgactataactgtcttatctattgctttataacacataaccccatcacttagcagtttagaataacaaacatttattatcacaggtttttgtgcatcaggaatccaagtgtggcttagctcgatgcccctggctttcacgttctctcatgaggttatggtcaagctattggtcggggctgtagtctcccgtgaaggctcaacttgggggaaaggaatcagcttctgaactcattcagttgactgttgccaggccttgggtccctttccacatgagcctctccacaagactgtctcagcacctggtagttggcttgtcccaagatgagcaatcaaagagagagtgttcaggacagaagtcactattttataacctaacacgctaccacttctgtaatagtctatttgttagaagtcaatgagttaatctaggacacaggaggatgacacaagggtgtgaatattaagaaactgggaccactggtggctgtcttgcaggcaacctgccacaactatactttattcacttccctttgggatttattgagtgactctcacagttaacaaagaatagcaactaaactaaggaagagaaccattttacaagttaatactctactctcattgatcttgatgtttttcattttttgtttgtttgtttgttttttgagatggagtcttgctttgtcacccaggctagagtgtagaggtgtgatcttggctcactgcaatctccacctcccgggttcaagcaattctcctgcctcagcctcccgaatagctgggattacaggtgctcgccaccacgcccagctaatttttgtattttcagtagaggcagggtttcaccatcttggccaagctggtctcgaactcctgacctcgtaatccacccacctcagcctcccaaagtgccgggattacaggcgtgagccaccacgcctggccaatgtttttcatttctttcatgaccagccaagacttttttggcatcacctcctcaaatatttctctttagggggtagttcttttttttattacttgtatttgtttttgtttgtttgttttcttttttatgaaggtggaagttctgatagtcaacaaaatcaaactgaaatttttcaaaatgtcaaagctatttttccattatcttgggagattttctaatttctggatatcaacttcttgtaaaaaaaatagtaattatctcaattctgtattaccacacatctcttggtaaaatcgctcttaaaaatcattaaaaataacttggtatttgattttacccattcttccattacctttatttacttcatgaggattcttttaagttatggttgatactgttaaggaaatggagtggtagcgttgttttatttgtaattgctttggtagccaaaatattacatttttaagcagacactgataaactgataaatgactgtgtccaacataccctccagaatagtaagggtctagaaattaggatacagttgaagaaatttgtgataatctggttgtacaggtttgtatatatggtggtggggcgtattagggaggtacagcaaagcgtaggaaaccattttctttaaagattgagtacctgagtctcaaacccagtctgtcttctctgtgctctcctcctggacaatttcatccatctgtgttgcttcaattaccatgttgatggtagtgacttctgtcttcaaatatctagctcacactcttctttggagctacaaatgtgtacagttccactatcaataaccatagggctgaaagtaggatggaaacccagaatggtggtaatggtgagaccaacttggactcaaatggcgggaaggtccaaatcagtctggtttggattaaaagaagtgggaatgttgatggctgatgtgatacttcagttcttcttggcttaaaagaatttaaacaagagacacacagcaaaggaggtatggcatacagtaatttattgctaaagaaaaagaatattgtgaaagttaggtgcagaataaacagtacaccctgagagagggaattcagggcaggctgttcattaggatgagacagcaaagactggcactagggagactccctttatggagtcttccataattattcataaggagttggaaagaggtgttactagttagtatgttctgggtggtcttccgggtgcacgtgagcagtacctgtacacacttgttcatatattgcatgtctcattagcatcttaaatctccaccccaagggtgtatttttttactattatgatgagcaaagggtcagtttgaggacagataaaatcaaaatgtgcatgctgtctagaagggaaagtccctactgaagatagctttgcttgaatgaactcaattacaatgcaaatgttgcagcttattgtgttgactggtcacgatggttgctgcagttgctcagtcaagagaacatggtcacctatcctgccttgggaatttttggtgatgtttctttgagcaattgttccatagatatttatcaaacacctactatatattaggcactattctgattgtggggctacagtggtgacaagacagagaaggtaccagagaaggttgccatgatggcaacatcatggaacttacattttcatagaaacaggcagataatgtgtgaatgaataaagttagtgatgggccttagaatgaaaatgagtgacactggtgatgttactttaacagcttaactttgaactatgtgtttgaatgagttcataaacctgagcagtcaggctctgacatctcatttgagttaatttaaagatgggctgaagtcagatttatatatacctgaggctttgggtggggcactgttgccacaggtgactgcgtggataccagccatttatggttatgcaaacaaggctaaaaaccttttgcaaattaggaccctaacgaaacttttcagaaattcaattaatcactaattatagatattcccttccaagggagagttaacatcaggcagaagggcataacagtgtccatggtatgtacattaacaaggaacatacatgctgtaatcatggttgatttagctttgtggaccagctctggcacttcactattggaagcaccccagttctacctgttgtatatatgaggctttgttgtcaggttggatttgaagaaatgatttcatagtgtcaatcttaaataatgaattcagaagatataattaagtatagagtttattcgagctcagagttagaggatagccaccctagaccacagctttaaattgctgtgaatgtatactctaattagcagcagttacaagtgtttttgtttgtttgacacaagatatccctatgtcacccaggctggagtgcagtggcacaatcaggggtcactgtagcctcgacctcccgggctcaagtgatcctcccacctcagctcatgcctcctcccccagtagctgggactacaggcatgtgccaccacgcccggctaattttcttgaattttagtacagacaaggtctcactatattgtccaggctggtctcgaacttctaggctcaagggatcctcccacctcggcctcccaaagtgctgggattacaggcaagagccaccatgctcggcctacaagtggatttttaaggaaaaaaagaggcaggttcctaaattgcttaccaagaatttacattaaaataacataaattataggttgactatacattgttctttgtatcacaaattcgaggagcataagcataatgaaggaggtaggtagacaggtacaaatgactttaaaccagtgtcccccagcatggttgtggggtgtgggatgactgatgtcccatactaacgtctctgtgagcctgctaaactttgcacatactcagactgcttgagctatttttcttttttcaaaagctttaagaaaaaagttggaaaatcactgagttagattatgacactaatgagaggaatcagagctgcacaaaatgtagtctgaatcagcagtgtgggcaccacccgggagcttgttataactgcagaatctcaacccagagattctgtcccacccagaatctgaatctgcattttaacaagccctcctggggattcgtagtcacaaaaatttgagaagtactggtttaggatttaggccactggtttccaaacttagctgtactttggaatcacctgggagttggggaataggctgggcattgggatttttaaaggctccccagaggattctgatgtgcagccaaggttgaaaacactgatttaggccacagcctgagccctaatatgattgttgtcctaaaaatatgggctgttttgccattagagaaccaggtttatagtataagtcaatcagctaggaccctataccactaaggaaaggtgacagcagcccacccaacatcctcctagcatatgaaagctagtacatagtgaatggagaatggttattctgggaagtgggtggggcaagtgtcaagggcattgagaattcctttccagcagatggtatcacttatcaactggtttaggacagcaatgagatctcatttatatgcagcaattttcctcttcaccagggattaactccatagaaacactcagactagcctgcctgctactcaccctgttcaatttaaatttattttatgtaattgtatgcaataatttatctgtgaaattcctctaggggaggaagccacgtggatagctcaaactgctgaaggcagtaaatagaatggcctcatgcattcattaagttataaagcaaacagcaggggattgtgggggaaaagaagaggtgactgaatactcaaaagaggacacctttgggggaaccccccaccatcttcttccactcctctgtctcccagaaatgtggttcagaaaacccaatctgcacagttcaatttttttttaatgaaaactaaattatggaaataggcaagtatagacttcacttttaaaattgcagtgttggccaggcatggtggctcatacctgcagtcccagcactttgggaggcccaggcaggcggatcgcttgagcccaggagttcgagaccagcctgggcaacatggcaagatcccgtctctacaaaaaatacaaaaaaaaaagggctgcgcatgctggtgcacacctgtaaccacaacaactcgggaggtgggaggatcacttaaccaggggaggtcgaagctgcagtgagctgtgatggtgccactgcactccagcttggctgacagagtgagatcctgtatcaaataaataaaaaattgcaatgttaagttctccatggtcccaaagtcactttaactgagactcaaagagaattgagctaggagaaagtatgtgtgaagttctatcttcttgctcaaaaagctggctgcagtgagattttggtatgattcatgcatgcatggctataataataacaagaaatcaaagctggtaccctgagagggtaggtattctttttattccttagatgaagggactaaaacttcctggagttgtgatctttaaaattcagtgtctgtgacagctgaaaatgccaaaatatgcttaaattgcagagctgcagtaaattctatttcacacgaattaactatgaaaataccattgcttgtcgaccactgcgtatgtgatcaatgggcaaatgtagagtggtcaatccacttgtaaataagttatgacaacagagaaatataaataaaatcctaagccccccaactgattgaatggactccctcttggccaaggggacctcagagtaaccttgaaaactgagctcttggtcctgacaggatgggaggtcagacacaccttgtaatacctcttcccttgctaaccaccattagcctttctttcctcaaggctaaacagaaaccagcctttttgaaagactccaccactggtatggaccaaccacctcccactgcccctcccttttggcataacaactgaccagcattccttcctgataagagaccaccaaccacggctctggccagtctacagagaatgcagcagtgagggttttcatgtcctctgcttcactttttaacatcagagggctgaaaactgcaccactggatcatgctaacactgccatttttgaacatgggtcccatagaagggcatgaagctcaattgtacatgctcatgtttcccctttcataagtattcatgactcctcctatagcttattgaatatgtacatttgaccacctcgctcagccggaattcccatcttattctcccctccctcaaagtatctgtttctggcttctggttggaggctgtgcttctgagcctgtcaaaacggccaccctgcaggctgcaaccttttatgaaaaataaagctctcctttacaaatttatgaacctcatcattcctcagttgacacaagtgattctatatccacccagttcctttgaaataatagcatttcatttcaaaagagactctactggttggctatggttatgtttaaaagaaagagagacctgcctttctctgtggaggtatgtgctggtcttataagcaagacacaggaaatttaaaacctggctgtttgtcacaaaataacccttaatcaaattgttttgaattaagaattttaatcttcccagcaacctttattcttatttaactccttctaaactaatctgtacaccgtaatattcttgttattcaagaaatggtgaactggtttgaagattttccaatttttaaaaatcttcctgattctagtgtgttcatactttcactgttataaggaaaatgtgctctcataggaacgaaatggggtagaaggaggggagagaataacaccattgcttttgtatcaactaaaagattcagatatcaatagagtttgttacaataccccccaaataattttatgttaatgacatagatctttggaagtaatcattattaatcttccaagtattcacttcttaattctgaatgcaagaattgagaagattttttttgtgagggcaggggaaatgctttggaggtggaggaactgaccacaaaggtaggtttaaggctaggccatctctagcttcgttcaaattttaactttaaacataaattgtaagcaatttttgaaacctttaaaacaaagatggcttaatgtaaccattttcctgggatggattatgttgaataaatgtagaggaaatataaagccaaaggagtaggtagcagtgccaatggaaaatctaccaaaactgaagtcacatggctctgaaatcataagtcaatgagagaatatgattttttttaagttgcctttacatagtaccttctaggagcacatgttccaggccaccgatagcttttcctagtgagccttagataagtaaaggtcctgctagcagccttaaagatgtgtttgtgccattaggacatatgagagacaatattccaggggccagggcatttctctgaactgacaatcagttgtgcctagtttctaggtcacaactgaaacatgatgatgaagtctgagctgttagcccaaaggctagtagtagtgatttatttctacttcaacatcaacactatcttattgtagttatctatgtagactcctaaaaatgaggttctaaagaaaactatagttcaacaaagaaagcccaagggtgacacaccacatttattccaaacttattcatggcccacctcctaacttcaaaccagcagcctagcagagactaaccccaaaacagttttatgagaaaagacaaagggtcattaataacttcccaggcagggattggacaatgaggatatatgtcctctttcccagagagttctatgagatttggggaagctattatttaaagttcaaaaaactacatattaagattcatctagataggcaagaaggtgagactcagttacagctgttgtccttcaggcaaacaacttgccgctttttcatatgacagtaaagttattgtgaaagttactggctataacagggataattatcctaattcagtactatcttctgcctagtgcctgatgaataaaggcatcacgcaaagtgaaatggacccagcaactatagagccagcccctgggtgtttcatatcttcaactagaaaaacaatcgtaacgatgtggccaaagttccttaagtcccactacctaccttgacaaggtgctgtctctttagagagaaaggaattactttgatggtttcttcctttttgcccaatttggtgtttaataattacttctgctgaaggaaatcaaatattccatttttcatttttttccctgagggcaagtctgctttttcccctggcatgctctcaggattccctgctatcatcaaccccactaaggggaaagacaaccagggctccattcaaaatcatccaagggagctatggggcatgtgcaagggttcctctgctgccagctatcctaattcttgatggctttgcaggagaagtgactctctttggggaagaagaaaagaaggtcaggaatagtatcctctgtttggtggtagctagagtaacaccttgggaattagaagggcaattggatatgtaaaattaatcatcaacagtgttacaatataggtattaagagccttcagatatagttcataatatggtattcctaggcatatagttcagaacactgagtgcatatcttcaccaaaagactcctacaaaaatatcgacagcagctttattcacaatagtccaaaaccagaatcaactcaagtgtctgtcaacaggacaatggataaactatggtatattcacagaataaaaatactacttagcaatcaaagaaaacaaatgtgtttcacacaataatgtggatgaatctcttaaaatgttgagtgaaagagtatgaaaaagagtagacattattatattattccattaatatgaaattcaaggacagataaaactaatcaatagtcatagaagttacagtagtaattacaaggggcaggtattgacttggaaggggcatgagtaagctttctggaaggcttcctggaatcccctttgtcttaatctgggtgatggttacacagatgtgtaaatagtaaaaattcatcaaactgaactaacatttgtacactttgtgtattttaaatctcaataaaacttgaagggtgtgaggtgatattatcaataatttaataacaattgttgtcaaggatgtggagaaaaggaaacccttgtaccccgttggtgggaatgtaaagtagtacagccattatgaaaaacagcatggagtttcctcgaaaaactataagtagaactaccacatgattcagaagtttcacttctgggtatatactcaaaggaaatgaaataagtatcttaaagagatctctatactctcatgctcattgcagcatgattcacaatagccaagatatggaaacaacctgattgtccctcaacagatgaatggataaagaaaatgtagtgtgtatgtgtgtatatatgtatatacacacaatggacttttaagccttaaaaaagaatcttaatatttgtgacaatatgaatggactaagtgcagtaagccatacaccaaaagacaactactgattgcatgatcttactttctgtggaatctgaagaaggcaaactcatagaaataaagcatggggctgggcacagtggctcacgcctgtaatcccagctctttgggaagctgaagcgggtggatcgcttgagctcaggagtttggaaccagcctgggcaacacggtgaaacctcgtctccaccaaaaatagaaaacttagccggtgcacagtggtcccagctacttgggaggctgaggagggaggatcacttgaactcagggggtgtaggttgcagtgagccaagattgtgccactgcactccagcctgggcaacttagtgagaccccatctcaaaaaaaaaaaaaaagcatggaatgccagtagttggcaggttgggaaaacgaggcgatctgggtaaaagggtacaaactttcactttatgagtaagtcctggagacctaatgtacagcatggtgaatatagttaataagaatgtattgaggcagggctgtgacccatgcctgtaatcccagcactttgggaggccaaggcaggaggatcatttgagccccaagagtttgagaccagcctgggcaacataaggagaccctgtctctacaaaataataataatgtattgtgtacttgaaatttgctaagacagtagatcttagtgttctgagtacacacacacaaaatggtaactatgtgaagtgatagatatcttcagtacattaattgtggtaatcatttcacagtgtatgtgtatatcaaaagatcatgttctataccttaaatatatacaacttttatttgtcaagtatacctcattaatctagggtgataaaaggaagagtgaaaagaaagcatcttgagaacttctagtttccaaagtaaatgtctgtgggatattacaaactcatttttcatcaatgactaattttctagactgctttggtatcaagaagtgcctcattcttccatccttggattaggaataccgatcccagtccccaatgtttaaattgctcacaagcaagaagtagggtgacattaagaaggaggatgaattgaacatcaattagcaaaaatggtgtttcagaaatgccccatgggtgctaatgttaccactgcattaatatggtcatatctgtgagcaggggctgtggtgccatatagtggaaacactctcaagatgtgagtccagaaacctaaaagtctcagcttagatctcagaacttcctgggaaacttgtgtgagtctcttaaaagctgtacacttctatttcctcatttacaaaatggtgagggtgggatgagatgtttctaaatacccacaaaaccactttgacatagctgaataattggtcagtcaatggccacccaaatcctttgaggattcttcagagttaagacagttgagaaccaagccaggcctccccagttagggacaatcccactggtgaagacccagtctccagccccttccctaccaatatctacacagtgtctctgggatcacacacacacacacacacacacacacacacacgccattgtgggcagaatttgtggaagatcacctttctacagcaaaagttatcttctagatttgaatttttgcctttttccatgattcactgtgatgggtgactcgtgaaattttgaaagcattaattaaaatgcagactatattacttataaattcacagaattaagaataacagcagcaaaaataaaatagaacaacttcatattgaaaaaagtcttctaccagtgaaggattaactggaaagaaattatttcagttttaaaagaggtatatataagggactatcaattccagctaatttagagtacaagaggccagatttaccctcctgcctgaaacaaccaaataccaggaaaaatatatgaaacaacagttttcaagacactagaaccagtcaaagaggaacagtgatccctgagagagagagaacaaaggagaagagcactgtgtgtgccccagttaactgccttgagagagtttcaaagttatgatgtaggaagaagaaactccctgagccagaatctctaagaatagacagagctgagaatcccagcagactcaagcagctagagcaggggtgtccaatcttttggcttccctgggcaacattggaagaagaataattgtcttgggccgcacttaaaatacactaacactaataatagctgatgagctaaaaaatatatcgcaaaaaaattctcaaaatgttttaagaaagtttacgaatttgtattggtccacattcaaagccatcctggaccacatgcagcctgtgagctgcaggttggtaaagcttgagctagagtttgcaggacagaatactggagaggagatagctgggcaaagagagaactctagaaatctacagagggacccaattgaatattcagtaaagtagagatcagtgcatatatgtggaaaaactaccaagggctggggaaattattacccagaggattagagggaacagtacttggggctcaaacaggtccaggaatagtgccccttcccaccagccagactagaaaaactcataattcacaaagcattgagtagagagtactcaaaggcttttggctcagttgtggggaataattagctgtagaataaacatggctctgttccccttaacaaatcttgaaagacatgggccaggtgtggtggcttacaaatgtaatcccagcaacctgggaggctgaggtgggaggatcacctgaggccaggagtttgagaccagcctgtgcaagatagtgagaccccatctttaaaaaaattaaaaacaattagctaggcctgtacttccagctactcaggaggctgaggtgggaggatcacttaagtccgggagtttgagactgcagtgagccatgaatgtgccactgtactccagcttgggcaatagagcaagattctaactcaaaaaaaaaaaaaggaaagaaaaagaaagaaagaagaaagaaagacttgaaaagatgagatcgttttgaagtagctgagctgtgtctcagaacaaagcttaagaatatttacaggaatacacaaatatctaggactcaacaaggtaaaattcaaaatgcctggcactcaataaaaatttaccaatatgcaaagaagtgtgaaaataaacccataatgaggaaaaaagcaatcaatgaaaaataactcagaacgaaaatactagttagacttagcagataatgacattaaaataattactataactgtatttgaagaaatatggctagaattgccctctttttatttttagaagcaggggtctcactatgcttcccaggctggagtgcagtggctattcacagatgccatcatggcacactgcagccccaaattgctaggttcgagtgatcctcctgcctcagcctccagagtagctggaactacaggtgcataccactgagcctggccagagttgcccaaatttgataaaaactatgaacctacagatccaagaagctcaacaaaccccaagtacaagaaaaatgaagaaaattacattaaggcacatcataaacaaattgcccaaaaccagtgataaagaggaaatctttaaagccaccagaggacaaataggttatgtacagaaaaacaaagaaaaggatgacaattgacttttctttgagaaaaaagtgtgagaagagagtggaacaatattttttaaagtattgaaaggaaaaaaaccctcatcctagaattctatactcagcaaaaatatcttttaaggcaaaagtgaaataaagactttttcagacataaagttgaaagaattaatcaccagcaaattcacactataaaatatattgagaggtcctttaagcagacagaaaaatgacactaaatgaaaatatatgtctacacaaaggaatgaagagtgccaaaaatgataactacttgggtaaataaaatcttttctattatttaaatatctttaaaagataattatttaaacaaaaataatagcaatgtagtgtaagttttataatatatgtaagaataaaatgtgtaacagcaatagcacacagactgggaggggagaaatggaagtatacttttataaggttcttttactatatgtgaagtggtataatatcacctgaagatagactgtgattagttaggatgtatactaaaaattctaaaccaacaaataaaaaagttatgattaacaaggcaatagatgagataaatagaattttttaaatattcaatctaaaagaagatagaaaaaaggaaaaaagagaataaagcacaaaaagaacacatgtagcaagatgataaacttaaacctaagctgggcatagtggcatacatgcatggtaccagctactcaggaggctgaggcaggcagatttcttgagcccatgagttcagggctatagtatgctacaatcacacctgtgaatagccactgtactccaacttgggcaacatagtgagacctcatttccaataaaaacaaatatgaaccaaaccatgtcaataatcacattaaatataaatgatctaaataccccaattagtaagtagagattgtcatattggataaaaagcaagagtcaactaatatgttgtctataaaaacacactttaactattaagacacaagtaagttaaaagtaaaataaatggaaaagttattccatactaacactaatagaaagctggagtgactatatcactattagacaaattagattacagagcaaagaatattaccagggttcgataagatcatttcataatgataaagggatcagtttaccaggaagaaataactatcttgaaagtttatacaactaataaataaattaagtaaaaaatgatagaggtacaaggagagatcaacacatctacaattatagagacttcaatgtccctctctcaacaatatataaataaatttttaaaaatcagcaagaatataatagacttaaacaacaaaatcaaccaacttgacccaagtgacatttttggcacattccacccagcgaccgcaaaatatatattttttatttttttgagatagggtgtcactttgttccccaggctggagtgcagtggtgtgatcatggctcactgcagcctcaaccttcccaggctcaggtggtcctcccacttcagcctcccaagtagctgggacgacaggcatgcaacaccatgcctagctaatttttgtgggttttttgttttttttttggtagagatggggtttttccatgttgctctggcggtctcgaattcctgggctcaagtgatctgactgcctcggactcccaaagtgttgggattacaggcgttagccaccgggcctggccacatttttttttttcaagtgcacatagaacatttaccaagatagaccatattatgggtcacagaaaaagtctcaataaagttaaaatgattcgaactcatacacagtatattctctgatctcaatggaattaaagtaggaattgataacaaaaagatctctggaaattccccaaatatttcaaaactaaacatacttattaaaagctcgtgattgaaagaagaaatccaaaggcaattagaaagcattttgaatttaataaaattaaaagatgacatattaaaatttatgagataccacaaaagcaacacttaggaggaaatctatagcactgaatgcctatattagaaaataatcaaatcttattccctagccagtgatagcaatttctacctgaaggaactagaaagaggaaattacactcaaaataagcagaagaaaggaaataataaagatcagatagacaatcaatgaagcagaaaaataggaaacagtaaacagatcagtttaatcaatagttcattcttgaagaatgaaattgataaatctatagtcagaatgatcagaagaaaaatgagacacaacttactaatatatcagaaatgagtaaaatgacatcagtacaaattctgcagatattgaaaggttaacaatgaaatctttagaactacattattattagtattagtattttgagacaaaacctcgctctgtcactcaggctggagtgcagtggcatgatcttggctcactgcaacctctgcctcccaggttcaagtgattcttctgcctcagcctcccaggtagctgggattacaggcgtgcaccactacgcctggctaatttttgtatttttagtagagacagggtttcaccatattggccagactaattttgacctactttaggtcaatagatctgacaacttagatggctgaaaatttcttgaagaacagaaagtagtaaagttcactcaagaagataaatttaatgtacacagcccttttatagaaatcaaaagtgtagtttaaaatcatcccacaaagaaaatccaggtccagatgacttcactggtaaattttaccaaacagttaagaatgaaataataccaattccacacaaattattccagaaaactgagaaagaggggataattctctctttatgaggataattctttcttaaagaggggataattctaattctttgtgaggaaagcattactccaacaccaaaacctgaaaaagacattaaagaaaactacagaacaatatccctcataaacatgagttgaaaaattgtaaacaaaattttagcaaattgaatccaacaatatataaaaacaataatacactatgacaaagagtcagcatttatttatcccagaaatcagcacttctcttctaccttttactggaagttctaggcaggacaatcagataagaaaaagaaatagaaggcaactagattggaaagaaagtaataaaagtctttattgaaagaaaatataattttctatgtaagaaatataatgcaatctcaaaaacttaaaaacaagtgaattagcaatgaatattcagaagttgaaattcttaaaataccattcacagcgcattgaaaatattaaatacttggtgacacatttgacaaaaggtatacgagagctatatattgaaaactaaaaaatattgctaacagaaattagagaagacccaaataaatgaagagatatatcttgttaattgttcacaagactcaaaattgaacagatgtcacttcctctgaattgataaattcaatacaatgccaatcaaaatcctggcagccttttttttttttttttaagaaacggacatgctcactccaaaattcacatggaaatgcaaaaggacttagaatagtcaaaataactctgaaaaagaaaccatcatcctcagcaaactaacacaggaacagaaaaccaaacactgcatgttctcactcataagtgggagatgaacaatgagaacacatggacaagggaggggaacatcacacaccagagcctgttgtggggtgggggccaaggtgagggagagcattagggcaaacacctaatgcatgtggggattaaaatatagatgatgggttgataggtgcagcaaaccaccatggcacatgtatacttatgtaacaaacctgcacatgcagcacatgtatcccagaacttaaagtaaaataaaatttaaaaaaagagtaacaaaatggaaaggctaacactactggatttcaagaattaaataaaacatcagtagtcaaaagagtgtggtattggagtcagatcagcaaagagatcaatggagaatagaagtccagaaatagattcacacacatatggacaactgatttttcacaaagtttcaaaagcaacagagtggataaaaatagccttttcctcaaatggtgctggaacatttggatattcacatgcaaaaaaaaaatgaatttatagccacaccttgcatagaaaaatgaatatgaatcacagaactaatgtcaaacctaaaactataaaacttctaggaaaaaaaaggagaaaatattcacctttggtttcacaaagattttttagataagacactaagaataaaaagacaagctaccgactggaagaaaatgtttacaaagcatgaatctgataaataatttgtctctctaatatattaaaaaatctcaaaactcaataagaaaacaatgcagtaaaaatggaaaaaatagttgaacagacatttcaccaaagaagatacacagatgggaagtaattaaataaaaacacacttaatatcattagtcactagggaaatgaacattaaaaccacaataacatatcactactcacctattagaatgcctaaaattgaagtgattttaccataccaggtgttgatttaccacaacaactggaaagctcctacactgcaggctggaatgtgaaatgatccaactactttggaaaacattttggcaatttcttaaaatgttaaagaaaaacctacatatgatctagccattccactcctaggtagctaagcgaaataaaaacatggtccatacaaaaatttgtacacagctgttcatggcagctttatttgaaatagccaaaaattgtaaacaacacaaatgtctgttaacaggtgaatagataaacaaatgctagtatatttatagaatggataataagaaatgaactaatgatatgcataagaacatggataaatcccaaaatgctggctgaaagaaaccagacaaaagagtatgtactgtgtgattccatctaaataaaattatggaaagtacaaactcctccatagtgacagaaatcgtatcagtggttgcctgggggcaggtctaggatagcgaggggcaaaaaggcatgagaaatttttggagtggggctgatagatatgtttatgatcacgattgtggtgatgatttcatgtgtgtacacacgtcaaaacttatcaaattatacactttaaatggtgcactttaatttatgtcaaatatgtgtgtcaagacccagcaatttcactcaggtatatatacagtcaagagaaatgaaaccatctgttcatggaaaagcttgtactcagaggtttacagcagcatcgctcataatagcccaaaagcagaaacaacccaaatgtctatttactgatgaactgataaataaaaggtggtatgtccatacaacgaaatacagatgatcctgacttatgatgttttgacataaatttttttgaatttatgatggtgtgaaagccatacacattcagtacaaagcgtacttcaagtgcccatacaagcattctgtttttcactttcagtacggtattcaaaaaattacgagacattcaacattttattataaaataggcttcgtgttagatgattttgctcaattgtaggctaatgtaagtgttctgagcatgcttaagaacagctaggctgagctatatttggtaggttaggtccattaaatgcagttattttttttaatacttgaagttctagggtacatgtgcacaacgtgcaggtttgttacacatgtatacatgtgccatgttggtgtgctgcacccattaacttgtcatttacattaggtatctctcctaatgctatccctcccccctccccccaccccacgacaggccccatgtgtgatgttccccttcctgtgtccaagtgttctcattgttcaattcccacctatgagtgagaacatgtggtgtttggttttttgtccttgcgatagtttgctgagaatgatggtttccagcttcatccatgtccatacaaaggacatgaacttatccttttgtgtggctgcatagtattccatggtgtatatgtgccaccttttcttaatccagtctatcattgatggacatttgggttggttccaagtctttgctattgttaatagtgcctcaatgaacacatgtgtgcatgtgtctttatagcagcatgatttataatcctttgggtatatacccagtaatgggatggcggggtcaaatggtatttctagttctagatccttgaggaatggccacactgtcttccacaatggttgaactagttaacagtcccaccaacagtgtaaaagtgttcctatttctccacatcctctccagcacctgttgtttcctgactttttaatgatcgccattctaactggtgtgagatggtatctcattgtggttttgatttgcatttctctgatggccagtgatgatgaacattttttcacgtgtctgttggctgcatagatgtcttcttttgagaagtgtctgttcatatccttcacccactttttgatggggttgtttgtttttttcttgtaaatttgtttgttttgttttgttttgtttgttgagatggagtctcactccatcacccaggctggagtgcagtggtactgcaaccttcgcctcctggattcaagcaactcttttgcctcagcctcctgagtagctgggataacaggcgcataccaccatgtctggctaattttcctatttttagtagagatgggtttcaccatgtccaggctcacctcgaactcctgacctcaaatgatccacccaccttggcctcccaaagtgctgggattacaggcgtgagccacagcacccagctaaatgcagttttaacttatgatattttcaatgtacaatgagttcgtcagcacataatcccatcataagtcgaggcatgtctgtattattgggctgtaaagaagaatgtagtacaggtgtatgctacaacatggatgaacttcaaaaacattaagctaaataaaagaaaccagtcacaaaaggacaaagattatacaattccatttatataagctataaataatatttatagagaaagaaagtagattagtggttacctagggctgggggtggatagatgttgtggagaaatggagaatgattgctaaagggtacagggtttctttttagggtgatgaaaatggtctacaattgattgtggtaatagttgcacaattctgtgaatataagtgtacactttaaatggttgaattctatggtaagcggagtacatctcagtaaagctgttataaaaatatgtatgtcgattatgaattgttaattacttttaaaaggtatactttgtgttaccgaattcttctgagtcttaccctaagggtggttgtttttaaaaaagtgaataaaattcttgtacaggttagtaagtattctatctccattgcactgtgtcatattttcttaagtttattcaggttgtaacaatatatgaaggatgtttgaattcctttaattcttagcacacctgcttgcctctgaatagtcatttccatatatgtaaatatttttaaaaattgtttctataagcagttgtgtgctttttctggctatgtgatagcaagtgcaaatcagcaaaggaaggaagtatctttgttttaaaacttttcatcgaggcaaaacacatacagaaagtacttatataacacgctctttttggatggattttcacaaaataagtgcattaatatcactagcacccacatcaagatacagaccattcccagcatcccagaaactccctcacctttagtaaaatatgtcttttaaaaaatattgtagtaaaaaccacatagcataattttaccaccttaaccattgttaagtatactgttcagtagtgttaagtatattcacatagttgtgaaaaagagcttgagaactttttcattctgcaaacctgaaactctatacccattaaacaactctccattcttctttcaccccaatcccctggtaaccagcatcctactttctgtttttatgatgttgactactttagatatctcatacaagtatagttatacagtaattgtcttctatggctggcttatttcacttggcttaatgtcccccaggttcacccatgccatcacaaattgcagaatttccttctttttcaaggctgaataatattccattatatgtatatacgacattttgtttctccatggacatttgggttgcttctacctcttggctattgtgaataatgttgttatgaatatgagtgtgcaaatctgagaatgtcttttaatactaagaatagctaacactgttggcattaatgtttggaactgttctaaagattttgtatgcactattatctcatttaattttcacaatgatatgaattggggagtgctcttgtcatctccgttttacagattactaagctgaaaaacaaggaggttaagcaactttccagaaggtcacaccagtgaagttggaattctcaatgaatcagtagactggcaacagggctatgctgttaaccaccatgctatactgccccttctttattttctataacgatgctacaaagtgtctcctatgaagcattgcccatgtgtgcactcataaaatgttcaggtcacccaattacagttctgttaattaaaaacatgagcattccctcatggagccccacatttctttcaattttgactcatttacaaactgcagcatcataaatcatatttattaagcacccgatcttctaaagttccttttcctgttctggccaagcatttcagaagagctgtacattggaatgaagaaatcaaaattagcttcagtacttaattctataaattagtacagacttaaggggggaggggagtaattagccctcttgccctgaaaattaatgggtccttttcattatacgcctaaggggtattttacccaataacattccatttcagattaatataaaatgaagactatgttatttgagaatgctggctacataacgattacaaaccacaaatctcacaaagattagccgagaaggaagattaagcagaacaacgaactagtaataattctagacgggatgaaggtaataaaatcaatgtgtcaatcattctaccagaatcaagaagacacaatattttttgaaggcatggccaggcttgtgtaaaataagagttgatgtagttctgtataggttaaactaggctttcaggagtgggtagttactgggtagttacaaaagaaattaaatatactccataaatttcaattttaagatgctagggtctatacaaaaagacactctcttttctacatttctagggaaaatcctcttccctttcctgaacaaaaaggccaaaaatggctcaaaacatcacagattgagtgtcagctactccagatgaaccactagggggcagatgcagacagaaactgaccaacaggttaccagagaacccattcacactcagcgacttgagatagactgctgataattgcttcctatatgtcaagttgaacttacatttatcttatttccttactaagaaccagaaaccaaaataaagctgcccatttttttcttttgtctttattatgatgcttaagtaaccatttgtaaggaatactgacccaggggccgtgatagcagctacgtgaatgcaagggcaatacagttttatttctattcctctccaactccagttttacagtcctttacatcttgacaggcactgggtgcattctggcttacccttgtggttcccctcatcactggatgacttgtggtctgattccagaagcaatatccccaaacaaatctgactttataaggcagcccattgccacacacatttaacctacaccacagtcatttcataataggcaagagttcactcctcccactacataatgctgtgctgaagcttagccaggaaaagttacaaaagatagaaaaactaagtgtcagacctatgcagtaaatcgtgtaattcctgccaatttctgaaaccttcatcctacataagcccatgaagaaataactttccataaggtggtcaaagctggattgtgaagtactcccaatctcatccatatatcactgcaattgttgtctatatgctgaggaataaaaatggatggtttttcattcagcaaactggacacttaatatgtgccagactaaagatgtaaaaaatacgagccctgtcctcatggagcttgcagtcaagtagaaagccagatatagaaaagaaggaatattataaataaataggatattacgttttatgtaaaatcagtgatttggacagggtgttgcttagctgggagtaggggagggagatgagagggatcagatatcagataatgctttgcttcctgaggaaggggaccctgagttcagtgttaaagggtgaattgagatggccaggtaaggctgggtgtggtggcttacgcctggaatcccagcagtttggtgtcacgggtgggtcttatgttcttagagctctccagatggtggtgggccactcccaggatggtggtggccgctcccaaggtggcagcaagccttttgttctctgacctggggttcttggcctcacagattccagggaatggaaccttgggccatgcggtgagtgttatagccctattcgaagctgtgggtcatggaagagaactgtggaacccagtgactactgttcagctcgattaggacgaacccaggcacttagccatgcaggaacaatggcaagcctttagcctgattgggagcggcactgagcgcgtcactggatcagaagtgcagcatataccctgctggatctggagggttggaagtcaatggtgggtctgcaatggcggcgaacagcagtggtggacggtgagcgaaagctcagctcgagcgcgaagaaacatgggccagaagagtgtgcagttgcaagatttaatagagtgaaaacagagctcccatacaatgggaggggacccaaagagggttgcccacttccagctcaaatgcttggggtttatatatcccaatcattatccctccccctgtgctctcggatgatagatgatttgactatttctttacctcctgcttttggcctaattggtattttagtgagccctctttactacctgattggtcaggtgtgagctgagttacaagccccgtgtttaaaggtgggtgcggtcaccttccccagctaggcttaggaattcttagttggcctaggaaatccagctagtcctgtctctcattgggaggccgaggcggggggatcacgaggtcatgagttcgagaccagcctggccaacatggtgaaaccccgtctctactaaaaaaaaaaaaaaaaaaaaaaaattagccgggcgttgtggcaggcactacttgggaggctgaggcagaagaatcgcttgaaaccagaaggcagaggttgcagggagctgagattgcaccactgcactccagcctgggcaacaagagcaaaactccatctcggaaaaaaaaaaaaaaaaaaaagagatggccaggtaaagagaaggtggaagagcattagagccaaggcagacatttgtagtaagaggcaaggcaagaataagatgggtgtgatggtggtggtggggtgggtagataccacataagttctatgttgctgctgtgttcactgggagttgtgagagacaaagcaggagtagacaaggacagagctctatgggccttatacaccaggtggagggtcagggactgcaacgtttagtcaacaaagagctgggagctgttttgagtagaggaaattgattgctctggaaggatttgaggggcatgagattaagatcagagagactagttaggaagtggtacaattatccagaaatgaggcaagcctgagctaaggcactgatacttggggtcaaaaggggtgacatcttgggattcagattggcagggcttggtcatttgttggatatgtggatggggtgaaggtgaaagagtaatgaggaatgactcagatttctagtttggatggctggaagggtggtggggccaccattggagatggtgaactcaggaacaggagcagaattaggggacaacaatgagttggattttaggtaatttgagagtttgaggtatttcagagatatctaggtgccgatatctggcaggcatgtaaatatcagccaggtggacctaaaagtatggctccagagatcgtttaggctgcaaaattttttttttttgagacggagtctcgctctgtcacccaggctggagtgcaatggcatgatctcggctcatagcaacctctgcttcccgggttcaagtgattctcctgcctcagcctcctgaatagctgggattatagacacccgccaccacacccggctaatttttgtattttcagtagagatggggtttcacgaagttggcctaggctgcaatcttaagtcaccagaagcagaaaagatggagtggatgaaatttttccagagaatgagtagagcaaaaggacaagaagaaaccctcagagaaccccagcattgaagggataggtggaagatgtgggtcaccaggctggagcagagaaggaacagtcagaagcggacatcttgtggcagaaagtgccaagaagaacctcagatgataggctaaaagtatccaaacatcctactcatgtcattatcatttagtaaatatttgagtatttagtactatgaaagtcattataggaggagaggggatcctaagaaatctaccacaggacccttgatctcaagagccctctaatctagtgggagaaacaaaccacactcataaaagaggtcaaatgaaagcccagagaagagccaaacagctggggagagtgagatctggaggactctgtgggagtaagggagccaagaagattttaaagagaagcagaagttggctgaccttgagggccaaatgggccataggtggaggatgcaccaacacaggagaacatgatacaaaggccaagaggaggacaatgtagtatttactgtggatgggacagccacttcacattggagaatcgagacggatcctactggagaggtagctcaaacccaggtgtttaaaggcatgtgtgcctgccttggggaattcagatgctgcataagtggaaatggaaagttcaggaaaaggactatctttatcagcaaaccgtgaccacgtgtgtatcctccaaagaggagtaagaagaaatgttcctgcccttcagagacaaatcaaaggagcatttcagagaaattaatacaacagtggtgtatcttttattatgtatttttgaaatagtctgacaaattcagtttttgtttcattttcagacgatataatttatctgctctctttgttgccaaatttcctggttactgttattttctgcttaaccctcaaacttcaacaacaacaaaatataataagacactatctcagtgagacttagcccattagagtttataaacttcatgctttaatagtagcttttctacttcacagtgcctcagagaaacctatgcctagattcttcagaaatcactaaaatatgagcacattaggcaagtggatgataaactgtaatatcaatttggtactttaaagcaaaagaactttctaaaatgcgattgtatcccactcctatttaaaatcccgaagacttacaattcaataaaagaaaggctaacaagttagtggaaaaatgggcaaaggccataaagaggcatttcaaagaaaaagaattgcgtatggcaataagcacatgaaaaacgtttcctttcactcttatacttcactaacatttaaagaagtgcatataaaaaagccaggttgctgctttcacatctgaaaatgtttgctatcatccattgttggtaagggtgtagggactcttatccaatgttaatgggagtgtaaattggtgtgtcttccaggagggaaattcagtactcactttcatattgtaaatgcatacactccttgacccagcaattttactcctagaaatttctcctacaaatattcttgctcaagtgcttcaagatgtgtgtaaaaggatatccactgccatattttttattgtagatttttctttttccttttttaaaaacaaaatctagctcatccagtaagagggggctgagtagagtcactgtggtggctacatacgctggtcaatgggaaatcgcaaacaaaatcttgtagattgaggtgtgctggtgtggccttgtccatgatctacatccctagagaacctctacatcctcttttaaagactcttatttgttcccgaaaaccttgccactatgcgaagagctgtttcctgaaaaattgcctacattagtcttactggaaaaaattgtactgtgctctaacccaacccaaataccccaaaatgtttcgcagacagaaaaaaaaatcaatttgaactatgaaaacaaatttgtgtaagtaataaacaccaatttgcaagcatgtacaaaatgaaggtccactgttcttgcccaaaaaagacttgacagtggatggtggcggtgaagtggcatgcaaggaagtcgttccttggaaggggaatttggcttctgtgtgttttcttcatcatgatatgggctcatgattatcctgtgctgaaactcttcttaaaaagaaagttagctggccaggcgcggtggctcatgcctgtaatcccagggctttgggaggctgaggtgggcagatcacttgaggtcaggagttcgatactagcctggccaccatggtgaaaccctgtctctactaaaaatacaaaaattagcctggtgtggtggcacgtgtctgtaatctcaggtactcaggaggctgaggcaggagaattgcttgaacttgggaggtggaggttgtagtgagccaagatcacgccactgcactccagcctgggcgacagagtgagactccgtctcaataaataaataaataaataaataaatacacaaataaataaaaataaagttagctatgtggtggcccatgcctgtaatcccagctacttgggaggctaaggtgggaggatcacttgagcccaggaatttgagactggcctgggcaacatagtgagacccctgtctctaatataataataataataaagttataacatagaaaaacatttttggggcagagtaaaggctaaacatggagtgttttgatcatgttgaaataacacatatgaacaacagactgaaaatatgtgggagatgcaccacttcacccctctcacttggtctgtgtatgcaaagcaaaacattttggcttaacccatgcattgtgcacagttccaattagttccttataagaatctctgactagaaaccattattcaggtaaactggtgaatgcatctttgcctgaaaccataatataaaaattccacttattataatgcatttatttagtatgttttgtggaagaaacagtatgccaattttttaaaaaaagttatcccccatgccaggcgcaatggctcatgcctgtaatcccagcactttgggatgccgaggcgggcggatcacctgaggtcgggactttgagaccagcctgaccaacatggagaaaccctgtcactactaaaaataccaaattatccaggcgtgtggcacatgcctgtaatcccagctactcgggaggctgaggcaggaaaatcacttgaacccgggaggtggaggttgtggtgagccaagattgcgccattgcacttcagcctgggcaacaagagtgaaactccatctcaaaaaaaaaaaaaaattatcccccaaatggtgcaacttttcaaaagcagttatagcaaaggaaagattagtaattaagtgaaaaaaagaggcaagttgcagaacaacatagcgcaatctcctttttaaaatggcacatatacaccatggaatactatgcagccataaaaaaggatgagttcatgtcctttgtagggacatggatgaagctagaaaccatcattctcagcaaactatcgcaaggaaaaaaaccaaacaccgcatgttctcactcataggtgggaattgaacaatgagaacacatggacacaggaaggggaacatcacacaccggggactgttgtggggtggggggaggggggagggatagcattaggagatatacctaatgctaaatgacaagttaatgagtgcagcataccaacatggcacatgtatacatatgtaacaaacctgcacattgtgcacatgtaccctaaaacttcaagtataataataataaaaaataaagtaaagcatcttaaaaaaaatgacatatacccataatatgtgtttctggaaagaaaatcctgaaaagacatctaagaaatagtaacagtgtttttttttggggggggtggggggcaagaaagacatgtgtgctgtttaaatttttactatgtgaaagtaagatttttataatacaaaacaggctgaatgaagaatactttggggatcagtgattttgtagactagagaaaagggttagagttagtgttcaggtgttaacatggagaacaccgcaggatctgtctgtccacataggcactacccacagcccggagtgcctcattacagccccaccaaactacttgctattcccaaaatgcactatgcaaccctgaacctctgtgcctttgtgctgtttcctttctctggaatgccctctctaaactcatctatcaggaaacttctcatcctttaagatctagttcaagtggaccttcctatcggatgtccttcctgacttttgcaaaccctagtccctccccaggcaaatgggctttttctgggatggatacttgcggctcagcttatgtgctgtgaatgactcctcttgggccatgcctagctgcttgggctaccattttccagcctgagaaaggggtagctgaaggtagggtaggagagcatgcaatacctgccccagtctgggtgcagggtttactcacaaatatcatggcatctctccccactttcatctatcagagccaaacagctgctttctgtacctcttcccttaaggctgttggaccagaagccaaagccttagctcttattggcttagtccatgctaggatttgggaagatctgtctccgactacttgggcttacctacttgattttactgaatgagataagttaattcttcagagcatgcttcttctgggttatgttggccaatgcagagttggccttagagtcacaagaaaagtcttcatttaaacttagtgagacagccaggtggaagggggtccctggagaaactccaaccggcctgcccaatgaggtgcagccttgggaagttcacgatgtttgcagcagggaggagcctggagcctaaatttctgtggccgtgggatggacaagcaccccatctttagctgaactaaggaaaagtcctgcaacatttttggcaatgtggggctcaagaagcggtgaatgaaatagggattcaaaacctctcactgtagtttctaagccttttcatcctgagacttctgagggtggggaaaacacccccccaccccccattcctcccgggtcttttcaagaccttttccttcctttttcaggacccatcggtgagcagcagctccccgccgctccccactccctgccagggctgggatgcatggcccaaggatccagtacagccgctggctgtttcccagccacaagccatggtggtagctttcctcttccccagccaaagggttgtactccactggacagtaattaagcttaatcttttctctctgatgaaggaaccagttgcataagaataagaggttcttccccaggcatttaaaaattttttctttcctcttctccaccctgtcagcagttaacgtttaaagtttatttttttccccttgactaggccagaccccccaactatcactgtttatacttcctgtaaaagtttaattgtggaaaaggatttgtggggctagtcttgggttgtggccaatctgatgtgctttgcatgtgtgcatggtttgtgctgcaagcctccatcttgtttcacatcctgggggcatggcctgtaactgtttggcaaggctttgtttagcaatcctgccttagggaatacgtttctttccgaattgatgtctgcatgttttcctagccctgtcttttaaagggccccacccaatgactgggttttcttctgcatgtctgtgtgtgtactgtgtgcaatgtctgtccaaaaaagctctaattaatttggcccaaagaaagacaagtgcttgaatcaaatatttttaatgggaatgtaaaatctgtgatacctttcagttcacatgactttaatctttaagaaatgaaaacagacttcaagcttattggtaaaatgcaggtcagatgcaaggtttgctaaatgttttaaggttacaaactgcttgtggggttttgagaactatttgacttgctggcttcacaattggtaaggcctgggaacatgtggaactaaccgggctcttacctaagacggcaaaccttggctgcagttagcacacaattaaagcaacttaccaagttttaccttaaagttaaaaattgccaggagttacgattataacatgtaattgaaactactgaaaataaatttacatgcaaggggtataagaatagtaaaatgtgtttttatgtaaaaggttataagaaggcatggaaatgtcaactttttttttttttttttggagaccgagtctcactctgtcgcccaggctggagtgcagtggcacaatctcggctcacggcaacctccacctcccaggttcaagcaattctcctgtctcagcctcccaagtagctgggattacaggcacgtgccaccatgcccagctaatttttgtatttttagcagagacggggtttcaccaggttggccaggctggtcttgaactcctgacctcgtgatccgcctgcctcggcctcccaaagtgctgggattacaggtgtgagccactgcacccagcccggaaatgtaaacttttgcctaaggttaaacgattcttttgagttagatagggaaagctgaaggttcaaacaagtggtggaaaagtggaaatcaatcttgcagaagagattctctgtgtgaacatattaactaagttcaaaagggttatgaaaggtttttgcttctttaaaatgtctgagtcatcattttgggaaaataaatagtttatggtaacctgggactctatttcataatatgaagtgctttaaatgtatttaaaaggcttcccaaaatcaaacttacgtttttagaactgtctttcctgacacctggcttttcaaatatttcagagggcccctgaaacatccagaaaaaagaagtaaacaagattatgtgatatgtgtaggtacatgggattgccaaaatgatcttcagtcttcttcagattatacttttgtgaataatactaacatatgttccaaaactgtatgggatttctaaaattctaatgtctgaatatatgctatgaatcataattaaggttgctatgttaagttattgtaaaccacggagataaccaaacttctttgtcaattgtgtttctaactgtaaccaccctggatattttgctgttcacagacaattgtcctgttttctttcttttcaaaagatggtttataataagctataaaactgtaacaggtgctctcaaatacaggcttctgataactttggaaattgtaacattggaataaaggaaaacgcacaggactcatgaagagctgaaatgttcacgaatatcaagcaaaacaaaagttaactaaatggactgaactcagaaagctgaagcaaactttttgacttttggttgtaatattgctgatccttgtttggtttttcatagtcaaagaaacttatttaaaactatttacagcctttaataattgagtaaggtatactcctatgaacaaaatttggagcatgtttgtttctctctgcttggttcctctagagtttggaaactctctgtgagtattcttaacttatggcaatatagttatttgcatcagtgcactaagaaaaattcatttttcttttgcaacaggacacaattggagaaaatggttattttgccaaggctttgactagaaggatatgcttccctttaaggagtcaagctcgacttggagagccattaaaagccccgtggggaaactggcctcatacccctgcctacacagttcctggacagggttcctgacccatggtcagtaaagaatgtcaccttctaacaggtctaggagctccaagtttatcttgggaccttaagaggagaggatcacccaactcacaggtatttgaggatacaaacccatggttgggcttggctttaaaaggtcctatctgagattccttgtggaacagaattccatcaaagccaatccaaaaggcatatgtagaaataattattcttgctgtactttatgcaaataatcaggccaaatataaaactaaactctattttgcaaaccactcagtcctatgatgatttgttttttaacaaacatgaggactggagagagagaaatcatgtttcaaaacttatgtttgtcattaaattctaaactcactagttgtttttaagtttttgcttacattttagactaaccctgcttgttcctgtgaaccaaccagtaatttctggctgcagttcagaaagaacaaaaaggatgggtaatgtagaaatctggatcaatattctagttctgagcaattatcctgccaatcctgccaggtgatgggaataagtaggatgcccatcacccggaagtttcctttagggaaagtaggaccaaaaaagagctaaccaaagacaaacgccatgtgcccaaatcctagcaagcataactacagccaccagttatctgggtttgtcacaaaacatcctttcccctccatctttggaggaggactcagttccacagttttaacttagcattcagcttatgataaggtgtctatgcaaccccccgagacatatttttgtccaaaactgaatcccaagtttcatgtcaaagccctaggaaggaaaactggatctgagggatccagaggcaaatgacaacagaggttaaaaggcacagcgcaggtgagcatggctgattcctgcttattaagccaagcccaagctttctgtttcatggataaaggccacgttaatatccatggcataaatgagttctagggaactccaaggctactgacagcaggtgggaaagagacataattgagagcagataattcctattctttagcccccccgccgccccgcttcattggtacaagccactttggcactcatggcaggacctgccaaggaagccgggactcggggatgcaaggatgaaagatggaaagaggacgctcttccctttcttcctcatgtaccatgagtatctgctagcaagagaagggaaacagggatgcctgctctcctttttgtagatgggtagtcactcatctccagtctgtacccctttcaaatgcatcctgaacccctgggactcctttaaaagttgccctctctttttcctttcttctccttgggcctctcttcactgataggtaattgtgtctctgtactatgggacactcccctcagatgcatcctccaacctgaaaagagttaattttccaaactttaaactggttggcttaggattggactcgggggaagggaacccagaagcccaacatgccagcaaaagggtaaagtttattacctgcctctctctgtgtaaactggtaaaagccctcgggatttttgagctgtctttacccctccccttgtttcattttgatacatgttttctaataacccagtttgtctgttcttgccttcaggccatcagactccaaacagtcatgcaaccaaagcctctgacaatggccccttctgctgggaacccttaggcctctgagggagatctgactgccgcttccccaaaacagcgcccctgtcaaccggaagcagttaagattggtcttcatccttctccttaatctaatggcagttagatgtacttctttagagtgggggatgagacagccaggtgggagggggtccctagagaaactccaaccagcctgcccactgacatggagactcgggaagttcacagggactttgtggaacccaggatccgcagggcctggtgggaagcgctctagcatagggactctggccttgcaagagtccctgtttcccactttttcccccttttcacccgataaaaccctgctttactcaccctctaaaccatctgcaagcctaaattttcatggccatgggacagacaaggactccatctttagctgaactgaggaaaagtcctgcaacattagaaagttcattcagagtcggtttcaattttttttaataagagaagaaaaattatctagaatgaagttcctataacatatgtagaagtctgttttgttctttgtgtccttacacccaagattaaatgatcacaaagagaactacaagacattcactagaaagataagctagagaagttagtgaagttccgaaaaagaaaaacaatgtgaggacactaaccctaccaaaaattcaaatctgcagtgatgtatgtctcagcaattggaaaagtgggtgaataaagaatgaggccaatgagagagaatagaaagtccaaaaattgaaccaggtacatgatgttactacatgacaaaaatagcatctctaagtttagtctaaaataggaattagaatgaagagcttgtagtaatgtggtagaagctaataataagcaaacaaacacactcagtgacgaggtatactatatttcgtcagttctaagatgcacatttattcacacattgacgtctgtgaatttgggatttaatatctcggaactcaatggtacctcacaatctcacaattatttgtcacttctatacctaaataggcctaaaagaactctgtcagtgtatataaaataaaaagttaagtgatgaaaaaaatagcatctctaatcagtaggctcataaggactttggattactgggttgtgatctaaaaacaaaagttggatccatacctcaatatatctcatatgactgtatgctagaacaagctttaagtgattcatagatttaaatgtaaaaataacaagtagaaaaaaaaaagaaaccataaaagcatttcaagaaatatgagtgaatagaccaagaatatagatgaataacaaaagaactaatataaatggcttctaaaacctgtaaaaatatgcctaatctcagttattattatagaaatacaaatgaaaattaaatcacattgaggtattatttctcacctctaagactgacaaaaatctaaacgtgtaacaatacattctattgatgaggttatgagcaacaagtatcagatattacaggtggaaatgcaaattgacactatcagaattacaaatgtgtttacgttttgaactcattctacagatgcacctgcacatataagaagtgatacatgtttataattattcactgaagtactgtttgtaatagcaaaagactgggcacaatccaactctcacaatagcgaactggttaaataaactttgccacatccacacaatggaataccatgtggctactgaaatagaacagacactctactctatgcactgttatggaaaaacactggaacacagaaactagtatgattggttacctaaagggagcagtagagaaaggggtggatggggagggtggtagagggaattatgccttaatatatgtctttctgtatcactttaacgttctactattgtgaatgcatttccttttcaaaaaatttaaataaaaattttaaatatatattacagaaatctaagttgaatgtatttcattgtattaacaagacaagcctgttaacaaactttgcctccttattaggatctattgtgatcctttgcttgttgtgatgatcctgtcatatgtcatattaaattgtaattgttaaaaggagaagtccagagaatgctaattacacctattaggtccatagattagaagaaagatatacatagataacagttacaacatatatttccatcagttattcattgagaattcatatgatggaggatgtttgggtattttgtgggtattcaaaaatgtgatccttggcttcaggaaaatgatatttgatcgtcaaaaagagatttgacacatcagctcctagtgggaacttacagcaggtttcctcactaagattaagtcattaaacatcatgattgttagagaaacataccttggaatcttgttcagcctatgtggcctggaggctgattttatctccactgtaccaaccccagaaggttttaccatggtgctggatcagaggaatgtcatgattcaagctttccttttcacaactccatcaacatgtttttcttcatctccagcattggggcttcctctgtcctctctctacctttctgccagcacagctttctcttccccttctttttgatgctgttcagtcacctagaaagatgtgcagtggcattcacagtcaatgattggcatcagattttcctcattattctgccatagagtcagcattgaaattgatgggaaaccaagtgcaatcacatgaaattgattgccatttgggtcctattgattatcctgccaaatctaagacaagaagaatagctatgctggatggcaaaaaggcagtgactacacatatttcagttgtcatttagggttggctgaaatggcatctgcccattgatctagaccagaaaatatgaaggagttgcccttacaaaaaagcatgccagtggggggaaacactcattcttgcccactaacggtgacctcttaaacttaccttctatttaattaggaattcactaattctcccttttctaacctacaaaactgagaactgaggacttctgggactgtggtggactgagttactataaataatcctcctactgcaaacacacagaggtgctggatgaaatacatcaccaataacttttaaatatatagtttagatcaaataaaggaaggggaatccctgcaagtacaaaaataagaggaaatcaaaagcaaagccccatgggtttgggatgggggcagggtgcagtgtcaggcccagatggaggtcttcatggccaggcgttaggattaaaggtccatataggagcagaagacatggccttggatccataaataatgagttggaacttatttcattttacaaagcaaggactccagtaaagttgtctcctcaatgaaggtggactagaaaaactctactgattggcccaagaatttaacaagggaggttgtcattgcccaaaactctaaacggattttttaaaaaaagtttcctggaagaaaatgaaccccgaggtatgtgccacaagtgggtatggaatataaatttttactacccatacagtatgaaagtctaaaaaaattaaaataaaaactggtgttagaccaacaaaatctctgagccatctggccgagagaaatagaaaaacaattttggaggaatcctacaatacagggtataggggatgtcagagatgttttaaaaacattggccaaaatattttttatattccactgagagttggggtctatgttccttctacttaaaaccaggcaggctcctactaggaccctgaaagaagcaagaaaaaataaaaaacgaaaataaagataaataaatccaagcaagcttgtgaccgctttgacaaacggaacacagcagaagtgatgctacctaatttctgaggctaagctttaagaagtcttgaacctaccatcttgtttgctgaaaaaaaaaaaaattcaccatcagaagactgccatgctggagagtccacatgtaggtgttcccacctacagtgtcagatgagcacttggctcacagctagaatcagtttccagccctgtgagtaaaccatcttggacgtgtaacccagtcaatccttcagttgactataggcccagctggcatctgactacaacagcatgaaagaatccaagcaagaactgcctagtcaagccttccctgaatttctgacccacaaatgtgagcaacataaaatagttattttaagcctctatgttttgggagaatttgtagaaacagacaaacagaacaaaggggaagaaaaagtatctgctgaagagatgctcattaacacaaattataaacatgaaaagaaatggcccacaatgaaggagaagtccacagaaatagaaagatattgagaactggcaacaatgtaaccatctgaaggatactatacatcaggtatgttaaaaatgattaaagaagtttgccaacacactctgctaatgagagtgtggtgaatcgggcactttcatgcattgttagtgggaacacaagtttctaactcctaacaaaatgttacctttggagaacaattgggttatatctatcaaaattataaatgcaggtaccctttgcccagtaatcaccctctgtgactctattccacagatacacctgagcacacataaaataataacaaacacacgcacaagttatttactgcagtattatctgtaagagcaaatggctggaaacaacccatgtatctagcaataggatactggttaaactatggtatggccacacaatggaatactatgtcattgcaaaaaatgaatgaggtcatgactttatgtgcaaaaagtaagatacaataccatctatataatatataatactactttaaggtaagaaagagaaaaatcaggctgggcatggtggctcatgcctgtaatcccagcattttgggaggctgaggtgggcagatcgcttgaggccaggagttggagaccaactgggtcaacacggtgaaaccccgtctctaccgaaaataaaaaattagccaggcatgatggtgaaggcctgtaatcccagctggtcgggaggctgaggcatgagaattgcttgagcccgggaggcagaggctgcagtgagctgagatcatgccactgcactccaggctgggtgagagagtgagactccatctcaaaaaaaaaacaaaaaaaaaagggaaaaatcagaatataaattcaaaaatccttatatttgcacaaagaaacactgggagggtacacaggaaactaataaaggaagttactgcagggaggaatacgtcattttgatttttaagctacatgaataaaatgagacattttaaacatgataaaagaaggagtcaaaactacaataaaaggaaaagactgaaaaaagagaaatatttgaaaagggaatatgaaaaatagagtcattagaatgaaaaattgaattagtagattagacacagctgagaaccaacctaagaaaattacttataattcagcaaagagaaatgaatagatagaaaatacgtcaaagagattaggaaacatgaaggtgagaactgaaaggtccaacatacatctaataagagttccaaaaggtgaaattagagaaaatgaggtagagacaatatttgaagaaataatgaatgggaaatttccgtaactgacgaaagatgttaatcatctctttcaaaaataggaaatttaaaaaaatcctaatacagaaacatcacaatgaaattgaaaaatactgaaaacatatagaaaatcgtaatcagagaaaaaagaccaaggaacaaaaattagactcaaaacagacttagtggctgcagcagcaatagtgccagaatacaattgaatattatctttgttaacctcaattctattctcagccagatttgcattcaatattgagacaaaacagacattcttagacaaagaatgacagcactgaccactcatagacctttgctggaaaaaaaaaaaacaactttaaaggatacacttcaataacaagggtactgaacccagaaggaagaagtggaatacaagagacaatgtgagctaggtcattgctcaacatggagttaaaatctaaatacacattaactataaaaacaatagcaacgatgacgagtaataggatgttaaaaacaggggacaactaaatactgggcaacaaaaacgtggaaggtgggaggatcgtgcttggagtttgtgctccaaggtcttatcttgttcaagagtaaggtggagatactaacttttcatgtcaagcatgcatgttcagcatttaagaatcagcactagccgggcgcggtggctcacgcctgtaatcccagcactttgggaggccgaggcgggcggatcacgaggtcaggagatcgagaccaacctggttaacacgatgaaaccccgtctctactaaaaatacaaaaaaattagccgggcgtgatggtgggcccctgtagtcccagctactcgggaggctgaggcaggagaatggcgtgaacccgggaggcggagttttcagtgagccgagatcgcaccacggcactccagcctgggtgacagagagagactccgtctcaaaaaaaaaaaaaaagaaaaaaaaaaaaagaaatgaaaagaaaagaaaaaagattcagcgctaaagtaatggaatcataacttctaaaccagaaaagaaagaaagagaaagcagtaaaaaaaaaaaaataggagcaattcaagaaaacaagaaaaggtatgatacaaaggaaatgcaaaataaaatgttagaaataaataaaaatatattaggaaccacaataatacatgtgaattaaactcaaaagttataaaatagtttctaactttagatttttttaatccagaaaaactccttaaacataatgacacaaaaatattgaaagtaaagggatgaagaagatatacaaaccaaagaataacaaaatagtcagatatggcaatatttatgttaaacaaaatatacttcaaaataaaaagcattatgtgatattaagttgttcactacacagttataaaaagaaaaatataacagtcatgaattagcttgcatttaacaatagattttcaatatatataaagcaaaaatcaataatattgcatagaaaaattaaaaactgtacaattagtggggagttttaacacatctctttcagaaatatatagattaagagggtaaaatcctaataaggatatagaggattcatacaatacaattaataagttttacttaatggtcatgcatatgtctgagtccaacaatttgcaaataggtatttttctcaagaatacctaagaatacatacaaaaattgactatatacgtgatcataaatatgtctcaacaatgtcaaatatctcactactaagcaaaattactgcataggaataattgtactactctacatcatgtgtcatttgacttatttaaatatgtttatgtgtgtgtgtgcccacaccacaggcacgtatctggagggatggagggagagtaggggttttctaaaaagaaaatagatttgatgtaaattatttggaaagattatttctccaatatctttctttctttttagaaacagggtctcattctgtcatccaggctggaatgcagtggcattatcatagctcactgcagccttgaactcctgggctcaggcaatcctcccacctcagcctccagagaagttggaactacaggtgtgagccatcatgccgacttgtttctcagtttcttgaattattgtaacgtatgatttcatcatctacgtgttgctattttcattgcattatagagctgtaaatcataagagtggtgtttaattgacaacaacatttgttctaaacatctatgaatgaagcatttcagtttgacctctatatgaggttttggtggcaagaacgaaatgtagggtaatagatgaaagaaaagatctttaaaatatcttggtttctttcttgtcaacctatttaaacattcttattagctttgtagtcctacaagaaaatagctgaaatatggagaaactcattgctttattaaacattcctgtgatcttattcctgcgaacttcacagcataagagaacctgtatcgccgaatggtggcaaacaaataatgaattgaatctgacctctttattacaggctgaggtgccccacttatgtttttgtttttgttactttttacatcaagcacagtacaaaattctatggctctcaagcctataattactgccttgcatatatgacgagattaagaattaggcttgtctttttgacaaagtttcagttgtcagattttccaaacagtattctaatcatagatcactgaggcatgggatgaaagatcttgtctatgtgatagaaagctaaagacttagtttccaagtccatcccataactgcagaaactttgcggacactcacccaacttcagtatgtcaatgtgaatcttatagcatctgttgggacttccaaacttattatattgggctgagttcagagtatatcaagaagaatgcaaaaccataaatgcacataaaattcatgtatagaaaaattggctgatctgatatttttatttcataaatacctattaaaccatcgaggtagatagagaaatttaatcataatcagttaaaataatgattataggatataatgggtgaaatatttgggttaaaataatgactgtgaattgcaagatcttaacatcatttctgaatcatcaaaaaggatgtgttcaatgcccttcaatgttgattatattttgttgtatcatcaatcttggaaaaattatcgatccttgcatgggatgaaaagagcagaataaaaatgacattgtttcttaactgcctactatgtgctggcactggactaatgcctttgcaggagttatctcatcaaatcctcaagatagtctagtgcagtagggtgtaattgtccctgttaagcagacatgagacagactgagtgatgctttctcatttccagggttacctagctggtggatgacatctcagcatcagactctaggtgtttcttattccaaagtttatgttcttcccaccacgtgttgccactatatgctctacaagccgtatattttgaactgtttaattcacaagaagatacatttttgaaccagatatgtatccactttgcaaaagaaagccaatatggttgcatcatttaagtctctgaagcagctctgttttcctgtattttgaaggatgcataaccagttgtatcaatttcgtgtagcaaaccatcacaagaaaaacaaatattatgtttaatttgcaaaattgagttctacaacttcatttattcatttgtttgttctcttctttaacaagcatttattaaatgtttattatgtgcccagtatcacattagatatcagagaagataaaaagcaatagaataccatagaaaacctcataatccggctggagaaaagcaatgtacaaatatacaattaaaagcaaaacaactgtagaatgattctaaaataaaatgtagacaaatataagacaatatgtttcgagcttcagaattcaaagaaaggtaaatgtcactataaagtatcattaatgaggcaaggcttagctgatgaatagaattgtaaagacttaaaaaagagtgtgatttggttcagctaggagggatacttggctttagaaaatagcagaaacaaaacagagtatgggactgagtcctctctgatctcctaatctgacttaggctttcctcttctgctccctctttgagcactcgtcacatttttctgagaatttatgaagctacctgcctagttcctgtaagcaagggctctgtcctttcatttaaacatctctggcacatgggagtttcacatataggtggtgaatgaatgaatgaataaatgacaggtgacctttggttgagaaaggactttggtgggtggtccatgattagaatcatagacttccccagctctattcagcttaaataaatagtgctgcatatattgagtaaaaattatgtatgactggctcattttatttacaatataaatgaattatttaaataacaatggtgtgtcttttgctaggtgttgattgggcaaatcttgtctgctttagttgttccaaattaaaacattattttaccatttcatgcttaaatgagatcacatgtgccctgccaattagaattatatcacgtctcttcctattttatatttcagtctcttggatgatatgtgcctgggtaagactgttacagaaagcagtctttgaaaatctggtgaatcattccaccttgtttacatatatcaaaacatcacattgtactacataaatgtatacatttacgatttgtcaattaaaaataatattagtttttttaaaaaagaaaatatgatgcagtaactagttaatgattaatgattctgtagtaagggcatcaaaaccaaaaattattttttccacatcatgtattattttttttccaacttttattttaggttccagggtccatgtgcaggtttgttacatgggtatttataaattgcatgttgcaggggattgatgtgcagattattttatcacccaggtaatgagcatagtacccaataggtagtcttttcttttctcctctcctctcctctcctctcctctcttctcctctttctttttctttctttctttctttttctttctttctttttctttccctccctccctcccttccctccttccttccttccctccctccctccctctctctctttcttcttttcttttctttctttttcttagagggagtcccactttgtcacccaggctgaagtgcagtttcggctcactacaacctctgcctcctaggctcaagtgatcctcctacctcagcctgccaagtagctgggaccacagatgcacactaccatacctggctaattttttgtgtttttggtagagacagagtttcaccatgttgctcaggctggtctcaaactcttgaggtcaagtgatccacccccctctgtctcccatagtgcatgattacgggtgtgaggcaccgtgcctggcctccagtaggtagttttttgatcctgaccctcctgccactctccactcttgagtagaccttggtgtctattgttctcttctttgtgtctgcgtgtattcaatgttttgctcccacttataagacagaacatacactacttggttttctgttcctgtgttaatttgcttaggataatagcctccagctccatccatgttgctgcaaaggatataattttattcttttttatggttgcatagtatcccatggtgtatatttaccacattttctttatccaatctgccattgatgggcatttaggttgatgttatgtctttgctattgtgaatagcgctgcaaataacatacatatgcatgtgtttttatggtaaaacaatttctattcctttgggtatatacccagtaatgggattgctaggttgaatggcagttccattttaagttctttgagaaatctccaaactgctttccacagtggctggaccaatttacattcccaccagcagtgtataagcattcccttttctgcacaaccttgctagcatctgttattttttcactttttaataatagccattctgactggtgtgagatggtctctcattgtggtttttatttgcatttctctaatgactagtgatgttgagcattttttcatatgtctattggccatgtgcatgtcttctttcaagaaatgtctgatcatgtcctttgcccatttttaaacggggttgtttgtttttttgcttgccaatttgtttaagttccttatagattctggatatttgacttttgtcaaatgcgtagtttgcaaatattttctcccgttctgtaggttgtctgtttaccctgttgatattttcttttgctgtgtagaagctctttagtttaattaggtcccacttgtcaattttgtttttgtttttattgcaaaattttggcattttggtcatgaaatctttgccagggcctgtgtcgagaatggcatttcctaggttttcttctagggtttttatagcttcatgtcttatatttaagactttaatgcatcttcagtttatttttgtataaggtgaaagaaaggagtcgagtttcaaccttctgcatatggctagccagttatcccagcaccatttattgaataggaagttctttccccattgcttataattgtgaactttgtcaaagatcagctgtttgtaggtctgcaactttatttctgggttctctagcctgttctattgctttatatgtctctctttgtatcagtaccatgcttttttgttactgtagctttgtagtatagtttgaagtcaggtaatgtgatgcctctggctttgttccttttgcttcagattgctttggctactcagactcttttttggtttcatatgaattttagaattttttctaattctgtgaaagatgtcattggtagtttgataggaatacattgagtccggaaattgctttgagcagtatggccattttaactatattgattcttcctagacatgagcatggaataaaaaacctaccatccagaaagtgccatagaacatatggattcacagctaacttctatcagatgtataaagaagagctggtaccagtcctactgaaactattccaaaaattgagtagaggctcctccctaactcatcttatgtggccggcatttttccgataccaaaacctggtagagacatgacaaaaaaagaaaacttcatgccaatatccctgatgaacatagatgcaaaagtcttcaacaaaagcctaatcctgtagcacatcaaaaggccaacctaccacagttaagtaggctttatccctgggatgcaaggttggctcaacatatgcaaatcaataaatgtggttaatcacataaacagaactaaagacagaaaccacatgattatctcaatagatgcagaaaatgctttcaataaaatttatcacttcactttaaaaaccctcaacaaactaagcactgaaggaacatacctcaaaataataagagccatctgtgaaaaacccatagccaacatcatactgaatgggcaaaagatggaagcattctccttgagaactggaacaagacaaggatgcccactttcaccactcctattcaacatagtagtagaagtccttaccagagcaatcaggcaaaagaaagaagtaaagggcatccaagtagaaagaggggatgtcaaacaatctctcttcagagatgatatgattctatatctagaaaacgccatagtctctgtccaaaggctccaccttcatgacctcattacctcccataggccccaccacctaatactatcacactgggggttaggatttcagcatatgaatttgggggagacacaaacattctgtccgtaacagtagctctcgtttgcttacttcctactcaaggtccctgtccttaaaacccacctcatttaaacatgaaccacagaaaaagattgtgatcaaaccccttacaaaaatataacaagtaaaaagagggattgaagcaaatgacatatcagcagataatgaagacactggagacaaaaatacaaccaaaagacaaatgaaacctattatgtaatattacaaaatgaagttcaaagaaaataagaaaactataaagctacaaaaaagcagcgtatatttggagatttctcaaagaacttagaacagacctaccatttgacccagcaatcccattactaggtatgtacccccacaaaaataaattattctatcaaaaagatatacgcattcatatgttcattgctgcactattcacaatagcaaagacatgaaattaacccagatgcccatcagctgtggattggataaggaaaatgtggtacatatacaccaaggaatactattcagccataaaaaagaattaaatcatgtcctttgcagcaacatggatgcagccagaggccattatcttaagcaaactaatgcagggacagaaaaccaaatactgcatgttctcacttataagtgagagctaagcattgagtccacatggacataaatacaggaacaatagacaccatggactactagggagggaggcagttaaaaaaactacctatcaggtactatgcttactaccagggtgatggaatccttactccaaaccttagcatcatgcaatattcccatgtaacaaatctgtacgtacatgtactccctgtatctaaaataaaagttgaaatttaaaacagtgaaaagaaacagcagcatagaccagaaatgaaaaagttctgaaatgctataactaaccaacaagagtgtgtgaaaagagctttcaggattgggtgtggcagctcacacctgtaatcccagcactttgggaggccaaggagggaggatcacctgagcccaggagtttgagaccagccagggtaacatagtgaaaccccatcttccaaaaaataaaaaacaattaggcagggctggtggtgtgcacccgtagtcccagctacttggaaggctgaggcaggaggattgtttgagcccaggattttgaggctgctttgagccatgatcacactactgcactctagccggaggaacagagtaagtccttgtatcacacaaaaaaagaaattttatgtcttaaaacagagtcagtgtattagtcagggttccctagaaggacagaactaataggatatatataaattagagtgagctgaaagtgatatatataatacatatgtatcaaggggagtttattattatcattattattttgagatggagtcttgctctgtcacccaggctggagtgcagtggtgcgatctgtgctcacagcaagctccgcctcccaggttagcgccattctcctgcctcagcctccggagtagctgggactacaggcgcctgccaccacgcctggttaatttttgtatttttagtagagatggggtttcatcgtgttagccaggatggtctcgatctcctgacctcgtgatccgcccacctcggcctcccaaagtgctgggattacaggcatgagccaccgcgcccggccgggagtttattttaacttacacaatcacaaggtcccacaataggctgtctgcaagcttgaggagcaaggaaagccagtcctagtctcaaaactgaagaacttggagtctgatgtttgaggggaggaagcatccagcatgggagaaagatgtaagctaggaggctatgacaggggtggctggggaaagaggctgagtggtgtccacagaacgagtcatcttatcaccttgattattaaactcctcctctgctgaggtcacccactggtgagcactcacgtgggatacaaatatcttcacagtttttgaccactcagagaggtccatccacatacctcttccccaaatttcttcgtcaccaattttcctattatgcttctttcaagtccctgacaaccagccaaaccagtggctacagcccattaatcagtatataatcgcacatctggccatttctccttccatgcaaagtccacaaccatgtgcacttctcaaatttctgcccactgggaagatttccttttaaagggatgtcctagaaagggctgtagtgctattgctgtccacttttgggtggtgcctgcatatcatgcagaaccatctgtgaaccaggccctagtcttctcttcctctatcaactgatcatagggaactccacatgaagccactggtgcaggctgggggacagaaggcagggcggcaggagtggagaccatgggcatttgagccacttcgtcatgtaacttacttgtgctttcaggacctgcttgagcccgatcacttatataccacttccatttgatgatggaatgctgctgtgcatgacccactttgtggctagatgggtcagaaagcacccagttcatgataggcagttcaggtctcatggtgacttgatgacccatagtcaaacgttcagtttccaccaaatcccagtaacaggccaagaactgtctctcaaaaggagagtagttatttgcagaagatggcagggccttgctccaaaatcctagagacctccgctgtgattcacctatgggagcctgccaaaggctccaaacagcaaccctatctgccactgacacctcaagcaccattggatctactgggtcatatggcccaagtggcagagcagcttgcacagcagcctggacctgttgcagagccttctcctgttctggaccccactcaaaactggtagcctttcagctcacttgataaatggactggagtaacacagtcagcaaacaaagaaaaaatcatttcagaaacaaagattcagagtaacacaagaatgaatataaaccatgtaaagtacagtaagggaaagagaagataggaaaaaatgaaacaaacagaaataaaattcctctgtgaaaaagcaaatttcctcatctccatcctcttgaatcttgcttgacgacaaaacctacaatgtttatttttctaagttatttgttgaagtttgattaatcttactcaaagaggttatagttaattaatttttaaaatatccagtttcgaatagatattcctgaaaccaattttgcatccatatccttctcaattcatttgataatttgaaaacattaacaaaaacatttttaatctggttttcaaagggaacatctgtgcattattgtttgtgacagtggctttgttacagcaagtgaaacatctggagagacttgattacttgtcgacagaaacttcaatgcaatacataggtgaatgataatgtattcccactgggttcaaatgaataagcccagccgatggggtcaacctaaactaatattctggagcaccacagtatttgaacccttttattctgagacattccttgtggtgagtctgtatctgcagccattttgggtactacctaacttaaaagaagaattaagaccttttccctgtggcttttacactaagtatcagatgtggcccattcactctcattcttaggttaattctctgctagaaacaaagaaaattgaagtctcaataatccagactgtttgaacccatattaatagcatttttcagtccttcttttcaatacagagtttcagttcccttggttgttagagttagtcggatagttagttgggtagctgttatttgccaaggaacaactttagggctgcagagatcaataggtgaacaactagcttctaagaccatagaagataattcattgaccattctaactttattacagcttaattaggtaaaaagtgtaatgtctgtgagtgcctaacaaagtgctagacatgtgctaagaatacaataaaaattgaatctaagtgtggcagacactactggttatacgcacaaaggctatttcctcctcctttcttgaaggcagagaacctctcttcccagagattgaaaatactaacttctcacttaacaggctctcttgcagctaaggcatggacatgtgacccaattctggccaatgagaactgaggaggggagctcctgggaagacttcttccccaataagaaatccctcacgagtgcagacatctcttttcttcagttgggcattgttgtgtttccattcaatgcctaaacccatggcagccattttgcaaccatgaagggacaagcctaggtagccataaataccctgaggaggtcagggcagaaagatggaagaagcctgggtacttggtgccagtgtggaaccaccaaaccaactctgacaccacccacctccagatatcttggtatattaaaaatgagaagtatccttaatgatgaaactattttagctgggtatttagatacatgcagccaaaagcattaaaaccaatacactaaaggagtgctctcattttcaaatatctcaataaaactcaaaatcagtttgcccttaatgtaccccacaaaatgttgaacaataagccgccactggagaagtgggtcctcaccaaacgctgagtccatttccatattcaccactgcttgtcctcaaatattccacatccacaaaatgaagatggtttttgtttttcaactcatttagagtttatgataactggtgacctaattgatttgtggtccccaaattaaagacactagaaaagatttttttaaatggtggttttccatgtaagctctgcccaggctttgctgtaatttatgaatgtgctaacagactaaaggacaaagtgatacgtatcaccagcagagttctgagagcctgcataatgtacattactccccatcattacataagtaataaccatcaaacacactggtgagcaatgagtgactcccttgcttctgagcttgtaccctgcattgtaccctggtgcccaataatctttgaggatgacatcccaaagaaatcagaggcccaaacaagagcagaacaaaccagcacagtgcctcaaagaatccagcccagatttaaaagcaatgaacaattacaggatatctgattaatatttaatgaagatgtaaatgatgagagtcaatactgaattgttggtgaaatctattacagcaagagaaagcagcagtggtctgtagaaggagtgggaactgtctttcttattagccattgttctttaacttctccccagctctagctgaggcctgggctcagattccccaaacagctgacaattgcagcaagagtgaaatcaatcttataatcctcctagccattttattcctaatttccctctttgtatgccctttttctatttcagactgcactcagacacaaactccacatagggtttctgacatcagacttgcctattgccaacattctgtctgtccctctgtcagctgggtgtctgcactgacgagagaggcatgatgactccaaggcaattcatcacctctgcgatgtggggagagccgctgagctcacttgtgtcagaagaagctgccaattcctcagtcagagcttgggggcgcatctgaaggtgctggtccatgaaataacacaggagaaagggagaagccgccagaagtagtggagagagaatcgagggctacagggtgtcagtgaagaatgatggctgactgttcaggacactcagcctttaaggggccaaaagatgccaggggcctgtctttattgctcggcctactcttggtcccccacccagaagaggcaataacagtgttgagggctgggagcaaaagaagaaaaagaaaaaaaagagctttctaggaaaacatcttccccagcaaacagcccttcctcccaaccaaggtaggaattgaaagatgcgaaatcaagcccaaaggcttcttttctgttttcccagttggtctagaaaagagcagcttatttgtccaactggcggagaaggatgcatcgactttcctggagcaccagtctgcagagaacagcagcctgtgggaactggttcctcacgttgggggcttaagtccattcccagagcagccaggccatcggcataagcagcatgaagccccccagtcaagctacccaagtgccagaggattgggctttgccttctatcatgatgatcacgtcctccccttgcacatccctctgacctctcctcagcctgctgtagcctcagtgagactctgcataggggaatcccaaggatggctgctcacacaccttctctccctgctccagaatgctcacctcagagtgggatggtgagaagagctgctcagtcactctgtcatcacctttcagagctgttgctttgctatctggtagctcagcgggtgctttcctgtcttagtctattttatttgcaaagactgattcaaggatctacagaactctcagtcccacactaatttttttctttctctaaacagacttgtgaaggctcaagtgaggctacatgtcatcaaagatgaaatgttttgccttgctatgttagatacagaaaccactctaggtatttcatacagactggggatactaccagaagcttgttgcataggtcctagaagagtgagaagtgaaacagggacccataaggcaacacaaagatttgccacagcagtaagttgctaccacccttaggactggggcaacgtgggaggcagtggtgttaccagagatcagaagttagggccatagggcagaagccagagatgtagtgaaggctgccaggtgggtgctgggactgtgggaagtagagctaccagatggggattgtacttgtctattgctgcaaaacaaatgatccccaaacttaaccactgtaaacaacaaacttactaccttacagtttctatgggtaaggaatctgggagcttagctgatggttctagctcagggcctctcatgaagctgtaatcaaggtgtcagtggggctgcagttatcttaaggttcaactaagggagggtctgctttcaggctcactcacatggatgctggcctgcctcaagcctttgttggctattggttgaagacataagttccttgttgtgtggccctttccacagggctaaactagaacagtatgacagctttcttcctctacagcgtgaaatcgagagagagagagagagcaagagagagagagcatgtgagaaaggaagagcaagatggaagtaacagttgttttgtaatctaatcttggaagtgatatcccagtacttcagctatattgttagaagaaagctattaggtccagcccgaacaaaaggcatggatactaggaggccaggatcacagggggctggatacatagaagtggaagcagcttcaggttttgggggcctgaaacaccatctggggaacgctttttaagaaaaataatgaaaattacagatacaaaattatacacaggtctatcgatcggtgaatgtttaaacaaaatgaggactatccagacaataaaatattattcgtcaatataaaggaatgaagcatcagtatatgctacaatgtggatgaacctcaaatacatccggctcagtgaagaaaaccagtcacaaaagaccacgttcacttacatgaagtgtcgagaataggcaaatccacagagacagaaagtagattagtggttcccggggcctggggttgggagccagaattgactgaaaacagacacgagagaacttctgggggtgatggaaatgttctaaaacgggattgtggtgatggtgatgcaactcgataaatttactaaaaaccattgaaccacatccacttacaatgggtgaattttatggtatgtaaattatatttcaataaagctgttaaaaaatgatacacacagggcattggaagaggtctgcgcaagtgaggggccctggagcttcagcttcattaacttttcaggaaatttgtctctgtggaggagacacagctattgcagagatgctgcctgaggcagtgagagggtggggagatcacctggcttcttccctcttttctccctccagtcttctgcctgtgttttctactggctcaaccttcccggaagccagggaaatggagtgccttgtgatacagagtggaggatacaaaagggtgggtataggtctgagagtagaggtgaatgacaggctcatggaccaaactctgcagtgatagctccacacccacatgctaagacagcttggaatgactctaccttttggtgtgagagatgtcttgagaagaactccagatgaggcctgtgttgaatgaagacctaatctgttgattgtttgttatcaaacattataggatgctggatttgtcagttagcttgtcactcattggtcacctgaaggctcaaaatcatttagtcatacgtatgtatgaatgaagggatggagagcaggctttgagtgggtaagaggtgagggatgatgaaataactcatgaaagaagaatatattgaagatgttaaatattcaatattgaatgtattgtcttggctgcttttctcacttatctcttagaaacaatgggtactaaaggcaaggcaatgggcacagctggctcagggtacaggcaagaggaggacacatttttctgtgaagaaactacaaacaacactaaaaccaaccacaaattggtctctattttcttgttagcatgtctaagcaattctaaacaacgtcaatgataaaatactcctccttcacctccaaaatatctttttggatcaagttctacaattgcagaggttagcgctgagttttaaagaacatatgtaagtttcaaattggcatattttcatgacttacccttttaataaagtgttttctgcatggacaataatgcgagaacccccactcacacagcaggctgctgacctacgtggactcagctacaatccatttgattctagagtaagttcatgttggttcagaatcacttgaactcacttcagatgcaatttgcctctccatttgctgtggtacttacatattcctacatttaaacggtagctttgaaatcacaatgagaggaccgtggctgaaaaaaaaaaagaacttgagatgcttcaatctgtcattcggtgtgcacatcactcgcggaatcttgtggtgttcaatgaattggacatgtttcttcatgtgggttccccctcctttaaatacattactataaataaaaatattaattcagtttatttttcctttttggtactgtaatatttatttttgttttgcttttttcctggtgtgaaaatttaataaaaaatattttcactatctgtgtttctctgggactgttacaattattactttcatttcgtgaatgttactgaaaatgattttgttatatgaggaagggagtgtaaaaataatctactctggatgtcaaatatgctaggtatgctactgcttataataaaaataaatctgtctccacaaataaggaaactgaggctcaaagatgttaagaaaattgcttaaaattacacaagtagtaagttatagaccagccattctaacaaagattgtacagtcaatatacagcacgtaggcttaatacataggaactcatttaatactaacagccatacgaatggagaacatccccattttgcaagtgagggaattaaagtacagagaggctaaatgaacttgcccaagttcccacagctagtactatggcagaacgaggatttgaacactggtagaatgctccggatactacctgtgtaatcttcacactgggcttcctcatcaaccagggtccactttgaaggccgtgctcagctctcctgtcagctgcagctgagcaacttagacctacttgcagctgctctgtcctcttccaccatcctctcccatgtttaaggatatcacccagcagatgcatgtgggggatttctaagagcaaaaattgcaatatgctctgaattcagttcagcttggttgttttccaaagactttgagaagggaagaatggaaaagaagactgactttttcgaaataggatccatggcattctaagatatatttaactcctgtaggcatctttgtgcgctttaataaagtctgaagaaaactgcttattggtgccaccacaggtaatactgacccacaacactagatggcaaagtggtgctacgttactgtgtcgtgatctgaaaaagcctggtgtaagtcttccaaaaaaatccaaatctactgggctttttttttctttttcatttctaaatttattttaggaaaacaaagttctatgtgaagttaacaacttactttaaaaaaatcattgtttagaaatgccctattttgaattgtccaagtctttcaggctctctcaagtaggtaaatatatgtcttcttgcctaatgaccatctggtcaaaagctactatctaattgatcagataaaaaagggaggataacagaagataatagagatagtatgaaatgtactttcaaaagctgcatgttaacataaatgtgacaaatgtatatggtgcagatgtcatctggcatggcctcttctgtttaaataaacttagaagcaaataacaaattggacacaccgctgttcatttcattcattcaaaaataagcggcttttatgtacaaggcaatcgtaagcagcacataacacaaagagttctactctgacatttaagaaatctgtgttctagatggggacaaaagacaaatgcagcaatactgttaacattcagcgcctgaatcattctttctccagagcctcgtggtgagagctgctgatttccccctcctttcttcctcgcaagccttgggaccacccaagatcctgaccagggcagacagtatatcaacatattaagactgggctccacgcagcaagagctcagggctgggtttctattgctttctgaattgtcttggcaactcaaatctagcatattgcctgcattatcagaggtgccgaataactgttagcaagagacaggaatcagtgtgcgtagccaccaaagaagataatttgtctaggatgttttctcgaactttgccactggcaatgaagagagggtggatattactggcatagagtatcaacagcaaaggcacagaggcagagaactctgttctggctggggaagcctgccatggttagagcagtgatccttaaagggtgagagtgttgctctccccagcagtatcagcatctccagaaacttgttagaaatgcaaattttaggctttgcctcagacctaggaaatgaaaaagtactgggggaggggacctggccatctctgtgttaacaagccctctatgtgattctgatacaagcccaaggtcagaaccactgggttagggtataggccctgccagggagggttgataaacaaggtgaagtacacaggtgttagaccttgaagggtcttgtgctaaggagatttttttttttctgtttgttttatcttgtaggcaatatggaagccattgagagtctctaagcaggaaggtgaccagaacaggtcttcacttcaaaacagttgttctggtgatggcatcgaggaggatgtggaaggagggaagatatcctccttctgggcaattctagcttctcttctctcttcacctcaaagctcagcccttggatctcttctcttctctttctatagccttatcttctggtgacctcacctactcttctggtgtcagccacccgcctccgcagttgatttccaaatctcttctacctctataatctttctttcgccaagtggactgactggctcaacttcctggatgtccagctgtcattttacccaaaacacagccaagtattaactcatcatccactaactagagtttctcctcctggtttcttgacttctgttaatgccttgactgtctacattgccatttaggctataactgcctgtgggatcacccccaaagcttcttcaagcaccaggctcaattaaccacttcctattcaccatcccaggagtcctaggcacattcttttatcccaacatattaacatgttgtcagtgtttgagggtaaacatcttaagggagaaaatgagcttcatttatatttgcatcacattggcatccatcagagatagggtagacaatggatgtttaaaggagtaaattcttccccttaaagctgagggagaaaaacacatcggagaagagtagagagatgcctgcaatgccaatggacacaggggttgcaaaccccatcgatgccatagatggtccctggcaaacccttaaggccaggtggagattggttatgaagaaatagaattaggttacaaggaattatcagagataataggtattaaggcagagagaacaggtgtatattaagctttctagaagcctggggaagataggaagggagatggactagtatttcatagagggaaagtaaaggaaattttggggggtgatattttgggagtattatttgttcttaaagatagaggaaatgtgaatatgcaattcaagaaaaagaaaaaaatcagcagagtgagaatgacttaggatgacagggaagtgtccagggagagctcaagcatcacaaagaggaagaagtagatgagatcatggacacagaagaagggctggcctaggagtaggagatttggctaacagacattagtaggtgtgctgcatttgcagtttgtgagcatgtcttctctgatatcagtgaggagaaggtggataaagatccagagatattgaggctgtgaggatgaaaagtcagcaagttcacgtggatgcctgtgttggtgaagacagacaaatgaaggcaggaagaagttggtggccttggggagagtggaaaatgtttagaacaaacatctagaatttgatagacaatgagcaacaggccccaaacacaagcttgcaagccttttgattttttttttttttttttgcctacctccaagatattccagctgagagatggggaggctgggctacccataccccacacccggcagtcattgattatttcctctgtccccagggatcaaccctctctcatgggccaagcacaggggattccaacagcctgatgacaatcccctcataaagatgtaggtactgatcattggaaatgaggctgaggtgcatggaaatgttttatggatcagataggttatgggccaagcaccagtggcatgtgctacacagtcattgcacttcctggcttgactttgtaagtggtattgaaaagtttccatgggatctgggattttcctttggaaaactggaagaaacaatggagcagaagcatctggagaggcctggaatgacacttcttagtgtaccctagcagttttcaagctttgcccacactggtcccactgcctgtctgacctttgctccttcccctgcctgttgaaagccttcccatattcaagccccaggttaaaagtcactttctctctgaaatcttccttgaccaccaccttcacccttccctaagcacaactgtttcccaaaataagaacatttatgtagtgctttacagtttaaaagcaattgcacaactctttttttatatacattatgttaattagcccccctctcctctgcagttctttggcattctgttcattacaggaatgcaatgctttattgatttatattgtaagaaaaaaaaaccctagatcttcatttcgtctaccagacagtgaatttattaaaaaccagagtcacatccaacccaccttcatatcccatatctctagtacagcactgagtccatattagaaacgtaaaggcataaattgaattaaacgaatgaatctttatttaaaatatatgcttacaagaagccgcagtcttcaagacccagttcgatgacaatttgttcttatcccccactagtagtatcttctccagattaaataaacatagttccttctacagtcaacccagaaaaatcttttcgttctttaggattcaaagtgactttgttcggacttctcaaaattattcatgtatctttaaagctagggattcagaaatggccctggtgaattctgaactatcaatacttctaggtacatcaatacttcctggtgaatgattgtgaaccaattattcttggtttggcacaggtttggggtgggttttggattgattttatttctgtttagtaaaatatattaatagttacaacaaagttcttgcccctaaattcagttagcattattcttcactgttaaatagtgagggcttctgtcttgaatggcatagtagaagaccaccttttttcttaggatcagccagagtaaattataaataagcagtttagttttaagtacatgccagtgtttttgatgtgtagccaactcagaatcctctgtttaacccacagcatccacatgggaaagaaaacaaacagaatgacctcctcaagtctagaaatatgtggccaggttgccccaatccaaacttcacctacagtttccttcaatttgtgggactcccagcaagaagaatgtggtagaaaccatgttttagcaccgtgaataccacttcactatggctgctgatatggtttggctctgtccccagccaaatctcatcttgaattgtagttcccataatccctacatgtcgtgggaggaacccagtgggaggtaattgagtaatgagggtggttacctccatgccgttcttgtgatagtgagtgagttctcacgagatttgatggttttataaggggtttttccccctttgctcagcacttctccttcctgcagtcatgtgaagaaggatgtgtttgctttcccttccgccatgattgtaagtttcctgaggcctccacagccatattgaactatgagtcaattaaacctctttcctttataaattacccagtctcgggtgtgtctttattagcagcatgagaacagactaatacagcggccatgttctgaaagccatttctagctctccttctcactgttgagatctgctgggaaatagaaattgtggtgaaagggtgcagtgtttcctaaactgagctacacatgagaataactgtatgtattaaaagtatggatttcctggacctcactcccctcagatactgattcagttgacctgaggttggaccagagaatatatacattgattatccatttaaagtttttccatatatatatgaaatatatatttcatggtgtgtgtgtgtgtatatatatatatacataaaaaatatgtgtgtgtatatatacataaaaatatgtatatatatataaaatatgtatatatatgtgtgactaagttacaagtcaagtaacactatgtcaatcaagtcccctctcctccatttgatatttgaccacctaacacacagacacacacacacacacacatacactatgaaatatatgtatcatatatacaatatatcatatatcaccatgatatttatatatgtgtgtgtgtatatatatgtgtgtgtgtgtgtgtgtagatataagactaagattggactctctcagaagcagaccctgaggcaagaatgtgagagcatgcagtttatttgggaggtaatgctgggaagcactgataggggagtgaggaaggggagaaagccaataaagcattcactcaagattttcacctcaggatacaggtaagatgggatatttgtcaacttccattgttgactctccggcatttccaggttgacaaacaggtgaactaagggtctctggcaaccaaagaaagtccaaagacaaagagttgcagctgtgttcagttgagggccatctggttggcttgcacagagatcgtgaatgtccagttggggcactaacagtgtctgctacaacaagcatccctgatgttttggatataaccaaggctcaaagtagaccagatttgagtaatctcactaggattttatgcaaaaacccaatagttttatttgctttttttttcatgatcttgctgatcaaactccctcttctcaacaaccatcaacaaagataacaactcctgccttttacattgaaatggatttcaattcactctgaaatttaagctgcaacatttactaccaaacaacttgtgtgagcaatgcatagctgacttgaaatggcttggattagaaaaaaagaaaaaagcacagggtcttatcatttgcaagagaggaagaagagaagaatcatagtccacagtgaggtgtttaaattgtttcagtagttatgaaatgaagaacattgatattgtctatgcatcaagactgcttgagatcccctccagctgcagcattgggaccttaataaacgaggcatattatgtttatactttactgtttaagtaatgctatttcactctgtgtaaagccacttaaaacaccagtggaaacacatgcatggaccatgaaacaactttaaatggataatcaatttttatcacatattgagggttagactggtatatctgagtgaattatgaaagcctgtatgtgctctggctaggagtgtttgcataccagatctttgtctttgttacaaaaccaatctattgtgaggtagttgggagtttccaaaatctaacactgaaaaactcttttctttatgaaagaatttttcagaactttaaatacacaggtgtattttagatgtaaaaaacttaattcctttgtatgacaatgcatgggatgtgatcaacacccaagacatcaagaaggtatgaccagggtgaacatgaacttactgatgaaagtctagaatgcacagtctaccctaaaactacagggtatggttttggaagaaacatgaagaaattgtctatgcagtaactattaaacacatggaactcattatactcactaagctgggcaggatgagaaggtaaatgtggtcaaggcaaatttagataaattcattgataacagaatcataactgttcactgaggggaaattaggcaggttcaggttacttccctagcctctgaggatgatgtcgtggatacaaattgccacattcttagaaagcattggtgtcaccttcagagatagcacaaggttggtggaccacacagctgacaaattgtgacattatttatattcactagaggatgttgaaaatgtcataaaacctgagtgcctttaaccaccaaaaagccatcagttctttgatttccctacttccttgaaatacttgcccctgcttttctggtcccaaagctgaatgaggtgaagaatgtgccctgccaccattaccctccactacacatcccacaaagtacacaccaactgtgactaagacttcctaaagcaccttccaaatcaatattaccctctattggtaagtaaggatccagaattataaggcaataggccaatcttaactctttaataaagtggttcatgcctcatccaaatattcattaattcagcacattcaaccatgttctaagcactaagctagagtcaagataaaaactcctgccaccgggcgtggtggttcacgcctgtaatcccagcgcttcgggaggccaaggtgggcagatcacgaggtcagaagatcgagaccatcctggctaacacggtgaaaccccgtctctactaaaaatacaaaaaattagcggggcgtggtggtgggcgcctgtagtcccagctactcgggaggctgaggcaggagaacggcgtgaacccgggaggtggagcttgcagtgagccgagatcgcgccactgcactccagcctgggcaacagagcgagaccctgtctccaaaaaaaaaaaaaaaaactcctgccaacatattctaatcatcagtttgtttcacttttaaaacccagcattatgtgcagcgtgactaagtgacaagtcaagtaacactatgtcagtcaagtcccgtctcctccatttgatatttgaccacctaacacactcatacactcaggcacaaccacaggggatacacatattccttaaatctgaatcttcatatcatgacaagtttaatcaagagttctgatgctataaaatatgatattgcacatgtgacaattttatcctgtattaattgattccattaagtcttggatttttttaaaccagtctgtgtgctgaaatgaataaacacatgtattaatgtaaaatactcttacacgagaaagaacattctggttttgttttgcgtcatcattcatacagatcctttctaacctatgttatttttcaaggtgttcataactctctgagaatttatttctattacttgtgcccccttatggctttcaggtgaagtagaagaaggaggaggagaaagaggaggaaggggagggtaagaagaaatttgaagagattgaattgggaggctgaggcaggtggatcacctgaggtcaggagttccagaccagcctggccaacatggtgaaaccccgtctctactaaaatacaaaaattagccgggcatggtggcgggcacctgtaatcccagctactctggaggctgaggcaggagaattgtttgaacccgggaggcggaggttgcagtgagccaagattgtgccactgcactccagcctgggcaacagagggagactccatctcaaaaaaaataaaataaaataaaataaaataaaataaaataaaataaaataaaataaacaaaaaatagaaagattgaatttatcatcaaagactaaatgacttgtgcataacaaatcaacaaatgtcttaggccaaaactccattttcaatgataaacatatcaagctcatttaagaagttaatgatgaaagcatttatttaattcatattaaattcattacaaatacattataggttttggtttaggagaaaaataattagaaactctccacttaaaaaagttgctaccagatgctggaatctgggatacgttataaaactcctggttaaatcaagaaatactttgaggacaaaaataatatatgaaaagtgttttaaaaattaaaattaagatagctccttcctgctctgtaaatgtcatagcaaaggagcaaaattatatttcacttactttcagtaaaacctggaacacctgcctttgatgcaaaattggcatagattataaaaaatatgcaaagaaatgaaaaaaatgtgaaaatataaaaatgattggctgtaaagtataactttctaaaggtttttatattcctgcatcagattcttaaactctagctgaatttactaagatatctcaaaagtaaataatggcaaataaataaattcattcatttgcttaaaagcaattttaagtacctaaatatcttatgtattaagtagtttatgagagtagttgaaggaaggtaacgaaagaagttacaaagtatttttaagttgtaattaaactgggaagcaaaacatacaaaacaatcagaaaattataaaataatacattaataaggaaaaaataaataatataacaaaatttgtatacataaatgcagaaagaacatagataaaagtgtctgtttcagtttagaaaaataatttatgtaccacagtaactagtcaaagaaaaaatgtattacatatccatatactctaaatacacgcaaacatagacacatacacataattaaacatttctattacttccagattatagtggtaatcaggtatttttctagtttatattgtatccactgtagcttttatttttttaattctctagttcgagtttgatagtaatattgagtagtaatccataaatcgtgactgggcatggtagcttttgcctgtagtcctagctacttggaaggctgaggcgggaggataacttgagcccagaagtttgaggctgcagtgagctatgatcacgccactgcactccaatctgggcaacagagcaagaccctgtctcaaataaacaaacaaaaacccaaacaaatagtaaattaagagaaaatagcaaataatcttcctaatggtgaaatccccatatatccttgaaatgaactttggctctgtctaattcatataaaattccttacatatgtgtttccaattattctacattaggtaaaatatgcaatattgctatgttctacccaaatattcttcttcctcgtgtatctaaatcctaacacatctataacactcgtttgatgaatactaacatttcagtgcactgggtaatacatatgttttttatttgccacaaagaactgtgtttcctcaactgatttatgtaccacctggacaaaattatttttattatggtttatttcattttcttcagcatccaaaactgaaaaatacttgtaaactgccaatgacacaatgacaatggtaaaaaaaataataaaaataaaaaagaaaagtcttagaattcaaaagcaaaactccacatttcttcagagacacccaaagaaaaatgtagctgcaacatttttaaactagtaaattcaaagtaaaaccaaacagcagcccgggtaatttatgaatgtccttatggatacaaatagctaaccaacttacaaataactttgtaggttgccttaagagtcttttctttttctttttttttatttatttttatttatttatttatttattattattattatactttaagttttagggtacatgtgcacaatgtgcaggttagttacacatgtatacatgtgccatgctggtgcgctgcacccactaactcgtcatttaacattaggtatatctcctaatgctatccctcccccctccccccaccccacaacagtccccagagtgtgatgttccccttcctgtgtccatgtgttctcattgttcaattcccatctatgagtgagaacatgtggtgttttaggcagggcatggtgggtcatgactgtaatcccaggactttgggaggccaaggcaggtggattgcttgagcccaggagttccagaccagcctgggcaacatagggaaactccatcgctactaaaaatacaaaaaattagccaggcctggtgggccacacctgtagtcccagctacttgggtagctgaggcacgagaattgcttgaacccgggaggtggaggttgcagtcagccgagattgcgccactgcactccagcctgggtgacaagagcgagattctctaatgcccagttttattctctcctctgaccaatccatagactttgtggaggggaaggtgaggtgttctgaattataccaaataacatacacatttgtaaattgtggatttacaaagtaatctgcaaagcaattacacattatgcccacccctatgcacacatacactcatatacatgctcacagagtcatggctctatgtgtgatctctataaacactcacatgcagacagaatgtctccatgtgcattatgaattacctactagcttctagagcaggggcgtccaatcttttggtttccctgggtcacactggaagaagaaaaattgtcttgggccacacataaaatacactaatactaatgacagctgatgagaaaaaaaaaagtcgcaaaaacatctcataatgttgtaagataatttacaaatttatgttgggccacattcaaagccatcctgggccgcatgtggcctgtgggccgcaggtagaaaaatcttgttctagaggcttccagatatatttcacaaaactgatttggaaccagcagtatagagtaacttgtataatctagttgggagctgcaagctagttcccagaattgcgtagcctaacccacataacagccagtaaactctgctggatgggttgagttatttctcagcatccccataacaaacagtggcttttttcctgtggacaagtcaaacagaaaattctcatttctctaccgaagaatgaatttattttacatttattgagaactcactgtgctcaaagctgtgttgcttatgaacaaagaggacacacacacacacacacacacacacacacacacactacaagaccaaggtgaatatagtagctgctatcaggaaggtccaaatggaaatgagaatgcagaggcaggagatattacctttgaccaaggagttcaagggtgatttcatgaaggaagtcttggtttggctattccttaaaagataggtgtgaattcaatgggtgggaatggggttagagaagggagtgggcatagaagtggaaaaagtaaaaaagtcactgaagagtacaatatgatctgagcacggtgtcatgatagagagatgatgaagccagacaagaccagtagctgggagcagacaaagggagctccaattaatacagtgaagaactgggtgggcaataaagatccataagaaggttttcattatttgtttttaaactgtttttttattgtgaaatataccacaaattcagggaagtatataaatcaaaagtgttcagctaaagaaattgcatcaaacaaacaaacaggtcaagaaatagaacattgctagcacctcaggggcaccctcttcaggtgttcttctaatcacttcatcactccctcaaaggtaaccactaatctgatttttacgataatgacatcttcacttttctttatagttttaccacctaggcatgcattcctcaaacatagtttaattttgctggttttgcaaactttgtgtaagtgcaattatgtagtatatattattttgcatctggtttcttacattcagtgttgtatttgtgagcttcatccgtgatgttgtgggagctgtagttctttttattttttattttatttttttgctgtagggcaagtttgttcaacccgcagcccatgggccacatatggcccaggatggcttttaatgtggcccaacacaaattcgtaaactttcttaaaacatgagattcttttgagattttctttcagctcatcagctattgttagtatattttatgtgtggcccaagacaatcctttttcttccaatgtggccaagggaagccaaaagattggacatccctgctgtagagtattcctttttgtgaatataccacattgatccattctactgttggcagatattgggattgtttctagtttggggctaccatgaatagtgttgccttcttgtacctgtctcttgatgcatgtatcgtctcctgatgagaggagtgctgcactttaggccaatcagcgtcacagtaacacgtaaagatagagtagcctacagagagacttgtgaccaggaaactcctttggagatcaggaaactaggtaggcatcccctaactagccttgaggatccaacttggattgttgcctcagttggcaaaactcactaggctgaaagtcttcagtttccaatattcaaatcaaagtaggagtagtttctctggatttttttttcttttagcatttagcaggagtaaggagttggtccatgattaactccatcactggtctatttatgacctactttaatttttcgttctatttatttggttagtttgaatactgtaataggcaactgcaaatccacagccccaaacaaaagacaggaccttggtaatgaccacagctaactgtatgtttccctcatcgttccatcttctggcctctccctacctcgtgcagaggtatttttgaacattacataaaaccctcaaaaaggactatcgaccccaagtaagtatgaatttgtgctaggcaagtagaaaagaatattgatttcattctctttatgtcctattacttccagggaggcagacaaatgttaaaacgataagttgtgtgaatcatgtgaatatacattcttctgggacaaagcaattgcagagtctttatagttttttcatatgtaactactcattccctttagaaggatttctagcaaaaatatagcttatgcaacaacagacttcaagatgatccaggctatctgagaaacctattccttgatgataaaatcgaatggtaacacaaagtttaaatgcctcttcagtatgttttgctacaaaaatcgcttagttttcaatttaaccatgcatttaatcctttggtgaactgagtaatgccaggacagagtgtaaaggaactggaacatcatgagtttgagaaaaggacaataaatccaatattgcaaaattacagtagatggtgctagatgggtgcaaaagactccaacagccatctgggccaccttcaagatttctcctgagcttagcagtttagaaaatgtgcaatttagatttatcaattcaggagaggcactcagataaaacagttgaattagtgagatcaatgaatgcagaaccctataattagacaatgttaaggtttttatggaaattaacaatgaagacaactttaaagccgtggtcaaatcgttgatctttctggggtgttggtgccaatgttaaattactaaaagaatgattttccattcatctaaaataacgtcatctgtaaagttaatttttaaactaatttgctcttggtattagttatcatttatacagtatttgtacactttgtaggttagctttgagatttaaatgtcctatataatgtatgcaaagtgatttacaaagcattacctagtataaattattctacacatgtgaagtattattatttttattattattacctaaagtgcttattaaatatttgtattcattacttttttacagccactttgtcctggatattcttcttattattcttttagcttttcaggtgaaacaactgagacataagataatgaagtgaacaatttcaaacatgtatatattccccttgcagcagcagtacaaaatgactttcaatcaatgaaccagagatcaggcaagcacctgtccttaatgagagggttatctggggttaaccctagatacaatgaaaattaacaatgggagcgattccaaaccatctcactgttgtgtctctataacagatgcttccctcccatgatctgctgagcactcggtggatgcattggtccttagcttccttggagaaaggagcaacatgacagcactaaacacactcaggatgtgacttatcagaatctgtcagtgactgcaggaaaatgttggatctgacgttaagtaaccctttttctctccccagagccacatacggttgaggttcatgtgtcggacagggcgtggaagaaattccttttctggaagttaacctctattgtccagcatctgatatgtccagcctaaaatattctcttaagtgcatattagcaaatccttggaactccaaaggctttttcagaggctgaaaggtcagatgtttaagtgaattctctgtatttatgaatcattatggcctattgattgaatgtgtgagatgtagttctaatgtctgtctgctttacgtaaaaagttctatggacagggatattatccacaatgagggggtcttaatggtgttttgatttttacaggacctagcacctaaatcgttaaataaatataattaatattactatttgtatttaaaaataagtcaagtgaatatttcttttatttattttccaatacatgtttagtatttattgtccccagaaaaatgtgcctcgtccttgctgtgatcaatagtcacagtagtcatggtggagatgtcttctccaatcacactgacaatatatgcagaaactagtatgcaataggtctgtccagtaagtatgagaggaaaagtctatctatatttttactttgattatttatttattttgagatggagtcttactctgttacccaggctggagtgcaatggtgcgatctcagctcacttcaacctctgcctccggggttcaagtaattctcctgcctcagcctccctagtagctgggattacaggctcccgccaccacgcccggccaatttttgtatttttagtagagatgaggtttcaccatgttgactaggctggtctcaaactcccgacctcaagcaatccacctacctcggcctcccattgtgctgggattacaggcttgagccaccgcgcctggcctaaaaatctatattttctaatgtcatagaagctattgctgtagttgcccagcatccgactttcaaatgttaataattaggctgtgggccaggcctattgctcagcagctaatgcactgcgcatgctaccgcacaggagacctcggtctggtgctagccggaagctctcctatcttccagcaggagcgaggagccctgtggaggtgacactgggcgccttagaggagagagctgcgtgatgtatcaccactcaccagcccttgccggagacctgtttagagtgagattacagtctcagcagagcctctcatttctcctggtcacggggttacagagcactttacaacttgtgctacaggaaggcagggagggatttaaatgagagactggaagagaccctccataaacctcagccagagcagccctgactcacagtaagtttctgcttccgctggcttacagatagccagatcaatgtttttagaaaaatgtaagctttaaacatggaatggaatatgaattgaccatatttcatctgatcacaaatttaccagacaacttggaaagcctctgaaattctggcactaaaatggttctttctcagaattggggtatctttactatttatctctatggagcacctactaacactaatgggagaacaaccctaataaggtcaacaaaaatgttcttgtaatagtgttcattaacagcgctgctagatgactgcttaaaatcgtttctgctatagtctctcccgtagatgaaatcatttgcttcatttttaaccgttgcttggaattctgtgctttccaaatcttcatctgtgttccttacctttaagacgtgaccgaacaattttaattctcaatttctggggccaggttcagtgctttttgaacactaatctgccaaaacatgagataatattcctttcttgaaattgctatcagtattaccatccaagggcccccatcagctgcccaggttcctaacctcatcactttgtttttctcctctccttttcctcccacatacaatttaccacaaagccaagctgtttagttttttttctccacaatatctccaatatgtatttgttaatctcataaatatttatgaagtactaggaacaatgctacaaatgggagttctgtgctagggctacgcatgggctctatttattttcatggtcatcaccttggaccatgtccctggttgactaaagacggcctcaaattttgacagctctctcattgagaaattttatacatttaatgagattataaaccttttaaggtatagaccctatgatctatacatgaattgaatatatgacccagcacagctaacatttgttaacccatcaaaaatattcatgtcaattagaacttgacagaatcctgtcagtgttgatgtgattcctgggagtcttcccaaaagtttgaaaaggcttttatctctagaatcagaaactttatttatttatttatttattgagacagggtctcactttgttgcccagggttggtgtgcagtggtgggatctcagctcactgcagccttaaattcctgggctcaaatgatcttcccaccttagccccccgagtagctgggactacaggcacctgccaccatgcccagctagttttttgtattttttgtggagacaaaatttcaccatgttgctcaggctggtcgcgaacccctgagctcaagcgattctcttgcctcagcctcccaaagtgctggtatcacaggcatgagccactgcgccaggctgagaatcagaaacttcgtattgaattgtctaaatttcccttgaaatagcttattacaactttttcgtacgatgatttataaaaattgtgatttttttcctataacagaaagaagtaaatatttccaaagattttctagtgtattttaacagatcagatctgtacacctggtagagaccccataaatagtttgaatctgccatgtaaatttcactgggcagtgataattcatgtccttagatttatttttttggctttattggggtataattgctgtaccaaaaatacatacatgtaatatatgcatctatgcatcttgagtttggttatgtccttaaatttaaatgctgattttaagttatcaataaaacacttaaactctacaagtgctttgcagtcattctggatggaatctaactagcttaatttgaaatttagtgtagctgacaaaaagctattaagagtaaagttgatgggtcaaagcatggtaagtttaaaactacataaatatgctgcacaaacaaaa

SEQ ID NO: 24 - DNA, 59 bp, Homo sapiens
  source 1..59: mol_type = genomic DNA
ttacactgaacaggcttttctcttgctcttaatgtgtcaaaattgtatgacctatcgct

SEQ ID NO: 25 - DNA, 29889 bp, Homo sapiens
  source 1..29889: mol_type = genomic DNA
gccttcttaaaaaatgtattacagaatggataataacatggttaccattgaaaaatgcatattacaatctccagttgcttggaagaccttctgaccaactgtgtatttcaatgcccatctgagagatacatgggaatcactgatcattatttatacaggcagaaaacatatgtaaatttatttcaaatacatgttaaacatcaagttgattccccaaatgaattattcattgctttgtaacaacgaaaggcattttaaacatgggcctcaagggcggcttcaaagcacatagctgctgatgaaaggaaattccacatgctaaacctcttctccaaagatgggatcaaaggagtttctctgcttttagactatattataaacctcacagaggtattccacaacatgcttctgtccagatctatgagctcacttgagccaggcatcatatcccaccagggatggaagtgttgggggtctccttaggactgctgcccttcaaatctgaagtagaagcttcagcagccatcacgacccagatcctcaaagcccatctccttcatacacctgttatgagttcaataacctgatgaagatctgcacagggacagagagaatccagcaatcactgtgctttcttagagtaacagtgtgccaggaaccatcttaggcactgggtcagtgaccagtgacactgatacaattgggtagtgatcattacaaccagaagatacaatgggtttctcaccagggcctttttctcctcctttcctcctctatctcctaacaacaaatctgtaaaggactaagaagaggcctgaattcacacaggcattcctgatcgtgcagtaaccacagggctatgggcttgcacctgtgttatcactgcagcttgcagcaatcctgcgggttggcataattatccccattttacagagggggacactgggctcagagagtccttacttgtctcatcctcccacgtcccacctttacatagaaagtagctccaggacaccaggagcaggacaccccactcactggggccaggagggtcctagctctctccctcatgaaacagtgagagcaacttgtttcaaactgggagtgaggggacttagatctgggatcccttcgtctccccacatcccaaggcacttcagcccccactgtggggcactcacaccctcagttgagtcccaaacacctgaaggcgggaccctgctattctcaccagcccacaggggtctctattaaaagtcatcaaggtcacagtaatgacttctggtttctatggcaaccgtggtgctcaggcttgtcctccacatcagaaatgcttctgcacagccctctgtccccttgcctttctcaaataaataaataaataaataaataaataaataaataaataaataaataaataaaaacttcactcttccactcttcaggctacctcctgagaaagcttactaattagtggaactagcctcagacaagggtgatttgtggaattctgcccagcttggtgaaacaaagcatctccccattggcaggaatattgtctgctttaaaagtgacagtagttgagtatcatcactacacagagctgcagggaggtatcctaggggctcctggtgatgagctaaccttctgaggatgatgtgtaaaacttacacaacacactaagcagttagctatctgtggcagaagactaagagactgtctataatcatgtgtgtaaatgatgtaggaacaccaagaaatgtcatttaagatatctcagttatttcagggaggcaggcctataataatgtaatcatttagtaggcagaaatctagtcaattgaaacatacattggctcattttggggaattcttatccaccattcttaatattttcttccatgtggagagacatcgatacccaaaacacttctagcctcttgatacgctcactcctctatcgcaggaatgtctcatctagttggtgggtttggaaggagaaacaggttgcacagcccaggtcctctcccttcaaaactcttggttgtaatcttcacttaaccaagcatatgttctgctctgccctcaggggtggggcttacaataggtccacagctctactctcctgtgtctcgctggctccccaactattcctatagtcttgcttcacaatgcttggatctttaaggggcccccaaaaatgccctccagttccaagtctgagttgtataccaactgagaaataccacaaaagaataagaagaacaataaattgactttattccttataaaggtgatactggagaatgtgacatagatttggtggcacatgggtttcctatgaacaaaccccagaattggacagacttatccagtgatacattgggaccatcacaaaaaaacaaggcctgcattgcatatctatctgctgtctgctgaaggagccctgtctatgtgtgcccaaggaaagtgacttccttgttaagggctatccctgtagcaggagaaaatatttcaggataccttcttagagaaacacttctcaaagtgaataaatataccttgtactccttgcatactcaccaagcaacctgcagaagatacagctttccatatggctcagggagcagtttatatcaacattctctcaatttcttaacacaagtgattgcatcagaggcttatcctatagagagagattggaattatgttctaaattgcaagaatagatagaaaagcatattttatgaaaacttcccttgaaaatcccatcaagaaggaattaatgggatgttcagaaatatatacccacacataaactaacacgtagactatagtgaaaattataacaaagccccctgccaagccttcacaatctgtgatctgagaacagatcacagaaaatgaagaaaaggtcaccaaaaccataatgttttagataaccacttgtgcttaacaaaatgtccccaaacaatagctatttattatctctcgggattctatgaattgactgggctttgctgggtgttttctattctgtgtggtgtctgtcacctggggctgcagtcatcagcacgctacacttgcctgggacatccaagagagctcactcacatggatagcgaatggtgctggcatctgctgggagctcagctgggactgttgcatgaagcaccttggttcaacacagagccctctgtgagtagggctgtcagaaaaaacagaatacactcagtcaaatttgaattccagataaacaatgaataattttttagtgtaaatgtgatggtgactttatgtgtcaacttggctgggccacattgttcaagtatctcaacattattctgcacattcctgcaagggtgtttttggataagatcaacatttaaattggtggactttgggaaaagcagattgccctctataatgtgggtgggcctcatccaatcagatggaggcctgaatagagcaaaaatcttagctcttctaagcaaaaaaaaaattctactagcggatagccttcagacttgaactgtaacactggatattctctagtctccagtctgccagcccactctgcagattttggactttcagcctccatagtcatgtgagccagttcttgaaaattaatctctctctcaccatatacgtgtgtgtgtgtgtgtgtgtgtgtgtgtgtatacacattagattggttctgtttctctggatgtgacatgcaattttttatttgaatacaactgggcattttgtatttttatttgctaaatctggaaaccttaggagaagagcctctaaatatgtaagtttagtgaccatctgagatgaccttcccaataagtcagggcaggtcatgggacaatgagcagatcagattaaaaaaaaaaaaagacaaaagctggtaatacctagtgttggtgaaataaaggagaaacagactttcatatacactattggtgccacatcgaggtatccattttctgaggcccatattattacagccgaatgacttgaatggcctttgtacagaagtcctatttctaccaacaagggggtttcagctgagggtttagaaaaggctcatcaaggcgactctgatgtgcatgctggttaaggggccctggtcgcaggggcaggtcaaattgacatatgaatttcctgctccaaagaggaaagatagcttctactcatggagcagagtgtttagaggggcccagctccaggttctttatgttagtgtctggattagatctcatgacagccctgctagtgaggtaccagtatcctctcttcttcacggatgtctgtgactacaaagcacatgctcctaaccacagagctggatggcaaagaggttgctcagcaggtccactaccagaacttgccagcctaggcaccttgagttgctggtggcagatctttagcatcaggacatatattgttaaggagcttaatatctgttctccttgtgtttaccctctgtattagtccgttttcacactgctatgaagaacttccctgagactaggtaatttaaaggaaagaggtttaattaactcacagttacacatggctgggtgggcgtgtgtgggggagctcaggaaacttacaatcatggagatatgtgaaggagaagcaagtaccttcttcacaaggcggcaagaaaagatagagtgtgaagaggaaagtgccaaacacttataaaaccatcagctcttgtgagaactcactcactatcatgagaacagcatgggggaaccactcccatgatccaatcacctcccaccacattcctccctcaacacctggggattacaattcaagatgagacttgggtggggacccaaagccaaaccatatcaccctccctgcatttccagaacaacaacaaaaaaaagacttgggcctctttccccctgtctcagggaaggtttatagcagggctagaagcagaagctgtctgaagccagtgtttgcttcatcctgtgtgaaaacttaaacttaaggaaaggattggactgcttgtacttggcagggaggggaagggtcctgaggacacagagaagggagaagaagagagatttctccaatgcagggatgaggtcagaggtctacaggtccctccaggagtagggacctgagcattgctccatgtcaatgcggagaagctccgtatatggttcatcaaggctgggcattcagccatgagacagattctcctgtttggttggaaggatagatagctcagggtcaggaatggggctggggctgaaggtaacaaaccagctagggaaatggtcagctcagccctcagcagtagggacacatgagtgataatgacaggggcctcccaggctgtatctggaggatatgtttccacaaatgattatttttggtcaaagagcatgactatttttagtatatactgtctagttgaaagttaaaatctctttactaatgaatatcccaaccaactacaagatgagagcacctgtttctctagatttgtgcaataatgggtttcccaactttattaatatttgctacttttatatcctatcactataatgttaaaatacttttcatttttctccattgatatccacataaatggcatatttcacatgtgcatttctaaacacaaacataacagtcctactttatgcctcagaatatgtcctggaataattctagagtttgatgagaaaacctgaaaagtgagtttgtatctatgctgtgtcctgtttacattgaaattgtggagtcataaaaatcctatacactgctgcaggaggacaaaacggtacagagtatatttgcagatatactcggcaacatatatgagagaagcaagcatagccccatcaactgctgccctctcaggtctgcactgcagagagtctctggcacgggtgcaagaatggtcatggcagcatggccaaaatatcaaaacagccccaaagtcaccttattagagacatctcagaaacaatatttttagaagaaaaaatttcaataagtgtttgctacggtttggatgtttgtctcctccaaacctcatgttgaaatttggtccccagtgttggaggtggagcctaacaggaagtgtttgggtcatgggggtagatccttcatgaaagtcttggtgccaaccttgctgtgatgagtgagtgcttgctctattagttcccacaagagcttgttgttgaaaagagcccagcacctcccatctctttcccctctcctgccatatgatctctgcacaagccagctccccttggccttccgtcgtgagtggtagcttcctgagaacctcatcagaagcagatgcctaatcttgaactttccaaccatcaaaattgttagccacataacaattttattatgttttgttttgttttttttctttataagttatgcagcctcagatattcctttttaacaatactaaacggactaagatagtagtataaaaatatatagtttattccatttacccatcaggagagcagtgtgaagaaaatatggtgagtcccatctcacagattatcaagctctggctcacagagactaagatcctctacagataagtggcagaatggcaatgaggttccatctcttgccccccacccccagcagcttcccatttggaagatgataattttacacttccccagtattgtgccctaagggtactcactcaacagcccttcacgttgaagaaaaggacggtggagatgaaatcctgccctttgggccatgaggcatagctgtgggatcatatggattaccaggtttctgaggttaactgtggggtgaaataaagaaacatgtggaacaagaaagaacagcgaagagaacagaaaacagcaggccctccagggatcacctctacctctctctgtctttgctcctttccccaccccatttgtcccctgctctttgtgacagtatgggatgtaacaggaatccaaggtactctgagagacgaccgaaagatgggaagacccagaccatgagaagggtgaatcaggcagcacaagtcttggagcctgtgccctgggtgttggctcacccaccaggcactccatctctacctgcttctgtgtgcctcaccattactctaccacacagcaatgaagctcccacataacagaaatatgcactttctaagggaggctagcaggagaagtgacttacccctcagtcaagaatgtcccagagttactggtttgggtttggtgccaggatgcagagagatctccagtatctcttgctccagtgtcctgtccagcagacatagtataaggttttcatcaagcccctcaggagcgcaaaggaaacatatttctgtcatatacaacagggtggggggaaaataggaggtaggaaaaactatgaaacagtaagaaatggggtgagtgatgacttcatccctgtaccccaaactccactcatggggtccatgactcagttggatggagatggtagaaccgctttcttcccttcccccaggcccagcagggtgctcattccaccacatagaaatgacagtgactcacagtgaaattagaaacatgtgttttccttcttctctccatatgctctctcgatacaggaaaaatagttactgtacactggagaaacatgacaaacaccatccttaaccaaatgatgaaggttaacatcaccagtgacatcatgcaggcatcgtatactcccagatatgatgcgacaagaagggcaccggaactagtggtattccttctcaaaatctgtaaccacagtcaaatcacaagagaagcaacagactgagcctgtactcctcaagactgtcagggttatgaaagtcgtctggcagttcctcagatgaataaacagagatttaccatatgacccagaaatcccaatcctaggtacatagccaagaaaaatgaaaacctatgtctacataaaaactcgtacataaacgtatataacatcatcactcataacaggcaaaaagcagaaatcatctaaatgaccatcaatagacagatggataaacaaaatgtggtatatccttagaatagaatattattcagcctttaaaaaatgaatgaattctgctacatgctacaatacacatgaaccctaaaaacatcatgctaagtgaaagatgcaaaagaccaaatacggcatgattccatttatatgaatgtccaggatgaacaaatccacagacacacaaagcataactgtggttccaagagctgaggataggtgcaggtttaactgcattgaagcacaatgggagttttggggacaattgaaatttctgaaactcaattatggtgatggttgtacaactctatacatttaataaaaatcaccaaccttaaaatgaatgggttccattgtctataaataatattgcaagaaatttgtttaaaaaatattggccaaggcttctattgtaccacaggaatgaccaaaatttttcataaaaaggccttgatgcacatgtcttatataaacacgaatgtacataaagctgtagctgtatcccagccctgactctacgtcctgtgttcctccaatgacctttcccccaccccacatgctacctgaagtctaattcaggtctgatcattttcatgtcttccaaatgttgggatggcttgagagtgggaccacaacagggtcccgggccttccctctgtgacaggatgccagcattattactttcctcacccctctccaaactttttcacattgttccactttggggagcctaaatggcacaacattctgggtgtcagcatgacaatacttatcaaaaggttacataggtgcatacactaagcaccaacaatttcctttttaaaagtttaacttcaggatgtagtgaaggatgttgataagggtctggttataaggactgccatcctaacaataccctctcttcactgctagacctgaatttagaaagggagaccaaacaggatgcaaaaccatgaagaggcagaaggaagcagaggcaagtgtggttgtcagcacacacacacttgcacacattcacacacactcccccacattcatgcgctaattgggttctattatcacaatactagaatttttctaagacagtttgctgtgttccaagaggacacattcagctcagtgcaaacagccacaggaactgtgcccttcagcagagcacagaccttgaaaagatgccagtgtagattaaaggaaatatcaggacactctgaataacatagggttgtgaaaattgattatgtcacatccataggatggaattctaggaggcagtaaaaataagttataatgaaaacaatgatgagagatgatttcttgcctaaccagttatcaataatcaacattatttccagtgtgtgagcagacactttcataccatattagtaggaatatatatgagtaataatgttatcatgtattgtgttaatataaaactttatagatttcataataaaagagcattttgacaatctcataaagaaattcttacaaatacatttgcatatatgtgagcaaggatgttatgtttgctactgtttataataaaacatggtaaaggaactacatttttatctcaaagtgaaataaatgtggtaccatccataagatgaaacatccagttgatggcaaaaataaaaactaaaattatgttgtaaagtaatttaaaatgttatggtagacatgtattttcatggaaaaattgtcataataaagtcaaaggcaggttacaaagatcataagtagccaggatccatttttgctcatatccatctacagctatttttgcagaggactcaaagcatacaaataaaaataatatttttcttgctcccacataaagccttctcctcagcatagtgagaggctgcactttgtttggaggccataaatattcttttagcctggaattgctccattttccatccagacttccagaaaactccatagagtgggcttgggccaaactgctccttcccaccttcctgctcagacgtaaaagctgcagttcaggcttctgtcacgagggggcaccaacgtaccttcataatcaaacctctacaaagacgtttacgcaatgagcgaaaaaataaaataccctccactaaaacccagtctatgaacctatggacagaatgattctaattcttccagaaaaaaattgataggtgtaaaagaacactgcaaaaacatgtactccatggcgtctatacaatgaaacaccacgtacgaggagcgagccttggcagtccttagcaggctggtgtagcgcaaaccagggcagcgggaggtgagtggaagagaatgggggcactggaatggggtctggacggctgtgtccatagcgtcccggagagggcatgcctgagaggaggtctgggaagcctgttcaggtgtggggtaatggagagtgaacaacctacaccctgggagggaccactctacagtatggacacctcaaactgcactaacaaaggaagaaataaatcaatgaatgagatgtggatttagggtcaacagcaaatggacctgctttaatatacatgtgaattttccaaagaaaacttacagtaaacaaacaattccaagacatttgccactctttgaaaaatgtactctttttcattagaaaaaggaaaataataatggagttagatatcacgtcgggccagagtcaggattgcagctctgagagtttcagactagggggttcatcaactgggagggacagatggaggttaggagcttggctgaaaacttcagtatcagccaaagttttctggaattattcacctaatggtagcaatctccctgtatctttcattttcctgtatatctaaaagcaagattagttctagaccaccaacctctaaattgaaggtaaaactgtacctgtcagtgtgtatttggagtaatttagctggaggagacacagatacaaacacacacacatgtagaaacacagtcaattcgatttttatctattttgtttcactataaaatcgaatacattgaatgttttcacaaattagtgaatacatgtatacaattcttttgtcagtctcttcataaggattttttgtgttcaagtttttatcaaaatactcttctccttaatataaagtttcaaaaaatatgcaaaattatactcaaaaataggaattttatcctgcatctctcacagacctgactcctgccccctgaccccaaaaggtctgctgtccctaggatggcacatactctccagacgtgtccctgtgagatgcacataaacgcgttcaccacccccccccacacacacacattgtcttctccaaaagtgcaatcacagttctcatcttgtcatttccacttattataatttatcaggattttaaaatatttgcatcttattagttcttgtggtttttgcatatttaatatgtttattgtccatgtatatacttatttgaattttctgttgaaatcattgccaattgttttgttaatgagtatgtttcacaaatcacagacaccaacccaacatctgagacgtagtttgaaaatgttttctcccctgttttaatacaatggttactgggtttttatctttcacttggaaaatgttttaaatttccataatgggacttaataattatacatgtcataattgaaaaacaaaaaacattccaaaacacctggggagcacgtactgtcagcctggagggagattagagcattcagaaacctggaggcatcaagagaaaatgataaatctttagagtattccagagttagctgctggtcaggagataacaaagtttctcctggattgcaaaaactcccctaaaggcagcaccctgatctgaataatggtcataataatgggtaccttggatagcagttaagattaaaggaggctagttaaggtggttcatgcctgtaatcccagtgctttgggataccatggagggaggatctcttgaggccaggaattcaagacaagcctgggcaacatagcaagaccttgtctctaccaaaaaaagaaaaaaaaaaagattaaagcagataaaatataaagtgcattggcttacagtagttcagtgcatgttactttccttccctccagctctcctctcccaaggccaacacctgagcttctgcctgagcccactcgccacctcagggatcagccaactcatgtggccctacacccaggtctcttggtacaaaggacaagatttcatctcctctgtcatcttcatcacccagaggggttgtggagtggaggacccgtggggccacaatagcaggggagtggaatttggccatttttcaagccctggaagcccatcttctagaagggaagctgcccagggtcctctagggagggcgaaggatggaacctcattccaatcctgccacttacctggggagatgacttagactctgtgagcctgagttagtcatctgtgaaatgggactgaccataccatccttacagagctgtcctgaggggttaatgagaaaacctgtggagaatatatagcatggagtgggacttcaatggccctttaaatgctgagacacagaagtgggggctggctgagcctcagggctaaggcaggcattgtaaaaagttatttttcattgtttctctcctaatgagaacacagacatccatataaggaaagcaaatctctctctgatatgccttgagttcaaagttttagagacagaatgttctctacattcttgggtgttttctaatctcataaaagctgttcagcatcatgcctctgagcagacccaaatccacttccccatactcagaaggaaaaaaaaatgataggggtaaaaaacaagactgtaaaaacatatgctccaggaaatccatgccatgaaacaccaggtagctctagtgcatcttggcagtcaccagtcgtcattggtcagtgcagggcaggcaggaggtggctgagagtggatgggtcactgatataggacctgggcagcttgttcatagtgtccaggagagaagatgactgagaggggttgggagaaggcctgggaagcctgtacaggggtgcagtaatgaagaatgcaacaccctgctctctgggaggaacctatccactttatggacacctcaacctacaccgtggagggaagagataaattaatgaatatgatgtagatttggggtcaacagcaaatggacctgctttaatatgtgaattttccaaatagaactggtgtcagagtaaacaaatcacttcataacatttgttactcttagcaaaatgtactcccttttcattaataaaagaacaaaagacatggagatagctgtgatgcctcctggtagccaaagacaggattgcagcattgagagtcagaccagaggctcagcagggaagggagagggattgaggttggaagttagcttcactatatcagccagaggtttttttgaattattgatctaatgatagcagtctccttgtattcatcatgttctaggatatataaaactcagattggttgcagctcccatctgaattaaagataatgctacatctgtgagtgtgtatatggggtgacagagctagaggacacacacacacacacagattcaattaaattttttatttctttcataatataacacaatgaattctttttcaaattaatgaaaatatgtgcatattatctttgacaatcagttcaaaactatcttgtgttcaaatttttatcaaaatatttgtattcccaaatactgaattttaaacaatatatgagtacattcataaattgaaattaatctgcactctcactggtccaactcccaccctttgattccaaggggtctactgtccctaggatggtgcatactctccagatgtgctcctgtgaggtgcacatgaacacattcacacacacacgcgcacacacaaacacacacatattgtctgttccaaatgtgcaatcacgtcctcatcttttgtatcttgttgtttccaattattataaattctcaggattttaaaatatttgcatctcattagttcttgtggtttctgtgttttctaatatttattgttcacatatatacttatttgaattatctgttgaaattgttgccaatcattttgttactatgtttcacaaatcacagacaccaacccaatatctgagatgtagtttgaaaatgttttctcccttaatacaattgttactggttttttatttttcatttggaaagcattttaaatttccataatgagacttaaaaaattatacatgtcataatttaaaaagaaaaaactttggaaaatacctggggagcccgtactgtcagccaggagggagattagagcattcagagacctggaggcatcaagagaaaatgataaaactttagagtattccagagttagcagctggtcaggagataaagttttctcctcgattcacaaaaactcccctaaaggcagcaccctcatctgaataatgggtaccttggatagcaattaagattcaaggaggccaggtgaggtggtacatgcctgtaatcccagcactttggaaggctgatgtgggaggatcacttgaggtcaggaattcaagacaagcctgggcaacatagtgagacactgtttctaccaaaacagacaaaaacaaaaagattaaaggagatgaaatatagagtgcatttgctttcagtagttcagtgcatgttactttccttctctcctgctcacccgtcccaaggccaacacctgagcttctgactgagcccactcaccacttcagggatcagccaattcatgcggcctaacaaccaggtctctcagcacaaggggcaggatatcatctctctgtcttcttcctcacccagaggggctgtggagtgaggatgcatgaggccataatagcagggcaatggaatctgaccgtttctcaatccctggatgcccatcttttaaaagggaggctgctcagggtcctctagggagggtgagagatggaacctcattccagtcctgccactttaggtggtttagactctgtgagtctgagcctgattatctgtgaaattggactgaccataccatccttacagagctgtcctgaggggttaatgagaaaacctcttgagagtatatagcaaggagtgggacttcaatggccctttaaatgctgagacacagaaatgggggctggctaagcctcaaggctaaggcaggcattgtgaaaagttatttttcattgtttctctcctaatgagaacacagacatccatataaggaaggcaaatctctctctgatatgccttgagttcaaagttttagaaacagaatgttctctacattcttgggtgcttcataatctcataaaagctggccaacatcaggcctttcagcagacccagttcccaatgctgggaacatgggcatgtttttgaactcacctggtgagctcagatatcaatcacagcagagaagcaaggtgtggtatttgcctaagggctgctcctgactgctcagtatatgaatatatttgcagaaaaaaatgtggccccatccacagtcatcagtataggggtcctcagatcatgcattatccagccacagcacgccagaatttcagctgcctgctgcctccctgagaggtaaaagtccaagagttatgagcatttctttcacacagttttcccacttttaattactaataactaaatctgcattgcactcaaagcccatagtattccaatggaggtgtctcattaactccataatgagatggtagtagggaaataaatacgtgggcaacttcaaggttacatctgagattagagagctcctttacattagtttttgaatgtacttaagtttaaaggaattgaagattttaaaatatccctccttaaccccttattacccattcagcaataggatatttaattcattctctctctgtctctccctacccctccttcaaattcaaggtaccaaaaacagttctctacagtctctgttaacatcgttcactttattgactccttatccccctaccatggcttctgttccttgattgcaacgaacaggctctccaagatcacaaaccaccttttgtcactaagtccagtgtttgcataaatgtgtaactatattaaaatacttagtattacttttaatgacctcctaaaatatgctcactgtgcagactgctttcacttaacaaatttgtgacagcttccaggctctggagcaacatgtactggacacaaatccaagctgacctactccttaactgtgtagtcttgggcaaagtcattctctctgtccctcagtttttcgtctataaaacagagattagccacaatatctatctcgtaagggagctatgagcagtgaatgactcaatacatataaaaatcacttggtacaagaaattttagtcaatttaaaaatttctttaatgtgtcactgatattactatctttatagccataacaatataagacatagactggtgtttatttacaattaatgacattttagatattattgacatttagatattgtttagatgttgttagtgagtatattagtttcctagggttgccacaacaaattaccacaaaatttgtggctttaaacagcagaaatttattttcttacagttatggagaccagaagcctgatgtcaaggttttgacagggtcacactccctatgaagacttgggaggataatttttttcttgcctcttccagcttctgatgactcatagctttccctggcttatggcagcataactccaatctctgcctccttcttcacatgagcttctttcctgtgtatgttaaacctccccatcctctctgttacaaggacactagtcattagatttagggcccacactaaatccagaatcatctcatcttgagatcctaaattatatgtgcaatgactctatttccaaataatatcacattcacaggtactaagggctaaggcttggacatatattgttggaggatattatccaacccactatattgacacaggcaggttaaaaaactaaaatgagatcttatctttttcatataaatatataaatgcatccatacatgcataagcatatacattcctacatgagaaaacttctaagaaaataatgcagatgaaaacattagcaggtcttatctttaggtgttatgtttgaggaatggttattttattttatgtcctatgttttcacttttttaactgtaataaacacctattggtcttataaatatacaaaaggataaaatcactgggaaacataaccattctctgctccacctacagcaaagcccctccactcagaataggaacgtcttttgagaaacaggaagggagacaagatgctggtcagccccttccacagtattccaggacacatttccccaaattccaaatcacattcattttttcaatattttaaatctctgcttagtcaaatgggggaagacatagtatcttaatttcatgtattttgctttattctgataaataataaggttggtgttctcatatgagaggcagtggcatatactgattacatgtaggagctcaggagccacactgcctgtgttcaaattgaagtctcagcacttgctagccctgccctcactatgcctcagttcccttatgtttaaagtcagacaacaacagtgcctcatcatataatgtggtgaggattaaatgattaagtatatgtttagcacctgcgacagtatcaggcattgaggaaatcacaataaacattagctattattattattattattattattattattattattattatacctgaatagaccattactgtttctatggccatttttgttattatgtggatttatattgattgatatagattgaccttcaaaatatgtttttcataaaaaggcagtttataaagctgtaagtaggatattatctgatttttgttttaagtatagttacatttgcatagtaaaacttctggaaaaatgtttatttctcttagtccattttctgatgctataacagaataccagagactggataatttataaaggaaagaaatgtatttctcactgttctgaaggctggcaagtccaacagcacagtgctggcatctggcaagggtcatcccatgatggaagtgtggaaagtagaagtgagtgcagaagacagaggaaaccaggctgaagtcattcttttattagaagcttattatcacaataatggcattaattcattcatgaggctagagctatcataacctaatcacctctcaaaggccccacctctccacactgttataatgtcaataaaattttaatatgagttttggaagggacattcaaaccatagcaatattcaaaagttaacagttcttatccatgagtaatagaatttttagggtttctaatgatatttttccttttgtgcattttccaacaaaagcatgttaggtttggaagtgagaaaaataatctaaaaaaaaaaaaaaaatctccagtccttcccataggaaaatggcttagcatcagaatgaggaacatccctaagccaaaggaactaggtaatatggttgtcacaaaactaatgtatcaatctatccacatgatagcttcaggaaaagctgagcagcatcagggaaattacagccccaactgagtagcttcagcgacattacagatgcccagggaaaggagaagcatgtttctcaaatgaaccttacattttgctgtcagacaatgtctcttcttcctaggattttagtgaaggtcatgaaatgaaaatgaaatgaaagtagtttcataacatgcttgatacagtttggatatttgtctcctccaaatctcaagttgaaatgtgatctccaatgctcaaggtggggcctggtgggaggtgtttaggtcatgggggcagatccctcatgaatggcttggtgctatccttgtggtaatgagtgagttttggctccattagttaccataagatctgattgttaaaaagagccaggcacctcctcttttctctattgtttcctctcttgccgtgtgacatgccacctccccttgccttctaccatgagtaaaagcttccagaaacagatgctggcaccatgtttcttgtacagtctgcagaactgtgagccaaataaacttcttttctttatgaattacctcgccttaggtattattcctttatagcaactcaaaatgcacgaacacaatgtctctctctgtattctcccaaatacatccccttaaattgaaagtaggctcctctgtttagccacctagttagccaagcagtgacttccacaagggatggaaacggggagagactgcatgaaaccacccagggctcagcatcacagcctctggaaggggagaatcctgacacagtgggttcggggtacaagttgagtcagagtctcactcagcccagggcccaggaacaatcaatatatgcacattaaaacactcttaaagtactttccttgtgcaattaaaaataataaaaggaatggaaaagatacacatgcccagcacttataacacaaaatcaggtcaggttctaaatgggatgcatccctaaaccaaccaagggatttgtgtagtagtgtggacacatgaaaactaaattccagaaatcactgcctttttgcaccaagattttccagattaggttccagatgtacaagtataacaatgtaatgagtaatagtgtaaatgaaagatggaaaactaagcatggacaaatggaaagatgtttcatgttcattacttggggctagatggcacctgggaaactctaagactttggacactttagatttaaaaagtgacagcaaatattatctgcagattctgttagtgctccctgcagcatataaactgagaaaatgggtatgtggaggctaaagttactctatcttggatgctaatctgccatatttacttctgattaacctcagttccaggaaagcctctaaaattttccagtttatctattgttccttgtgtaagagtacatatttaccataattcttgcccttaggtcaaaacaatcttgatgttattgtacttcaattttcctacacatttcttcttaatcatgtataccctttccttatgatatgtaagccctggatttggagggtaattaggtgggaatccaccatcttgtctcaccactgtctgaggcacagacatagcttctgtttgttagtccctattacatgtttctttctaagaaactggatttatcagcctctttctttggcctctcagcttccttggactttggggggtaggttttcctagacctgtccaccacagaacacggtgtgcctgtttgagcaagtctgaaagaagatacacataacaaggaggcatatatggcaggtcccactgatgagatgtgaacatgtgtttgttctcataattattttttccttcttttccatgaagtaggcatctatagataaaatcatgcaacaaaagaatatcatattttactttaggaggaactataaagaaaagtctcaaaaattaaaaaaaaaaaactgaccaagatggtggagtaggagatatcagccttcatcccccaacaaaaacaaatacaaacatctattcacaaaccaaaatagaccagaaagggctcaagggtccagtaaaaagtctgcagcagcacaatggagaaaaaaaaggagattacccacagagaaagtatttctggtgagaacagcatacttgagacaccaggagacagctatgagcaaagaagaaaggtgccatgtcatccatgcacagggaactgtcgtggtacccagaggagtgctccacagaggacaccagtatcccttgccactgaggtaaccagcagccattcctaccagggaaatccagagagggagacacagctgcatacctctccctctccacaagaagtggccaccccattgagctgcttcaggaaaggaaccaccacctcttccaaccctgagcattccttaacatagagccataacctctttgcgagtgatcacactccagacccaggctctgtggctacactgggcccactgatgactcagacaccagagccattgccataatgagctagtccacactccaggctcaagaaccaagtcctcgctatgcatgacccaacccaaggtgctagctcagatgccacagagaacgagaccttcccctaatgacagagtctgtctttgtgtgcatctgtgctcccattcttggctctctagctacttcatgagaattttcaccttacatattgccataacacaacagcaggagtgccagcaccccagacatcaggtacattactgcaccgaataccagagccatagtcctttcatgcatacctgtgctttgtacctcagcagaatatacattcttctcaagcacatatggaatattctggaggatagatcatatgttaggcaacaaaagaagtcctaacaaattcaacattaaaataataccaagtgtattttttaccacaatagtataaaactagaaatcaatagcagaaggaatttcagaaattttataaaaatatggaaattaaacaacattgtcctaaacaagcaattaaaattgcttgttttagtaaagaaattaaaagggaaattttaaaataccttgagacaaatagaaatggaaacacaccaaaatggaaacataccaaaacttatgagttgtggcagtatcagttctaagggagaagtttatagcaattaatgtctacatcaaaagagaagaagattccaaataaaccacctaatgttatacatcaaggaactagaaaaataaaaaaaaaactaagcccaaagttagtagagggaatgaaatcataaagaccagatcagaaataactgaaatagagatgagaaaaacgatagaaaagatcaacagcaagagtggattttatgaaaagattaaacaaaattcaacaaaactttagcaagactaacaaagtaaaaaagacagatggctcagataaataaaattagaaatgggcccggtgtggtggctcatgcctgtaatcccagcacatagggaggctgaggcgggcatatagcttgaagccaggagttcaagatcagcctgctcaacatggcaaaattccgtctccataaaaaatacaaaaattagctggcgtgatggtgcacgcctgtaatcccttgagagactacttgagaggctgaggcatgagaatcacttgaacccgggaggtggagattgcagtgagccgagatcgcgccattgcactccagcctgggtgacagagcaagactctgtctcggggaaaaaaaaaaaaaaaaaaaatatatatatatatatatatatatatatatatcagaaatgaaagaggagatattacaactgacatcacagaaatacaaaggctcataaaagactacctcaaaagagaagaagaacagtgtgaagagaagtgaacagctatatggcaaaaaattgggtaacctggaagaagtggataaattcctagatgcatacatcctaccaagactaaacaatgaaaaagtagaaaatatgaaaatatgaactgaccaacaaggggattgaatcagtaataaaaagtatcccatcaaagaacagcccaggacctgatggttcactgctaatttttaccaaacttttaaagaactaataccaattcttctcaaactcttcccaaaaattaaagaggagggaatacttccaaattcattttacaaggccagtatcaccctggtaacaaagccagacaaggacactacaagaaaagaaaattgcaggccaatattcttgatgaacatagatgcaaacatcctcaataaaatactggcaaaccaaattaaatagcacattaaaaagatcattcaacatgatcacgtgggattcatacctgggatgcaagggtgactcaatatatccaaatctataaatggcattaatggaattaacaacaaaaaccatatgttcatctcaatagatgaataaaaggcattcagcaaaattcaacatcctttcaggataaaaactctcagcaaattaggtatataagaaatgagcctcaacatacagacacaaaacccatatctgacaagaccacagctaacattatattcaatggtgaaaagctgaaagcttcctttaagatcagtaccaaagtaaggatgtccactctcaccacgtctattcaacttaacactggacatcctagccagagaaattaggcaagaaaatgaaatgaaaagcatctaaatcagaaaagaataagttaaattatctgtttgcacatgacatgattttctacgtataaaaccctaaagactccaccaaaaactgttggaattgatgaatgaattcagtaaaactgtggatacaaaatgaacatagaaaaatcagctgtgtttctatactccaacaacaaactatgtgaaaaagaagtcaatcccatttacgatagaatcagaaagaataaaatacttaggattaaatctaaccaagtaggtgaaagatctatttcacattggataatttgaccaaggaggtgatgcaatccctatcaaaactcccatgacttttttcatagaaaaagaaaacacaatcctaaaatttataagaaaccacaaaagaccctgaatagcaaaagcaaccttgagaaagaagaacaaagcaggaagcatcacattccctgattgcaaactataggacaaagatatagtaatcaaaacagcatggtactggcataataaaaacagtcacatagactaatagaacagagtatagccgagaaataagttcacacatacagggtcaactaatctttgacaagggcaccaagaatacacaatgatgaaaggaatgtgtcttcaataaatagtgttgggaaaactgaatatccacatgcaaaaaaaaatgaaattggaccattgtttcataccatattcaaaaattaattcaaatgcattaaagacttaaacataaaatctgaatccgtaaacctcccagaagatgacatagggaaaaagctccttgacatgggtcttggcaatttttttttgatatgactccaaaagcaaaggcaactaaagcaaaaataaacaagtagaattacatcaaactaaaaaatttctgcatggcaaaggaaacaacaaaatgaaaaggcaacctatgggatgagagagaatatctgcaaaccacatagctgataaagagttaacatccaaaacatgtaaggaactcacaccatgcaataggaaaaaaaaaaaaaacccaaacaactcaataaaaaatagcaaagaacctgaattggtactttccaaagaagatataaaaatggccaacagtatagtgtaggaaaaggtgctcaatatcactaatcataaggaaatgcaaatcaaaatcacagtgagatatcaccacacagctgtaaggatggctattatcaaaaagacaagaggtaacaggtgttaccaagtatgtaaagaaaagggaacttttgtacactgttgctgggaaagtaacttggtacagccattatggaaaacagtatggagattcttcaaaaaattaaaaattgaactaccatacaatacagcaatcccatttcaaggtatatattcaaaggaaatgaaatcagtatcttgaaggaatatctgcattcccatgttcattacagcattactcaaaatagccaaaatatggaataaacgtaactgtttatcagtgaatgaatggatataaaaaatgtggtgtgtgtgtgtgtatatataatatgtcacataatatatacatatatatattattcggccataaacaagaaggaaataccgccatttgcaacaacatggatgaacctagaagacattagcagtgaaataagtcagacacagaaagaaaaatattgcatgatctcacttacatgtaaaatcttaaaaggtcaaactcatagaagctgaatagagcagtggttgccagaggctagaaagtcagggaaataggaaggtgttgatcaaagggcataaattttcagttttaagatgaacaagttctgggaatctagaataaagcatgagtggtgatggatgtgttataatttgattgtgataatcattacataatgtataggtatgtcaaatcttcacattgtacaacttaaatatgtagaatctttgttaatgaaatattttttaaaaaataaagtttaataatattatcactacttggtgttacatttccagatattctctctggtaatcatgctattatgcttttgtttttgtttttgtttttgtttttgtttttgagacagagtctcattctgtcaactaggctggagtgcagtggcatgatattggctcactgcaacctctgcctcccaggttcaagcaatcttcccacctcaaccttccaagtagcttggattacaggagtgcaccaccatgtctggctaattgggttttgttgttgttgttgttgtatttttagtagagttggggcttcaccatgttggccaggctggtctcgaactcctgacctcaggtgatctacccacctcagcctcccaaagtgctgggattacaggcatgagccactgtgctactatgttaatgtcagtagcattacaatgacagaatgaaggcaagtgggaatggacaactaaaatttgtttaaggcctactagatgctacacatgtggtaggttgtaattttcagactttcactcttcaaatcatcagagcaatgctctgaggttggcatcctttttacctatggggagataggctcagagagcaaaatacatgctccaggaattctaggaaggcatcaaatggactgaggtcaacttgaggggcttccactggccaattctggaataatttgagcatcaaataaatatttataataacaaatgttatatctttgagcaaaacaggaatctatgaatcacagtaatataaataaatagctgggtgtggtggctcacacctgtaatcccagcactttgggaggccgagacaggtggatcacctgcagtcagtagttcgagaccagcctggccaacatggggaaaccccgtctctactaaacatacaaaaattcactgggcatggtggcgggtgcttgtaatcccagctactcaggaggctgaggcaggagaataatttgaacctaggaggcggaggttgcagtgagccaagatcgcgccattgcactccagcctgggcgacaagagcgaaactctgtctcaaaaaaaaaaaaaaaaaaaaaaaccatatatatctaacagtcaaatgtcaattaataaatctaaacaaagtgacagaattataaaagcaaccctgacaactatcacagtagtaaatgattcaagcaagaatcgtaaatagattttcattctgcaccaaatcccatagcaatcactgagtcaccatggtaaccatgctggccagggaaagctgggaggaaaaaacaaaacaaaacaaaaaaccaaccacctcctcgatcttattcctaacatgtgctaagaactgaataggactgacatgatgcacagtaattaacctcaattttttctcacaataaacattcccggcagcttcagcaatatacaccttcatacatacctagatacccacatacatacatgctctctccctctttttctcatcacccaagtatccaagaattcatcaaggtagatttgtttgggagtataaaaagaaaactccacaattaaaatctacccacacacaaagtcaagagctacaaaactattttattttagtaattcatttttctggagatgatctttagaaaaatgtctcagtgacattttctccctggtttcagtatattaccaatgacttataaaagctgatagtggaaacactggcaaatgtatgctgtgatgactaattttatgtgtcaacttggctgggtcataatgcccagatatttggtcaaacgttattttggatgtttctgtgagggtgtttttggatgaaatttacatttaaattggcagactaagtaaagcagattgccctccccagtgtgggtgggcctcatccagtcagctggagtcctaaatagaataaaaagctgatatcctccaaagaagagggaattctgccagctcactcttcagatttcatctgtaatattggctcttcctggtttatcagtacaccgcctttggactttaacttcaactctttcctgagtctgaagcctgctggactcccccatcaaattttggactcaccaagcgtccaaaatcacatacaccagttccttaaaataaatatctttatatgtatatatataaagatacatatataaagatatatggatatatagatatcttattggttctatttctctggagaaccttgactaatacagacattaagtattaagcatcttttctatcctagagtagcctgtgctttcaaccaaaaaggttccccagcagctagtattaaacactcagcttctgacaattcagtaaaaatataatacattgaaattgcaattgaaaatactaccattaggccaggcatggtggctcatgcctataataccggcactttgggaggccaaggtgggaggattgcttgggaccaggagtttgggacccacctggacaacaaagcaagaccctacctctattaaaaaaattttttttaattttttaattagccaggcatggtggcatgcacttgtggtcccacctgctcggtaggctgagatgggtggatcacttgagcccagaagcccaaagctatagtgagctgtgatcataccactgcactctagcctaaaaaaagaaatactgccatttataatagcatcaaaaagtgtaaaatacctgaggataatctgtccacatgtgtgcaaggcctgtacattgaacaccacaaaacattgaggagagaagttaaagaagacctaaataaatggagagaaatgccatcatcatgagtcagaacactcagtattgttaagatatctactctcctcaaactgatgtatagattctatgcaactccaatagaaatgttagcatatatttttaagaagaaatcaataaacttattccagaaatcatgtggaaatgcaaatgaccctaaactatgaaaaacaacattgtaaaagaacaaagttggaggaaaaacactacctaatttaagcttcattataaacttacattaaccaaaacagtgcactattgccttcaaggaagaaatgtatatcaaaggaacaaagtatagagtccagaaatagacccacaaatataaggacaactgatttttgacaacaatgcaaagacaattcagtgcagaaagatcatcctttcaacaacttgtgctggaacaggtagataacaaaaataagcttttatctatacaccacatcataaaaaactcaaagtggatcataaaagaagatttaaatttaaaagctagaactataaattttcaagaagaaaacacaagagaaaattgttgcagtcttggcttcagagaagatttcttagatatgacacaaacagcaacatccaaagcataacaaatttggaactattcatatatacaacaatatggataaatctaaaaataattaggtcaaatatgtaaaataacatgaaatttcaggattcccaaattcatcatgccaagggaaaagttaagcctgggaaatgaattgtgcaacattaccaacctttgtccccagataactgtaatttcacaaccctgtgtcatagcgtaatacataatccagattcccacaacagtaaaaggcattataccttcccagatgaccttcctcaaatattgctcacaaggaaattccttgctagcccctaaatctttcaggatacatatccccctataaaaccagcacatgccaattgtaaccttaagtctgcaacctaagtttaactcctaaaactgagttttgttaaatcttacactgacagtgtcagttacaagcttatctttccagaacaaagacaagatcaatcactcttccacctaccctgaaacgaatacataattgactctttcctctctcttttcaaatcttatcttatgtaaaactcagatttactgaccgctaattagagcctcacaagaatgtaaccatttgcctcactgcctaccctctctccctttttccctcttgcttgctctctgcccttaaatactgagttcccaaacccctctttgtaaagcacaagtcagagatgctcctgtgacttgcagttttcccaggcatgtcctcaaactttggctcaataaacctctagtgattgagacacttgcctcagtcactttttttggggttaacaaatgaattaggtcagacaaaggagaataagcatcctatgattccatttacttaaaagggcaagaaacaaaaactaatctatggtaagaggagaccagtgattgtccgggaatgggacaggttggcatggagagggaagctagagacagatggagaggattacaaaggtgcataaggaagctttttgaggtgatgaatatgttcattatcttgactataatattggattcaccagagagagcatacatatgttaaaacttattaaactatatattttaaacatgtacggtatatcgtatgtcaacatggctcaaagaaagtatttgaaatacatttgtataagtttttgatgcaattaaatcatccaaaagattccaactactacactcttgttatattaccagatcatta

SEQ ID NO: 26 - DNA, 25465 bp, Homo sapiens
  source 1..25465: mol_type = genomic DNA
agctcagcgcacttggcttaaggggcggcgcgctccctgcctgctgctgggcggagggaaggcggcaagagctgcggagcccctggaaggtgagaaggactcggagagggaagaaggcccgagactcgagaatgcggggttggggccgggagggatgcaagttccctgggaattagggggtccagcctctgacctccttccggtgaatgttgacgacggctgaattgatcactgattctcaaggggggcatcggacatctgggacccttaagagggcctttgccgatcacacacctgcagccccctgcccgttagaactcctgcactcccccttgccccgtcttacaaatggagaaactgagcccactcccccagatcctaagtcccgcttgatgtaaaggaaagaaccctggcgtaagggtctgggtctgaggtcccagttccggcctggtcacctttagcaacttcctgcccctctgtcagcgtcagattctccatctgtgtcagaggtggaccggcccaaggaaaatagatcaggaatcgctgactccaggagtctctatcccagccccttcgcctgactctttctctggctcccgcggtccctctgagcgattaatgctacataaggtgtgggcagagctggggtcgtgcctccagctgggcaactgcctgtctctctgggtgcctgggtttgctttcttgggcctcggtttccacttctgtagagtggggtgatagtccagcacttcccctgggcgtgtgaaatgtccagcactgccaatattcgttgctgttatcttcggagaacagtgaggggaaaggaatccttgcctgggctgggccaggcaggaggctgggggtcaggacctggaagaggcttccaggtgaggcttggggtggagcctggtgacgaaagcgttaagcccaaactcggtccctggaggattagaggatgatctttaagtccccagctgtcagccctgctcagagcgacagtcctggcagccaatcagatgcgaggacggctgcgggttgcgctcccattggtttactccacccctggggtagcggagcctctttatcgagtgactactgtttgcctcgctctaatcagagcttccaggaaccctgcgctgtgggataaaggaatgaggttcagaaaggggcagggagttgcccgcagccgcaccgcacgtcttcagcccgaccgttgtcctgacctctctgtcccgtcccctgcccagtctcaccatggccttctggacacagctgatgctgctgctctggaagaatttcatgtatcgccggagacagccggtaacgccccagtgtgagaccagggccgggtgggcaggcagcccccactgtcccccaccgtctcccacctattctcccccaggtccagctcctggtcgaattgctgtggcctctcttcctcttcttcatcctggtggctgttcgccactcccacccgcccctggagcaccatgaatgtgagcccccccagggaccaggcactttgtgtgtgtaggggaaggcagatggctcacccgtgcacaggaatcccccgtgcatgtcagggagccttcaccaggccgccaatacatggcatgggagtgagctctccatcgctggaggcatgcaagcggtgccgggcgacccgatgggggtggagtcaggcagagtccacagggcctcagcaccaggcgtctccccgcaggccacttcccaaacaagccactgccatcggcgggcaccgtgccctggctccagggtctcatctgtaatgtgaacaacacctgctttccgcagctgacaccgggcgaggagcccgggcgcctgagcaacttcaacgactccctgtgagccagaggcagtgggtgcggccggcctgcaaactcggggctgcagtgccggccggaaccccgcctcctgccctctctctgtccccagggtctcccggctgctagccgatgcccgcactgtgctgggaggggccagtgcccacaggacgctggctggcctagggaagctgatcgccacgctgagggctgcacgcagcacgggtgaggaggccggggggcctctggcagggctgagctctgagcctcaacttgccgggccgtgaaatgggcacagggtgggggtgggtgcctcagaccaacgtccccccagccccatgctcccgtgcgctcctcccccagcccagcctcaaccaaccaagcagtctccactggaaccacccatgctggatgtcgcggagctgctgacgtcactgctgcgcacggtagggtgtcggggcgggaccgcgctgacttcctgggacactgcactggggatgtcctggcactgccccaccccgggccaaggacctcccgttccaggcatccaggctgtccctggtctctgcggtgatgctgcttgtccgtctgggcccccagacagagtgtgtctgacccagtgaggaagactcgtctgtgagatctccaatgagtccctttgcctctcagagcctcagtttccctatttgtaaagtgggggctatgatagtatggtctgcctgggaactggccagagcgctggacccctagtgagtgttcaaaatcattgtcccccttgtggtctttctccccaggaatccctggggttggcactgggccaagcccaggagcccttgcacagcttgttggaggccgctgaggacctggcccaggaggtacgaggccccactcatcctcaacccccatggaggcaacgttggcaggcagcctgcgccgggagggtctggggcagcccgggcacttcccttgggtgggttttcaggaggattagacagcgagagggagaggctgcccctggcccagtgccctgccctggttagggcttggaggtgggatcattgccagctccgtctggtaacctctctctagctcctggcgctgcgcagcctggtggagcttcgggcactgctgcagagaccccgagggaccagcggccccctggagttgctgtcagaggccctctgcagtgtcaggggacctagcagcacagtgggcccctccctcaactggtacgaggctagtgacctgatggagctggtggggcaggagccagaatccgccctgccagacagcagcctgagtgagtgactgacctcggtttcccctcttgggaagtggaactctgggcaggggggcagggcctcatggcacccccatcccaggccccgcctgctcggagctgattggagccctggacagccacccgctgtcccgcctgctctggagacgcctgaagcctctgatcctcgggaagctactctttgcaccagatacaccttttacccggaagctcatggcccaggtgggggcagcctggatgctggggtgggagggtggtggccagagcccatccagtaccctcagtccaggtgggccagggccaggccggagggtcacggaaactatttgaagaagtaggagttagccgatggagggggatcagcttgtgcggaggatcagaggcacacgcaggagcaaggcagagggggcagggggtgggcaggggtcctcagaggaggagagggtcatcagtggagggggtgctgtccacaggtgaaccggaccttcgaggagctcaccctgctgagggatgtccgggaggtgtgggagatgctgggaccccggatcttcaccttcatgaacgacagttccaatgtggccatgctgcaggtgtgcgggggtgctggggaggtgggatgtggctccccggtgaggagggtagacaggcccggtggatgggaaggtgggctccgtgcagacccccacttttttttttttttttttgagatggagtctcgctctgtcgcccaagctggaatgcagtggcgtgatctcgactcactgcaacctccacctcccgggttcaagcgattctcctgtctcaccctctgagtagctgggactacaggcgcccaccaccacgcccggatgattttttttttttatttttagtagagacggggtttaaccatgttagccaggatggtctcgatctcctgacctcgtgatccacccgcctcggcctcccaaagtgctgggattacaggcgtgaactaccacgtcctgctttttttttttttttttttttttttaagagatggagtctcactctgttgcccaggctggactgcagtggcgagatcttggctcactgcaacctccgcctcctggattcaagcaattctcctgcttcagcctcacaagtaactgggattacaggcatgcgccaccactcccggctactttttgtatttttagtagagatgggctttcaccatgttggccaggctggtctcgaactcctgacctcaggtgatccacccgcctcgcctcccaaagtgctgggattacaggcatgagccactgtgcccgacccagactctcactttcacctgcgccccccagcggctcctgcagatgcaggatgaaggaagaaggcagcccagacctggaggccgggaccacatggaggccctgcgatcctttctggaccctgggagcggtggctacagctggcaggacgcacacgctgatgtggggcacctggtgggcacgctgggccgagtgacggaggtgagggcctgtccacctgcggggtctgtttcagtggggagggcaggtcccatcctagtgttcccaccctggtgttcccagggggaggcgggcccggccctagtaagagcctgggatttgtagagatctcaggagggagccggccgtgggcctacgaggggaaaacatggcccagccccgaggtccagggggaggagcggagtggtctaggaggcaggcggaccccagcgcctaggactcacccccgcatcccacagtgcctgtccttggacaagctggaggcggcaccctcagaggcagccctggtgtcgcgggccctgcaactgctcgcggaacatcgattctgggccggcgtcgtcttcttgggacctgaggactcttcagaccccacagagcacccaaccccagacctgggccccggccacgtgcgcatcaaaatccgcatggacattgacgtggtcacgaggaccaataagatcagggacaggtcaggcgagggagggggcggggggatgagggactgggcggggccaagagcgtggtgggtggggccaggcagcattcagcctattggagaccatgatagacaggatctgggctgtatcaacagtggtatggtagccagagcccggggctccttagaccaataggggcccgtgatgggcggggcctaggtgcatgaggggcgtggccatgggcctgagataagatgagagcaggtataggttgagggcaatggtgggcggagccaggtgtattattaggtccctggaataagggtggagctaaaattgcaccgggtgctgagcgcagtagatcttgcctgttatctcagaactttgggaggccaaagtgggagaatctcttgaggacaggtattcgagactagcctgggcaacatagtgagaccgcctcccccccgcccccctcccccaccaacctcacgaaaatatctttaaaaattagccaggtgaggccgggcacagtggctcacgcctgtaatcccagcactttgggaggctgaggcgggcggatcacgaggtcaggagatcaagaccatcctgactaactcggtgaaaccctgcctctactaaaaaaaaaaagtacaaaaaattagccgggcgtggtagcacgcgcctgtaggcccagctacccaggaggctgaggcaggagaatcgcttgaacccaggaggcggaggttgcagtgagccgagatggcgccactgcactccagcctgggcgatagagcgagactccgtctcaaacaaatgaataaatgaataaaattagccaggcgacttgggaggccgagctggggggatcgtttgatcccgggaggtcaaggctgcagtgagctatgattgcagctcttcactccagcctgggcgacagagcaagaccctgtctaagaaaaaggttattcagggtggggccccgggagtttctagcccttccctacaaccggccaccatgcccctctcgcaggttttgggaccctggcccagccgcggaccccctgaccgacctgcgctacgtgtggggcggcttcgtgtacctgcaagacctggtggagcgtgcagccgtccgcgtgctcagcggcgccaacccccgggccggcctctacctgcagcagatgccctatccgtgctatgtggacgacgtgtgagctctggcacccctccccgctcttccccgcggcgggaaggtcccgggtgtgggggtgggcccaggctctgttgggaaccttcctgcggtccaggctgcgaactttgcacctttacaccactccacgtgacctgctgcagcgggaggagcaggggactctgagggtctggtggggggggggactctgagggtctgggggcccccggcgcagggacagcctgggctgcactgatgcctgagagccaaaggctggctggatcaggttccaaggaacagggaggcaaatcttcccgccttgagatcccgggacacgaaccagtcgtgccagatggtgggcggagggggggtctgcggagggtctccagcctccaccccagccgtccccaccccaggttcctgcgtgtgctgagccggtcgctgccgctcttcctgacgctggcctggatctactccgtgacactgacagtgaaggccgtggtgcgggagaaggagacgcggctgcgggacaccatgcgcgccatggggctcagccgcgcggtgctctggctaggctggttcctcagctgcctcgggcccttcctgctcagcgccgcactgctggttctggtgctcaaggtgggcgcgcctcggcctgcccggctgcagaatgggtgcgctggagggtgacagacaggggcggccccacgtgggtgcgcgcccccaggccaatccaggagctgcaccctaagctcccgttgcctctcacagctgggagacatcctcccctacagccacccgggcgtggtcttcctgttcttggcagccttcgcggtggccacggtgacccagagcttcctgctcagcgccttcttctcccgcgccaacctggctgcggcctgcggcggcctggcctacttctccctctacctgccctacgtgctgtgtgtggcttggcgggaccggctgcccgcgggtggccgcgtggccgcggtgagagccgggtcgggcgtggatgggggacgccccccgcttcggccgctcactgaccgcccgcttttccgcagagcctgctgtcgcccgtggccttcggcttcggctgcgagagcctggctctgctggaggagcagggcgagggcgcgcagtggcacaacgtgggcacccggcctacggcagacgtcttcagcctggcccaggtctctggccttctgctgctggacgcggcgctctacggcctcgccacctggtacctggaagctgtgtgcccaggtgggccgtagggggcggggctccgggccgggtcgcacctgctttgcgggaggctgagctaggggtgtggcctccaggccgtttgggggtggggggtggcttattcccttggagagaaggcggggcttcttggcacacgcatgcaggtggctgcattggaggggcggggcctgaggcaggtgggcggggtttctgggccgcctcatacctggacgccctgattccaggtgtatggccagaagctggcacagtcgccgggcgctgtggctcacgcttgtaatcccagcactttgggaggccaaggcaggagaatcgcttgagcccaggagtttgagaccaggctgggcaatatagtgagacctcatcaatacaaaaagttagctgggcgtggtggcacgctgggcgtggtggcacgctcctgtagtcccagctactcgggaggatggggtgggaggatcactcgagcccaggaggttgaggctgctgtgagccgtgatcccaccagcctgggcaacagagtgagacctccatctctttaaaaaaaaaaaaaaaaaaaaagctggctgggtgcggtggctcacgcctgtaatcccagcactttgggaggccgaggcgggcgggtcatctgaggtcgggatttcgagaccagcctgaccaacatggagaaaccccgtctctactaaaaatacaaaattagctgggtgtggtggcgggtgcctgtttcctagctacttggaaggcagaggcaggagaaatgcttgaatcccggaggcggaggttgcggtgagtcgagatcgcgccactgcactccagcctgggcaacaagagtgaaactcagtctcaaaaaaaaaaaaacaaaaaaaaaaaaaacaaggccgggcacggtggctcacgcctgctttcccagcactttgggaggccgaggtgggcagatcacgaggtcaggagatggagaccatcctggctaacacggtgaaaccccgtctctcccaaaaatacaaaaaattatccaggcatggtggcgggcgcctgtagtcccagctactcaggaggctgaggcaggagaatgacgtgaactggggaggcggagcttgcagcgagtcaaaatcgtgccactgcactccagcctgggcaacagagcaagactccgtctcaaaaaaaaaaaaaaacaaaaccccaaaaaaagcctggtacactcctggggggtgggctaagcaataacccgcgcccctccccgcaggccagtacgggatccctgaaccatggaattttccttttcggaggagctactggtgcggacctcggccccccaagagtccagccccttgccccaccccgctggacccaaagggtgaggcactacgaggcttaatagctggttgtccacatatgcccagttcccccccaaaacgagattccacagatgccaatgacaatgacctggacaccccaaccctcacacctgccctgaagacactgcggtccccaagctcccgcagcttttataggccccggcccagcaggtcccggattccacagcccagctctgagggacttgcaggccccaggacccccatgacctccatggctgagtccaccccatctctgcagtgctggtagaagaggcaccgcccggcctgagtcctggcgtctccgttcgcagcctggagaagcgctttcctggaagcccgcagccagccctgcgggggctcagcctggacttctaccagggccacatcaccgccttcctgggccacaacggggccggcaagaccaccaccctgtgagcccccaaccactccctccccgtgagcccccccactcccaccccgtgagcccccccaccactccctccccgtgagccccccaccactccctccccgtgaaccccccaccactccctccccgtgagcccccccaccactccctccccgtgagccccccaccactccctccccgtgaaccccccaccactccctccccgtgagcccccccaccactccctccccgtgaaccccccaccactccctccccgtgagcccccccaccactccctccccgtgaggccccccaccactccctccccgtgaaccccccaccactccctccccgtgagcccccccaccactccctccccgtgaaccccccaccactccctccccgtgagcccccccaccactccctccctgtgagccccccgaccgctccctccccgtgagcccccccaccactccctccctgtgagcccccccaccactccctccctgtgagttcccccaccactccctccctgtgagtcccccaccactccctccctgtgagccgcccaaaccactccctccctgtgagccccccaccacttcctccctgtgagctccctgtgaggcccccgaccagtccctccctgtgagcagtaatggcgccactgcactccagcttgggcaacggagtaagaccctgtctcaaaataaatagggcgggagtggtggctcacgcctgtaatcccagcacttgggcaagccgaggtgggaggattgcctgaggtcagagtttgagacacagcctggccaatatggcaaaaccatctctactaaaaatacaaaaattagccgggtgtgatggtggcgtgcacctgtaatcccagctactcaggaggctgaggcaggagaactgcttgaaccctggaggcggaggttgcagtgagccgagactgtgccgttgcactccagcctgggcaacagagtgagactctgtcacaaaaaaataaaaataaacaaataaataaaaataaggctatcacagggttttggatgtagcatttaataggtgctctgtggccaggcgtggtggctcaggcctgcaatcccagcactttggggggccgaggcgggtggatcacgaggtcaggagattgagatcatcctggctaacatggtgaaacagtgaaaccccgtctctactaaaaatgcaaaaaaattagccggacatggtggcgggcgcctgtagtcccagctactcgggaggctgaggcaggagaatggcgtgaacccgggaggtggagcttgcagtgagccgagatcgtgccgctgcactccagcctgggcaacagagtgaaactccgtctcaaaaataataataataataataataataataataataataaataattaaaaattttttaaaaacagaaattaaaaatagaagctctgtaactgccagtgcactctgtgaagggggctactctgagacccctctatccacaggtccatcttgagtggcctcttcccacccagtggtggctctgccttcatcctgggccacgacgtccgctccagcatggccgccatccggccccacctgggcgtctgtcctcagtacaacgtgctgtttgacatgtgcgtctcggcaggcccagagtgcagcggtgggaagggactggacgccctctgggactctgcctgccatgtgggtcactctgctctgtgcactggccgcaggctgaccgtggacgagcacgtctggttctatgggcggctgaagggtctgagtgccgctgtagtgggccccgagcaggaccgtctgctgcaggatgtggggctggtctccaagcagagtgtgcagactcgccacctctctggtgagcccatccccaagggaggtcacctcacagggaggggcctggggattcatcctgaaggcagggggaagccgggtactgaggtccacgtgggtaggcaaccttgcccaaggctgggtgtgacacactgaggtcccttccccatctctaccaggtgggatgcaacggaagctgtccgtggccattgcctttgtgggcggctcccaagttgttatcctggacgagcctacggctggcgtggatcctgcttcccgccgcggtatttgggagctgctgctcaaataccgagaaggtaagagctggggattctgctcgaggggccagaaaaggcttctgacaaggaagtgctggggatggggttttgaggaatgagtaggagtttgctacatgtggaccccacttgttgctatggcatttaggggctactgctcaaataccgagacagtaagagttggggatagacagaggttcccctggattctgcctgaagggccagaaaaggtttccaacaaggaggttctggggatgaggttttgagggatgaataggagtttgcttcatggggcagacaactcctggcagaggccccagctcgggcaaagacgcggcggcctgatggtagttgtgggttggtcccccgtgcctaggtcgcacgctgatcctctccacccaccacctggatgaggcagagctgctgggagaccgtgtggccgtggtggcaggtggccgcttgtgctgctgtggctccccactcttcctgcgccgtcacctgggctccggctactacctgacgctggtgaaggcccgcctgcccctgaccaccaatgagaaggtggggaccggccttctcctgacccctgacccccgggactctgttcagccctgaaggccaagccacttggtgcctctctgcccgcaggctgacactgacatggagggcagtgtggacaccaggcaggaaaagaagaatggcagccagggcagcagagtcggtgagggccggggtgggagacccaaggcgggtgggcagtggggtggctgtgccttaacttgaggaggaggagggggagggggaagaggaggaggagggggaggaagcggcagaggaggttgaggcggaggaggagggggaggaggagggggaggagtaagaggtggaaggggaggcgaaggggaggagtaggagggagaggaggagggggagggagaggaggagggggaggagaaggggggaggaggaggggaagggagaggaggagggggagaagaaggggaggagtaggaggggagcagaaggggaggaataggagggggaggaggagggggagggaaagggggaggagaagggggagaagtaggaggaagaggagggggaggagaagggggaggagtaggagggagaggaggaggagggagaggagggggaggagaaggagaggaggaggagagcacttgagaacctgagatgatgcccccatccctgggctgagccggaaccatgagactaacttgaacactgaccccacctttaacccaaccagggctgagcccagagacaaacctacccctgacctccaacactaggtccagcactgccctcaagatctctttttgtttgtttctgagtcttgctctgtcgcccaggctgtagtgcagtggtgtgatctcagctcactgcaacctctgcctcctgggttcaagcatttctcctccctcagcctctcgagtaactgggattacaggtgggttccaccatgcctggctaatttttgcatttttggtagaaatggggtttcaccatgttggtcaggctggtctcaaactcctgacctcaggtgatctgcctgcttcaaccctcaaagtgctgggattacaggcgtgagccactgcgcccggccgcacctggcctacgttcttaaccctgatctctgtctgccgggacagtcccctcacaggtcaccaatgcctcttccccagggagactggggtggggcgtgagccggggctccctgaagcacccctttgtccacacaggcactcctcagctgctggccctggtacagcactgggtgcccggggcacggctggtggaggagctgccacacgagctggtgctggtgctgccctacacgggtgcccatgacggcagcttcgccacactcttccgagagctagacacgcggctggcggagctgaggctcactggctacgggatctccgacaccagcctcgaggaggtgtgaggcctgggtggtggtgaggtggggccaggaggagggcttcctggaggaggtggtgttttgaaggatgaatagcgtgtttatgagcagcaaggacattcagggaggaggcatggcacatgaggagctctggtggctcagatgtcccttgggaaggcctgggggacccatggtgtaggaggggtggggggctcacaagcccccagttctccctgtcggtgtccagtctctgagcccctgcttgtctccccagatcttcctgaaggtggtggaggagtgtgctgcggacacagatatggagggtgcggccacagctccctgacccctgaccccagtccagagtgggaccagaggccaggtccccatccctggcttagtgtggcccaaggcatagcctttaccctatacctgattcctgatcccccaatccgtgaccctcaactttgaccctgacccctgatggccctgcagatggcagctgcgggcagcacctatgcacaggcattgctggcctagacgtaaccctacggctcaagatgccgccacaggagacagcgctggagaacggggaaccaggtaagtccttcccagtggccctggggtcctcccagccacccccccacagcagcgtgagcactgaccctctcatccctcacagctgggtcagccccagagactgaccagggctctgggccagacgccgtgggccgggtacagggctgggcactgacccgccagcagctccaggccctgcttctcaagcgctttctgcttgcccgccgcagccgccgcggcctgttcgcccaggtgaggagggctagcaccagggagtcgcatgggagtccctgagttccctaccctggccgtccactcagtggcctaatccaaacccttacccccgtgtgtattcccaacccaaagcacatttattgagggcactggggagccatgggtggttgtagagcaggagcagggacaggtgcaagcaagcctggagggtggatggaagcagcagctgatgggctggtcccccagatcgtgctgcctgccctctttgtgggcctggccctcgtgttcagcctcatcgtgcctcctttcgggcactacccggctctgcggctcagtcccaccatgtacggtgctcaggtgtccttcttcaggtgggtgcagaaggaaggggctggtggcaggaagactagggacctgggggtacagccctgaccctacatctcccctcacacacagtgaggacgccccaggggaccctggacgtgcccggctgctcgaggcgctgctgcaggaggcaggactggaggagcccccagtgcagcatagctcccacaggtgaggcgtcttgttggcctggacctttcccctctctggcctcagttttcccatctggtccctggccagggagcctcagggggcacctggagcatcccctgtgcccacctgggagctgggagcctctgtggctccaggaacccccagaagctgggtgcccacagaccttcaccttgaccctgcagcgcccttgagtgtgcacagcccattgtctgcaggttctcggcaccagaagttcctgctgaagtggccaaggtcttggccagtggcaactggaccccagagtctccatccccagcctgccagtgtagccggcccggtgcccggcgcctgctgcccgactgcccggctgcagctggtggtccccctccgccccaggcagtgaccggctctggggaagtggttcagaacctgacaggccggaacctgtctgacttcctggtcaagacctacccgcgcctggtgcgccaggggtgagccatgccctgggactcagtttccctggctatagcatgggtccttgggttgctggggctggtgtggtcctggaggaggaagtggaggggttggatgcccagcttggggctacgggctgggagtctcgcgtaccttcctttcctctttttttttttttttttttttgagatggagtctccctctgttgcccaggctggagtgcagaggtgtgatctcagctcattgcaacctccacctcccagtttcaagcgattctcctccctcagcctcccgagtagctgggattacaggcacgcaccaccactcccgactaatttttgtatttttagtagagatggggtttcaccgtgttgccaggctggtctcgaactcctgacctcaggtgatccacccgccttggcctcccaaagtgttgggattacaggcaggagccaccgcgcccggctttctttcctgtttttgtccacccttgactctgtgctcccctctcaccatctctctctctgtcccacatccctgtctgcctgtgtctctgtccatctctcccacagcctgaagactaagaagtgggtgaatgaggtcaggtgaggaggggtctagcttggggtcccctgccccagttccactcccatgccctctgcctgccccctgggagctctcccggcccccccggccctcagctccccttccctgcctgcatggccccacagatacggaggcttctcgctggggggccgagacccaggcctgccctcgggccaagagttgggccgctcagtggaggagttgtgggcgctgctgagtcccctgcctggcggggccctcgaccgtgtcctgaaaaacctcacagcctgggctcacagcctggatgctcaggacagtctcaaggtgggaactgggggggcaggtgggcgtcctgtcacagcaaggtccaaccccattgctctgaccctatgaccttgacccccacccagatctggttcaacaacaaaggctggcactccatggtggcctttgtcaaccgagccagcaacgcaatcctccgtgctcacctgcccccaggcccggcccgccacgcccacagcatcaccacactcaaccaccccttgaacctcaccaaggagcagctgtctgagggtgcactgtgagtccctccaccctgcatgtcctaccctgcacgtcctaccctgcctccatttctctgtcgtttggggtggtgggagctggatttgaaccctgacacactcttgctttataaatgggggatagaaactgttcctctgctccctaagccagggaaatgggacctcctcagactcagcgggccccagcctcccccacacatcctcatcccaccaacctttatcctgcctgagacctgtacaacctctgctgccaaatcccaggcaccctcatccctaaattgcccctgccatctctgccactgctgactgccccatagacctttgtcccatcaatggcgtgttcagctctgctctgagcaacccatgcaccctcaccctacaacagctctcatgtcttcacctccaggatggcctcctcggtggacgtcctcgtctccatctgtgtggtctttgccatgtcctttgtcccggccagcttcactcttgtcctcattgaggagcgagtcacccgagccaagcacctgcagctcatggggggcctgtcccccaccctctactggcttggcaactttctctgggacatggtgcgggggctgcttggacgggtgggggcccagccactgcttgccactgccctgtctggccccttgtaggcaggggcttgtccaagatggcctgggtaaagtcttgaggattgtgggagactttgtgccttcctactcaaaaagcaaggaggtcagggtgggaacagggctgagggtggcagtgcccacctctttaggctgataaaggtaactgccatctccaatgcagtgtaactacttggtgccagcatgcatcgtggtgctcatctttctggccttccagcagagggcatatgtggcccctgccaacctgcctgctctcctgctgttgctactactgtatgggtgaggcccccagtccctcagggcctattcttactgaccccttactgccttccacattaatgctgctgagatagaactctgcagtgactcccaaggagaggatatggaggtctgaggtgatgccgtgtgtgatccaattcagtggtgtgccaaggtggccttaaaagctcatcttatcctgactcatattagtagagttctaaggcagcccatgcctgtaattccagtactttgggaggccgaggcaggaggactgcttgtggccaggagtttgagaccagcctgggaaacatagagagacccacctctaaaaaagaaagaaagagagagaaagagaaagagagaaagaaaaaaaaaaaaacagaaatgtgctttgggtgaaaatgtcaaggtctaaggcagagaagatgggaatggagatttttattcctctcagggcttctcagtctgagtggttactccagtgactcctattgtcccttcagctggtcgatcacaccgctcatgtacccagcctccttcttcttctccgtgcccagcacagcctatgtggtgctcacctgcataaacctctttattggcatcaatggaagcatggccacctttgtgcttgagctcttctctgatcaggtggggcaccacgaggctggggcttgggctgggttgggtcgttggactcagcccctgaccaacatccgtctcccacccttgagcagaagctgcaggaggtgagccggatcttgaaacaggtcttccttatcttcccccacttctgcttgggccgggggctcattgacatggtgcggaaccaggccatggctgatgcctttgagcgcttgggtgagaacttcctgtcaggtggggccatggctacagatagctagcacccttggagacctagagttaattatacagagtggagaaaaacagccccccagggagacagccagggttcttaggtggccctaaggttgggccaagttggaggtacaagaaagcagccataaaaagctaattcttagattacatcacaagaggcctcttctgttttctatgccaattagactccagctgagtggcctatccaatttgtgttcctttcccttaagaatccagagtgacatggatggagaaagggccagaaaccaagactctcatggacccagtccctcctttctatatccacaggagacaggcagttccagtcacccctgcgctgggaggtggtcggcaagaacctcttggccatggtgatacaggggcccctcttccttctcttcacactactgctgcagcaccgaagccaactcctgccacagttagtgaggtctatggagagggtggcaggggccaaggacctactttaagcccacagatattctgtccccaggcccagggtgaggtctctgccactcctgggagaggaggacgaggatgtagcccgtgaacgggagcgggtggtccaaggagccacccagggggatgtgttggtgctgaggaacttgaccaaggtaggtgtggtcaggtcgactgctgggtggggggtgctcccactggcccactcacctttctgaaagacctgcactctcccaggtataccgtgggcagaggatgccagctgttgaccgcttgtgcctggggattccccctggtgaggtgagtccaggggtggaggccaggtgcagggacagtgagtggctgccctactgcatgccctgcccatcatcctttactgaacacctactgtgtatccaccaccttttattgggcacctactgtatgccaatatttgtgctcctatttttattttattatattattatttatttatttatttatttatttatttatttgagatggagtctcactctgtctcccaggctggagtgcagtggtgggatctcagctcactgcaagctccacctcccgggttcatgccattctcctgcctcagcctcccgagtagctgggactgcaggcgcccaccaccacgcccggctaatttttttgtatttttagcagagacggggtttcaccgtgttagccaggatggtctccatctcctgacctcgtgatccacccgcctcagcctcccagagtgctgggattacaagcgtgagccaccacacctgccctattttatctttttttagagacggagtctcactctgtcgcccaggctggagtgcagtggtgagatctcggctcactacaagctccacctcccgggttcacaccattttcctgcctcagcctcccaggtagctgggactgcaggcgcctgccatcacgcctggctaatttttgtatttttagtagagacagggcttcaccatattagccaggatggtctcgatctcctgacctcatgatccacccgcctcagcctcccaaagtgctgggattacaggcgtgagccactgcgtctggcctgtgcatttatcttgagccaacaaaacctcattaagcacctactgcatgcttacctctgttaaacacacactgtgctcactaaagaggtgtactgaatacttttgtgtccatcaacgtttatcaaataccaatagaatttattggacccctattgtatacacatctacatcaagcacttgctcacagccagcatttatcaggcacctgctttgtaccagttcacattcaagcacctactatatacaaatgtatttgctgtgtgccacttattggccacctactagggctggtacacatctgcaaacaagtgctgtttgttagcacacattgcagtatatatatatatttttttttctttttttttcttttgagatggagtctcactgtcacccagcttggtgtgcaatggtgtaatcttggctcacggtaacctccgcctcccaggttcaagcgattctccagcctcagcctcccgagtagctgggaccacaggcacatgccgccatgcccagctgattttgtatttttagtagagacggggtttcaccatgttggccaggctggtcttgcactcctgacctcaaatgatccacccaccttggcctccgaaagttctgggatcacatgtgtgagccaccatgcccggcctttgtttttttctttttttttttttttgagacaaagtctcgctctgccacccaggctggagtgcagtgtcacgatctcggctcactgcaacctctgcctcccaggttcaggcgattctcctgcctcagcctcctgagtagctgggattacaggcgcccgccaccacaaccggctaatttttgtatttttagtagagatggggtttcacaatgttggtcaggctgatcttgaactcttgacctcaggtgatctgcccacctcggcttcccaaagtgctggggttacaggtgtgagccactgggcctggcccacagtatatctttactaagcacctactgtgtgctggccaacctctctaccttgggctgactgtgcacctagcctaagtacacacagtgtgccaggaaacatatggagagctcatgccctgatatttgttgagcactgctgcacacgacctttatagggtacccactgtgtgccaaaagccattccctgctaagtgacagctttatgcctcgctacataccccaatatctgcctagctcccccggggccccacccacggccttccatgtggacactcagaaatcagaggtgctgaggccaggcgtggtggctcacagctgtaaccccagcactttgggaggccaaggcaggaggatcacttgaggtcaggagttcgagaccagcctggccaacatgccaaaaccccgtctctactaaaaatacaaaaattagccgggcttggtggcacacgcctgtagtcccagctactccggagcctgagacaggagaattgcttgaacccaggaggtggaggttgcagtgggccaagatcgtgccattgcgccggggtgacacagcaaggctccgtctcaaaaaaaaaaaaaaaaaaaaaagaggctgggtgccgtggctcacgcctgtaatcccagcactttaggagttcaaggcaggcggatcacaaggtcaagagatcgagaccatcctggccaacacggtgaaaccccatctctactaaaaaaaaatacaaaaattagctgggcatggtggcaggcgtctgtagccccagctacttgggaggctaaggcaggagaattgcttgaacccgggaggcagaggttgcagtgagccaagatcgcaccactgcagtccagcctgggaaacaagagcaaaacttggtctcaaaaaaaaaaaaaaaagaaatcagagatgccggaaccagggcctggggcctcactgagcaccatctgtgggcatccctgtagtgttttgggctgctgggtgtgaatggagcagggaagacgtccacgtttcgcatggtgacgggggacacattggccagcaggggcgaggctgtgctggcaggccacaggtgaggggtgccaggtagggtcagggtggggcagggttggccctgacgtccttgtgcttccccacccctccacctccagtgaatggactgggctcactgccccacacctgcatggtctctgagacccctgcacctctacctcccacacgcggaccaggccctgagacacccctgtcccttatcagcgtggccctggatgggtgggccctgagacccctgtgttagccaccagtatggtcagggactagccagctctctgagcccccggcgcccccatccccagcgtggcccgggaacccagtgctgcgcacctcagcatgggatactgccctcaatccgatgccatctttgagctgctgacgggccgcgagcacctggagctgcttgcgcgcctgcgcggtgtcccggaggcccaggttgcccaggtgagcccactttgtccccaccgctctcacctcccagggcccacccgacccaggccgtgcctctaaagcctggcccaatcccgcactctctcgccttggctccatccctgtccctgcccccagaccgtgcttccttcccctatacctctgtcccccatcctggtccaatagggatgtggctagcccgcctctttgccccgcaacaccaagttccaccattctcattggtccacccacccttccttccgctgcacgttgcccctctctccttgactctgccttctgtggccctgcccacttgctcctcttctgcctaccccctagggcttcgcgcctttctcgctggggtcacggtcacattctcactctggccgttcccagtttgcagccgtttcactgcctcttccatctgcttgggggtcttgtctttgccctggcccgccccaccctcacactgtcccaccccatgccctttctggccctgcctcatacccatgttggctccacccacaccatggccctgctccatacccatcccagctccacccataccaaggccccaccccatactcatgctggctccacccacaccatggccccgccccatactcatgctggctccacccacaccatggccccgccccatactcatgctggctccacccacaccatggccccgccccatactcatgctggctccacccacaccatggccccaccccatactcatgctgtctccacccacaccatggccctgccccatactcatgctggctctacccacaccatggccccgccgcatactcatgctggctccaccagtgtggccccgccccatactcatgctggctccacccacaccatggccccgccccatactcatgctggctccaccagtgtggccccgccccatactcatgctgtctccacccacaccatggccccgccccatactcatgctggctccacccacactatggccctgccccacacccatcccagctccacccacaccatggccccgccccatactcatgctggctccacccacaccatggccccgccccatactcatgctgcccccaccacactatgtcccattctcacatttgccctgccccatgcccattatgcccctgctccacactcaatgctggccccgccacactgtggccctgccccatactcatcaatatgagtccccatgcctactctggccccaccccacagaccgctggctcgggcctggcgcgtctgggactctcatggtacgcagaccggcctgcaggcacctacagcggagggaacaaacgcaagctggcgacggccctggcgctggttggggacccagccgtggtgtttctggtgcgtgggagcggtgcctgggtggggtggggcctgcgacggaggcggggccttgcttatgggatcttccgtgctccccaggacgagccgaccacaggcatggaccccagcgcgcggcgcttcctttggaacagccttttggccgtggtgcgggagggccgttcagtgatgctcacctcccataggtgggccgggctctgatgccctgggctgtggttaaggtgatccaggcctggagagagagccccaaagcacaaggccacaggggatggggggtcctggccctagtggggcgagggcgccaggccccggggtgtaaggacacacagaggtgggacgcggcgccgggatcagaacggtctggggaagagtggggagatgtccacaccagaagggtggcccaggccgggggaagcaggcagtgtggcgccaggcacaggtggccccggcctcacggagctcgtggtgccgggtcccgacagcatggaggagtgtgaagcgctctgctcgcgcctggccatcatggtgaatgggcggttccgctgcctgggcagcccgcaacatctcaagggcaggtgagccggcgcggcctccaggcaggtgtggggtgagggtgggcacgtaggtaggctcaggggagaggccagacgtagagccgggtgaggaaagtttggctccaactggagagatggccaaggctttagattgtcctgcaggggtgactgagggggcgagacaggctggggtgtgctgggggcgcaggaccaggaggcgtgagccgggggctctgggtggatttagaagacacaatcaggtgtgcgttggagtaggtgcagcctggagaggtgagggtggattgatgggtggagttaggggagggcctggttagtgggcggggccataggaaagtggggcgggggtatttattgtgtgggcgggggtagagtgcaagggcgaaagaggagtgtccgaaaaaggagtcaagtggggtgatagcttcgagagcaacctgggcaacctagggagaccccatctctataaaaaatttaaaaattagctggacatggtggtgtgtgcctgtggtctcagctacgcgggcggggggtggcgggggactgagacgggaggaccacttgatcgctagggtagtacaagtatggggcggggccagagagtattaggggctggagggtgagctgaggtgggacctgggaaaggcccgatccggtagccctggccccactcactgcagattcgcggcgggtcacacactgaccctgcgggtgcccgccgcaaggtcccagccggcagcggccttcgtggcggccgagttccctggggcggagctgcgcgaggcacatggaggccgcctgcgcttccagctgccgccgggagggcgctgcgccctggcgcgcgtctttggagagctggcggtgcacggcgcagagcacggcgtggaggacttttccgtgagccagacgatgctggaggaggtgatcacggcgccggggtcgggctgggggaggcaggctgggggccaggcccgtgggctgaccgtccctcttgtcccctctgggctgcccaccgctaggtattcttgtacttctccaaggaccaggggaaggacgaggacaccgaagagcagaaggaggcaggagtgggagtggaccccgcgccaggcctgcagcaccccaaacgcgtcagccagttcctcgatgaccctagcactgccgagactgtgctctgagcctccctcccctgcggggccgcggggaggccctgggaatggcaagggcaaggtagagtgcctaggagccctggactcaggctggcagaggggctggtgccctggagaaaataaagagaaggctggagagaagccgtggtggtgaaa

SEQ ID NO: 27 - DNA, 13489 bp, Homo sapiens
  source 1..13489: mol_type = genomic DNA
agattcaagcatttgtttcttctttcctacgccattgaagaggctgacgattataataattacaatgaattacagaaggaggtgggatctcagtcctccagggtcagggactcttaaactacctcctttctctctttgctcagctcttccccatacccctgtctcagtgtttcttcctttcctcaaaatcctcaacagagaagccagagctgggcaggtgtggggtatgggttagccagaggtgtgctggggtcaggccacctcgccggtggcattccgccttttctcacacacccagcggtacacctgcaggcagaagtcatcgttccagcggccatccggctggacttcaacacagtcttcacttccacccagctcgtgcccgtgccaattatctggctgagtgacagcccagttcctaaggaggcaagagaaaactcggactctgccacggtggtgagaaagcgacttacccatcctcctcctcttcatgaccattttccttgaaggccgagagtggagctggggtgtgccctgctacccagtctggggagaacccaaccgcagagaaagatgtttcctatgcccagtcccagcaaccctcacccccagcccagaagagcacagctttggaggggttggagtctggggaggagaggattggggaatttggtccctgagggacgagtcagggtagcttggagtgaaaggccagggggctgtccccagagaaatctaacaaggagatgagggaagaggccacttacttgtagttgtgcctatagtctgtgccatccacccatttccaagagccatcactgtccgtgagacctatccaggtattgaaggggttcgtgtgttgtacaatgaatttctggaaacacaggcaaacaggaaatttctagtctcttgtgcctttctcctccctccatgcaggcatggaactgtggcccctctcagccttccccagcctgatctgccctcaggctgaagcaccagctcccgacaagactgcttcctagctttttcttccgtcactctagctactgttcagtgcacatttgctaggctagacttcgtgctgtctgtgcaaagatgatctcatttaatcctcagaagctctctaagatgggcactgcagtgaccacattttgcagggagttgcagagccagagagccaatcctgtacctgagttagtggccactgtcccctgttcacagccctgggccggtgtcccccttcattcccagcttatggctctacccaagttccggttctctccctgtcttctgcccacagcctcgaactcctgggatcccgaccctggtccctgctcttactgccccccagaccccagacccactgaagatctcagtttcactggcctctcaagtacattggcccctggtagctctcgcttctatgtgtagctgtcatttcctgagatctgtcaggcccgggagcttctaagcttggacccactgcccagggccccattatgatctagctacgtggagtctgacaatcggggcaaaataggaagacaccggggtgtgaggaagcagcccggacagccagttgccaggggcttgggtgaaagtggacttcgagcctgcagatagctccccgggacccacgcgcacccacactcccagcacggtagcccctccaagtggctttctcttacacatacagctgttcctggggacctaggtcccgtggttcggtagggtaggaggggaaggtgtggtcacctggttttgtggagaaagtggagagggatggatccgttgagcaacgtgcacacttaacaattccctttgacagcctggaattttccttccaacagtatttgaaggacaattgcctaattctactctcactctctagaaaaacaactaaggttgcagttattcacctcttccgattgagcatcagaaactggggcatccctaaattctggaatcccacaaataggacaaagtcccatgcatgaaggggcagccctcagaggcaggtgaggctgctccccaaattcagaggagtcaacggagttggagagaaagtgcctggagacaacacacactatgtgctgctacctgctgccagccctccctcccatcaccacgagaaacagaacaactgagcagactacaaattagcagtatccagcccgccgtgttaaagactgagaggaggaatcaaatcatgccagatgatcagagaagacagtccgggagaattcattccccctttcctgggtgaaccataggaaagaaagcactgtgcccattcacaaaagtaatggagaaaatcatcatggaacttatgcccccaaaaagaaagaggaagatgaggcagatgaaaaatgaactgtgatatcaaaaagagaggtgaaaaatagactttgaaaagaagccttgtttcggaatatgaggggatgttggagaacagtttcttttttattattattatactttaagttttagggtacatgtgcacaacgtgcaggtttgttacatatgtatacatgtgccatgttggtgtgctgcacccattaactcgtcatttaacattaggtatatctcctaatgctctccctccccgctcccaagaacagtttctttacatgcttcaaaaattttaaaaagaatgacataaaacatgaaagaagatataaaaaaaaaagagaacatgataaggaaaggaaatgaaaagtttgagctacatactaaaaaaaaaagcccaggtgtggtggctcacgcctgtaatcccagcactatgggaggccaaggcaggtgaatcacctgagatcgggaattggagaccagcctgaccaacacggagaaacctcatctccactaaaaatacaaaattagccaggcgtgttggcgcatgcctgtaatcccagctacttgggaggctgaggcaggagaatcgcttgaacctgggaggcggaggttgtagtgagccaagatcgtgccattgcactccagcctggtcaaaaagagcaaaactctgtcttaaaaaaaaaaaaaaaaaaaaaagccaggcgtagtggctcatgcctgtaatcctagcactttgggaaggccaggcgggaggatcacctgaggtcaggagttcaagaccagcctggccaacatggtgaaaccttgtctctactaaaaatataaatattagccaggcatggtggcaggcacctgtaatcctagctactcgggagactgaggcaggagaattgcttgaaccgggaggcagagcttgcaatgagtcgagatcgtgtcactgcactccagcctgggcgaaagagcaagtctccatttcaaaaaataaaaataaacaaaaaatttcagataaaacacttgaggggccgggcgtggtggctcacacctgtaatcccagcacttcaggaggccaaggcgggcggatcacgaggtcaggagttcaagaccagcctgaccaacatggtgaaaccctgtctctactaaaaaatataaaagttagccaggcacgatggcgggtgcctgtaatctcagctactcgggatactaagacaggagaattgcttgaacctgggaggcagaggttgcagtgagccaagatcgcgccattgcactccagcctgggcgacagagcaagactccatctcaaaaaaaaaaaaaattttttttttttttcagatacaacacttaaggaacctaggaaaggaaagactcagacacatgggaataagaggtatcctggtctcctcacctttcctatggaagttatacaaacttttagttttcaaagccaataattttcagcctattatttaaagttatacaagtaatcactggaataactctaaataaactacatagtttccaaaataccataaagaagaaaacaaaaagaacacctctcacatagcaattgtaagaaaattaagaagcatgtaaagcagaaaaaagaaaggactagggttaaacatatctattagaatgtaaatgagacactcacctattaaaagaaaaggtacttattagatttttaaacatcaaaaacaaaacctgccaggtgcagtttttggattacagtggctcagacacctgtaatcccaatattttgggaggcccaggcgggcgaatcgcttgaggccaggggttcaagaccagcctgggcaacatggcacaacaccatttctactaaaaatgcaaaaaactacccaggtatggtggtgtgcacctgtagtcccagctacttgggaggctgaggtgggagaatccgttgagcccgggaggcacaggttacagtgagctgagatcatgccactgcactccaacctgggcgatagagccagatcttgtatcaaaaacaaaacaaaacaaaaaacctatataggagaaataccttaagcttagctgccctgtgctgcccctcagggaatggtccaggatgaagccaagattaatttaaattagcatttttttttttttttgagtcagagtctcgcactgtcacccgggctggagtataatggcgcagtctcagctcaccacaacctctgcctcccgggttcaagtgattctcctgcctcagcctcctgagtagctgggattacaggcacccgccaccatgcccggctaatttttgtatgtttagtacagatagggtttcaccattttggccaggctggtctcgaactcctgacttcatgatccgcccacctcggcctcccaaagtgctgggattacaggcgtgagccactgcacccggcctaaatcagcatttttaagggcgagatccaggagtcgatatattttttttaactcttgaagagattgcaatgtacagtcaagactgagaatcattaatttaaaacagagattcaaaaaggtaagaaacaaaaggatggacagagatacagcaagcaaatgcaagtgacaaaaaaatcaaggaccgtggtatttatatatcagataaattcaaggcaaaaagcattaactgggacacacgttggcttcatagtgacgaaagcaccgtccaccacgaagttgtagtggtcatgagcttattgtgtgccaaatcacagagcactgagatcttaggttgaactgcatgaaactgacatttttataggtcaaaactgatgaaatgttggcaagttcaacctgatcagtaaagcaaaatatgttcgtactcacagtatgctgtaaagtactaacagagcctgatgtaatgcaaacaatacatatattctggcccctgtatcatatggcttaactactgtggcattaaaatactttgaagttcagccagacgcggtggttcacgcctgtaatcccaccactttgggaggcggaggtgggcggatcatgaggtcaggagttccagaccagcctggctaagacggtgaaaccccgtctctactaaaaatacaaaaaaattagccgggcatggtggcacgtgcctgtaatcccagcactttgggaggccgaggcaggagaatggcgtgaacccagaaggcggagcttgcagtgagccgagatcgtgccactgcactccagcttgggcgacagagcgagactccatctcaaaaaaaaaaaaaaaatggataaaataagcctgatccagcctcccagagcaggccttccaagggcttcctcctgcctgtgggaagcgtggcctcacctgctcctcccaggagttgatgaccaccaggtgtgcgttctccagctggcagtacttctccgcctcagcccaggccttcccggagtgagagaaccagtagcagctgccttggtgctccacccagttgacggggcagcaggtcctttgggagcctgaggggacagggggcagggagatgagatccagccggaggggcaggcacactgggcctggagacggccccacccctaccgttgctgtggaggagctccatctggcaggccacgaagcgcaggtccacggggaagtgcttcagatggaagagcagggcatcgtgatctaggacagacaggctgaaagtgctgccggcaggtgtggtccccacctgctaggctccagcctgtggctggggaagcatatacacccacagacacgtacaccatgcatagaccacaccacacaccataccacacacacaccacagacatgtacaccacacatagaccacaccacacacagatccatcacacacacacaaacacaccaagagacacaccacacacatcacatgcgtacacacacatataccataccgcacacacacagactcatctcacacacaccaccacacatgcatacacacacaacacacacatatacaccacactacacaccacacacagatccatgacatatcacaccacacatacggagagagacacagatacacatgcttgcaggcacacacacgcacgcacgcacacgtgcacactacacacaccgcacacgtacacactacacacaccgcacacgtacacatgcacgcacatgcgcacacaccccggaggctctctgacctgctttcaggtcctgctgctgtttctccagcttggctcctagggatgtgatcttgtcacccacgctgcctcctggaagcggaaagccagctgtttccccgctgagcctccctccgtcctcatgctgctgggggaccgggggccagcgcctcgtcctgggcgatgcaggcgtccacctcctggcttcctggaccacacccaggctccctgcactgccacagtggctcaggccactctcctgcttcagtcccttcaatgggtccccattttctcaaaataaagcctcgctctgtcagcacggctcacctgcgtggccgggcccctccccacctctctctggccaccccttacctgcctgcccctccgatgggcctgccacactcgatttgctcacaggcccaagacatggtgccttcctcacctccgggtgtcgcagatccaacctctccacctggcactaacctcgtccgtccccacctgcctccctcctatacatcccccagggcccctggacgccttgcccagcctgcacccccacggcaccccacacagccctgttgcagactcggcactgagcccagcaaacctgtgcggataaatgagaacccagccgtccagcccctcaccgtgggtgctgattgcctggacctccgtcagggtgctcgaggagaagttgctgaaagcttccttcaggctccgcagctcggcttgcagctgtgcaccttgtcaggtggtagtgggggcaggatgaggcagaggggccgtgtccccatcactgtccatgtgactggcccctcaatgtccccgcatttgccccagcttgtgctccaccccgcctccatcccttcccctcccatcgccccgatcgctgcccgccactgcccatgtctctttccctaccccttgcccatccctgctggcccccgtgaccctcactttgggacccagtcacacagatgaccaccagcagcaggatgttgaagctcagggcaagcagactgaagcagaccatggagcagagacgctgtgccaggggctgggcaggaggtggccctgtgggagaggggcatcaggagccggcagcctgggtgtggggagccggagggtaaagacagggcaccgaagcctgaggaggcataacctgggcggggggattggttggggccatgggggggggtcatcataggctttgaccccagcatttgagcattacacacacactcttacacactcgcacccatattaccatgtataaatatacacacgcagctaatctggtgcacacacacccatgcacacgactcaggatattcacatcagctgtgtgcaaagcccggatcctggagctgggggactgggagacgcacagggggcgggggggcagacccggccctgcctaggcacacatcctgagaagggggatctgtgaatggttttcctcccatccagccagtggcagaggcctccagatcacctcgggccttagtctcagctcttctaaggctcctgtcccctcagattggagactccagaagctgggccctgtgttcttcctaaaatccatactggaacagtccctcccctgccaaaattccattgagatccttaaatctgggtcattccaccatagcccactctccaagcacaaccctccaggtcccacctgttgtcctcatcccccaccacgcaaggcctcctccccagcgccctttgccctcgcttccctagaaacctcgttccacactaaatttgctcccctcagcccgaggtcatctcacaggtacctctcctgccccttgatccatctgcaccctgacagcactgacacacacattcacatgccctcacaaactcacacacactcacacactcacacattgctcacttcactcaaaaacacacatttgcacacactcatgaccacgctctgctgtacccactctcacatgtgcatatgcatgctaatgcacacattcatactccctcccacacacacacacctgacacacccacacacgtacactcacacacccacgtcttcctgcacacagagctgggctccctctctgctgcctccagacccagagcagctccagttgtcccagccctgagctcctctctttgcagcatccacctgcaaacagaacaccttctaggccttggaccctgactctgtggacttccttgtcttctcattcctatcaccccccgacccagcaggaccacatcctggggaggctcagtcaggggcccagaatcttcctccccaggtcacttcctgccactgtcctgagtcagacactgcccctgtaagtgactgtccataactcttcatctttttcacaccagtgacttccaccttccccactgcagccacactcaggaccccatttgacccagggaggcctctgacacctccactgcccactcccgctctgagcacagccccaccctccctctcactgcccccaccccttcctccaaggcctttgcattcctctccatccagaagcgctccatgaccacggtgttccccaccaagctggccctccatggctgagtccctgactgctgtcttcagcaccctccactcagagggtcctgtcctgcttcccagtccgacttatcaactcccaatgctgggtcagcccagcaacgtgtctgtatatccaccctgaaaccagactgcccacagggtagcccagctgtgcctccaggtagctctgagatcatgcaccagcattcaatttctccatgcttccattttctcgtgtgtaaaatggagatcacagtcgtagctacccgattggattgctcggataattagatgagttaaaatatgtaatgtgcttcttaggcaaaagtttgaacataaaagacagggtctgcccaagatgggaagagttcttctctccccagaaacaatcaaaacaaaaacagacaactatagaacatggcagctttcaagactctggacatcaggcaaggaggagtaaagatccctgagggataagaagcaaacaacaggaaccctccgatcaccccagcttactgtttggagagagtctgcaggttacaggccaggaaagggaagtccaggcagagcccaagagactccccacgttgaggagatggagctgagagtccgaggagaccaaaacaattaagagttcaaacgatcaaactgactctaagttgcttaactgcatcccggagcaaagctcaagaacatttagaggaatacaaaaatatccagcacccaacaaggtgaaattgacaatgtctggcagccaatcaaagattacaaggcatgcaatgaaacgggaaaacacaatgcataacgaggaggttcataaatatcaaaagagatccagaactgacacggatgctagaattagcaggcaaggatggtaaaacagatattatagccatatcccattatgttcaaaaaattaagtagaattgtggaggatatttaagagtccccaggtgaacttctagagataaaaactacaatgtctgaaatgaaaaaacacactggccaggcgccgtggctcacgcctggaatcccagcactgtgggaggccaaggcgggcagatcatgaggtcaggagatcgacaccatcctggctaacatggtgaaaccccatctctactaaaaatacaaaaaattagccagacgtggtggcaggcgcctgtagtcccagctactcgggaggctgaggcaggagaatggcatgaacccgggaggcagagcttgcagtgagccaagatcgcgccactgcactccggcctgggcaacagagcgagactccgcctccaaaaaaaaaaaaaagaaaagaaagaaaagaaaaaacacactggatggaaataatggaagatgagaaatgcgtaagaaaaatttagggccaggcactgtggatcacatctgtaatcccagcactttgggaggtcgacacggggggaatcacttgagcccaggagctcaagactagtctgggcagcatggcaaaacccctctacatggcaaaaccgtctctacaaaaaaaaatttttaattagccaggtgtggtgccacatgcctatagtcccagctacctgggaggctgaagtggaaggatcgcctgagcccaggaggtggaggccacagtgagttgtgacaagctactgcattccagcctgggcaacagagtgagatgagagagagagaggggaggggaagcgagggaaggaaaggaggggaggggagggggaggggaaggggaaaattttagttaacttaatgaacagcaataactctataaaatgaaacactgggagaaaaaagaattaaaaaatggaaagagaatgagtgagctgtgggacccttaatacatgcataattgaaatctttaaaagaaaaagggggtagcagaaaaaaatcaagtgctgagacaagtggaagatgggccccggtgagcagctgatcagtgtcagctcccatgatgacgttcccccagcccccaccacccgggctgctggagggaaatgcggtgactttgctacatcccttcagacggtccctcactggtgtccctcagcccattcgcgtgagctcactctcccattaatttcagaaatcctggcctctctccaagcctcctgctcaaactctaaattctgtcaccctcagaagattcagcagcatcccgtattctctctgagtgttcactatgtaccgggtgccgtgtgggcactggagttgcagaggagagtgaggcggacagggcctctgcctgtggggacaccgcctggtgggaagtccagccagccccctacagagagaggagatgctactggtgttcctgagtggtcctcgggagggacctcctatccctcctgtcccctgccctgccctgcccagcaccggccctccctcggttggccagcctcaggaatgaggagtccctcattccagcccagctaaccaatccccttcctaagctccaagcccctgctcctcctgcctccatggaacccggctccaccaccagcacccacacacctgacactcctccattcctggctcttgcccttctgcctagcactgctcagatctctctcaccttaaaatcttttcccaccagcctgggcaacatagcaagaccccatttctctaaaaaattttttttaatttgccaggcacagtggtgcacacctgtaagtcctaactacttgggaggctgaggtgggaggatggcttgagcccaggagttcgaggttgcagtgagctatgatcctgccactacactcctgtctctaaaaaaaaaatgtccaagatacttaggtccttcagtcaagatttattacagaaggatccagggaagggtcttgggagatgagaggagcagggatcttccaggatctctctgtgctcacgtcccccacccatcccaactcaccccacctctacacacacacacacacacacatacaatcacatacacacactaacacacacactcacgcaacacactcacacacacaacatacataacacactcacaacatacacacacaacacacacactcgcacaacatacacacacgcacaacatacacaacactcacacaacacacaaacatacatacactcacacaatacacacacacaacacacacacaacatacacaacgtacacacacacaacatacacacactcatacacaacatacatacacacaacatacacacaacatacacacactcacatacacaacatacactcgcacaacatacacacatgcacaagatacacacacaacacacaacatacactcacacacaagatacacacaacatatactcacacaacatacacacacaacacactctcacacacaacataccctctcacatacacgacatacacacacacaacatatgcacgctctcgcgcacatatacacacacacaacattcactcacacacacacacagagtcccagctgaatctgcattcctcatatgcacatacgtgcacacgcacatacgaggcacatgtgttcttgggttgggaggagaagggcaggcagttatcttccagatctccccacacctctggcacatgcctttcctggggtcctggggtagacaggaaggtgaggtgagggaacaagcgggggtgtcgggccctcctcagtccctgttcacagagtgggtgcggcagagacctcaaagggacagagcaatcatgagctgagacagagggggagcaaagccgcagaaactgcacacttgcctttcaaaaatggatttcctctcctgggattcagcctgcgagtgcctggcccctcaccttgatggaaaggatggtcattttcctccgagctcagctgctggatatcttgaaagtccttggccatgatggggcccgggctggagctggagctggagctgggctgggctgggctgaggttgctctgagggctggggctggggcagaggtgcagattcacgtggaggttgatggtgggatggaacgcagggtcggaggggttcggggtggtggcctgggtaggatctgaggttggcagggcgtttgggatgaggtttgaaatcccgctgggtcctttcccttctcaggagaccgcttgggccttgacctggccaggagacccctccccacgctcatggacccgaccacccacagcttcccatggggtcctccccatccctgaaccaaggcctccttgttcccaagcatcctcgtcccagttgcctccccagcctcagttacctgtgaaaggtgtggagagcggacacctggctcccgcaggcaaccctggccttggccaaggaggggttaaagccaggagaactggggcaggtggagctcacaggggagaggagagtggaggaggggctggtccgggcaaggcctgcactggagggtctgagtgtccaagctctaacctggcacctcctggcctggga

SEQ ID NO: 28 - DNA, 13496 bp, Homo sapiens
  source 1..13496: mol_type = genomic DNA
tcaagcatttgtttcttctttcctacgccattgaagaggctgacgattataataattacaatgaattacagaaggaggtgggatctcagtcctccagggtcagggactcttaaactacctcctttctctctttgctcagctcttccccatacccctgtctcagtgtttcttcctttcctcaaaatcctcaacagagaagccagagctgggcaggtgtggggtatgggttagccagaggtgtgctggggtcaggccacctcgccggtggcattccgccttttctcacacacccagcggtacacctgcaggcagaagtcatcgttccagcggccatccggctggacttcaacacagtcttcacttccacccagctcgtgcccgtgccaattatctggctgagtgacagcccagttcctaaggaggcaagagaaaactcggactctgccacggtggtgagaaagcgacttacccatcctcctcctcttcatgaccattttccttgaaggccgagagtggagctggggtgtgccctgctacccagtctggggagaacccaaccgcagagaaagatgtttcctatgcccagtcccagcaaccctcacccccagcccagaagagcacagctttggaggggttggagtctggggaggagaggattggggaatttggtccctgagggacgagtcagggtagcttggagtgaaaggccagggggctgtccccagagaaatctaacaaggagatgagggaagaggccacttacttgtagttgtgcctatagtctgtgccatccacccatttccaagagccatcactgtccgtgagacctatccaggtattgaaggggttcgtgtgttgtacaatgaatttctggaaacacaggcaaacaggaaatttctagtctcttgtgcctttctcctccctccatgcaggcatggaactgtggcccctctcagccttccccagcctgatctgccctcaggctgaagcaccagctcccgacaagactgcttcctagctttttcttccgtcactctagctactgttcagtgcacatttgctaggctagacttcgtgctgtctgtgcaaagatgatctcatttaatcctcagaagctctctaagatgggcactgcagtgaccacattttgcagggagttgcagagccagagagccaatcctgtacctgagttagtggccactgtcccctgttcacagccctgggccggtgtcccccttcattcccagcttatggctctacccaagttccggttctctccctgtcttctgcccacagcctcgaactcctgggatcccgaccctggtccctgctcttactgccccccagaccccagacccactgaagatctcagtttcactggcctctcaagtacattggcccctggtagctctcgcttctatgtgtagctgtcatttcctgagatctgtcaggcccgggagcttctaagcttggacccactgcccagggccccattatgatctagctacgtggagtctgacaatcggggcaaaataggaagacaccggggtgtgaggaagcagcccggacagccagttgccaggggcttgggtgaaagtggacttcgagcctgcagatagctccccgggacccacgcgcacccacactcccagcacggtagcccctccaagtggctttctcttacacatacagctgttcctggggacctaggtcccgtggttcggtagggtaggaggggaaggtgtggtcacctggttttgtggagaaagtggagagggatggatccgttgagcaacgtgcacacttaacaattccctttgacagcctggaattttccttccaacagtatttgaaggacaattgcctaattctactctcactctctagaaaaacaactaaggttgcagttattcacctcttccgattgagcatcagaaactggggcatccctaaattctggaatcccacaaataggacaaagtcccatgcatgaaggggcagccctcagaggcaggtgaggctgctccccaaattcagaggagtcaacggagttggagagaaagtgcctggagacaacacacactatgtgctgctacctgctgccagccctccctcccatcaccacgagaaacagaacaactgagcagactacaaattagcagtatccagcccgccgtgttaaagactgagaggaggaatcaaatcatgccagatgatcagagaagacagtccgggagaattcattccccctttcctgggtgaaccataggaaagaaagcactgtgcccattcacaaaagtaatggagaaaatcatcatggaacttatgcccccaaaaagaaagaggaagatgaggcagatgaaaaatgaactgtgatatcaaaaagagaggtgaaaaatagactttgaaaagaagccttgtttcggaatatgaggggatgttggagaacagtttcttttttattattattatactttaagttttagggtacatgtgcacaacgtgcaggtttgttacatatgtatacatgtgccatgttggtgtgctgcacccattaactcgtcatttaacattaggtatatctcctaatgctctccctccccgctcccaagaacagtttctttacatgcttcaaaaattttaaaaagaatgacataaaacatgaaagaagatataaaaaaaaaagagaacatgataaggaaaggaaatgaaaagtttgagctacatactaaaaaaaaaagcccaggtgtggtggctcacgcctgtaatcccagcactatgggaggccaaggcaggtgaatcacctgagatcgggaattggagaccagcctgaccaacacggagaaacctcatctccactaaaaatacaaaattagccaggcgtgttggcgcatgcctgtaatcccagctacttgggaggctgaggcaggagaatcgcttgaacctgggaggcggaggttgtagtgagccaagatcgtgccattgcactccagcctggtcaaaaagagcaaaactctgtcttaaaaaaaaaaaaaaaaaaaaaagccaggcgtagtggctcatgcctgtaatcctagcactttgggaaggccaggcgggaggatcacctgaggtcaggagttcaagaccagcctggccaacatggtgaaaccttgtctctactaaaaatataaatattagccaggcatggtggcaggcacctgtaatcctagctactcgggagactgaggcaggagaattgcttgaaccgggaggcagagcttgcaatgagtcgagatcgtgtcactgcactccagcctgggcgaaagagcaagtctccatttcaaaaaataaaaataaacaaaaaatttcagataaaacacttgaggggccgggcgtggtggctcacacctgtaatcccagcacttcaggaggccaaggcgggcggatcacgaggtcaggagttcaagaccagcctgaccaacatggtgaaaccctgtctctactaaaaaatataaaagttagccaggcacgatggcgggtgcctgtaatctcagctactcgggatactaagacaggagaattgcttgaacctgggaggcagaggttgcagtgagccaagatcgcgccattgcactccagcctgggcgacagagcaagactccatctcaaaaaaaaaaaaaattttttttttttttcagatacaacacttaaggaacctaggaaaggaaagactcagacacatgggaataagaggtatcctggtctcctcacctttcctatggaagttatacaaacttttagttttcaaagccaataattttcagcctattatttaaagttatacaagtaatcactggaataactctaaataaactacatagtttccaaaataccataaagaagaaaacaaaaagaacacctctcacatagcaattgtaagaaaattaagaagcatgtaaagcagaaaaaagaaaggactagggttaaacatatctattagaatgtaaatgagacactcacctattaaaagaaaaggtacttattagatttttaaacatcaaaaacaaaacctgccaggtgcagtttttggattacagtggctcagacacctgtaatcccaatattttgggaggcccaggcgggcgaatcgcttgaggccaggggttcaagaccagcctgggcaacatggcacaacaccatttctactaaaaatgcaaaaaactacccaggtatggtggtgtgcacctgtagtcccagctacttgggaggctgaggtgggagaatccgttgagcccgggaggcacaggttacagtgagctgagatcatgccactgcactccaacctgggcgatagagccagatcttgtatcaaaaacaaaacaaaacaaaaaacctatataggagaaataccttaagcttagctgccctgtgctgcccctcagggaatggtccaggatgaagccaagattaatttaaattagcatttttttttttttttgagtcagagtctcgcactgtcacccgggctggagtataatggcgcagtctcagctcaccacaacctctgcctcccgggttcaagtgattctcctgcctcagcctcctgagtagctgggattacaggcacccgccaccatgcccggctaatttttgtatgtttagtacagatagggtttcaccattttggccaggctggtctcgaactcctgacttcatgatccgcccacctcggcctcccaaagtgctgggattacaggcgtgagccactgcacccggcctaaatcagcatttttaagggcgagatccaggagtcgatatattttttttaactcttgaagagattgcaatgtacagtcaagactgagaatcattaatttaaaacagagattcaaaaaggtaagaaacaaaaggatggacagagatacagcaagcaaatgcaagtgacaaaaaaatcaaggaccgtggtatttatatatcagataaattcaaggcaaaaagcattaactgggacacacgttggcttcatagtgacgaaagcaccgtccaccacgaagttgtagtggtcatgagcttattgtgtgccaaatcacagagcactgagatcttaggttgaactgcatgaaactgacatttttataggtcaaaactgatgaaatgttggcaagttcaacctgatcagtaaagcaaaatatgttcgtactcacagtatgctgtaaagtactaacagagcctgatgtaatgcaaacaatacatatattctggcccctgtatcatatggcttaactactgtggcattaaaatactttgaagttcagccagacgcggtggttcacgcctgtaatcccaccactttgggaggcggaggtgggcggatcatgaggtcaggagttccagaccagcctggctaagacggtgaaaccccgtctctactaaaaatacaaaaaaattagccgggcatggtggcacgtgcctgtaatcccagcactttgggaggccgaggcaggagaatggcgtgaacccagaaggcggagcttgcagtgagccgagatcgtgccactgcactccagcttgggcgacagagcgagactccatctcaaaaaaaaaaaaaaaatggataaaataagcctgatccagcctcccagagcaggccttccaagggcttcctcctgcctgtgggaagcgtggcctcacctgctcctcccaggagttgatgaccaccaggtgtgcgttctccagctggcagtacttctccgcctcagcccaggccttcccggagtgagagaaccagtagcagctgccttggtgctccacccagttgacggggcagcaggtcctttgggagcctgaggggacagggggcagggagatgagatccagccggaggggcaggcacactgggcctggagacggccccacccctaccgttgctgtggaggagctccatctggcaggccacgaagcgcaggtccacggggaagtgcttcagatggaagagcagggcatcgtgatctaggacagacaggctgaaagtgctgccggcaggtgtggtccccacctgctaggctccagcctgtggctggggaagcatatacacccacagacacgtacaccatgcatagaccacaccacacaccataccacacacacaccacagacatgtacaccacacatagaccacaccacacacagatccatcacacacacacaaacacaccaagagacacaccacacacatcacatgcgtacacacacatataccataccgcacacacacagactcatctcacacacaccaccacacatgcatacacacacaacacacacatatacaccacactacacaccacacacagatccatgacatatcacaccacacatacggagagagacacagatacacatgcttgcaggcacacacacgcacgcacgcacacgtgcacactacacacaccgcacacgtacacactacacacaccgcacacgtacacatgcacgcacatgcgcacacaccccggaggctctctgacctgctttcaggtcctgctgctgtttctccagcttggctcctagggatgtgatcttgtcacccacgctgcctcctggaagcggaaagccagctgtttccccgctgagcctccctccgtcctcatgctgctgggggaccgggggccagcgcctcgtcctgggcgatgcaggcgtccacctcctggcttcctggaccacacccaggctccctgcactgccacagtggctcaggccactctcctgcttcagtcccttcaatgggtccccattttctcaaaataaagcctcgctctgtcagcacggctcacctgcgtggccgggcccctccccacctctctctggccaccccttacctgcctgcccctccgatgggcctgccacactcgatttgctcacaggcccaagacatggtgccttcctcacctccgggtgtcgcagatccaacctctccacctggcactaacctcgtccgtccccacctgcctccctcctatacatcccccagggcccctggacgccttgcccagcctgcacccccacggcaccccacacagccctgttgcagactcggcactgagcccagcaaacctgtgcggataaatgagaacccagccgtccagcccctcaccgtgggtgctgattgcctggacctccgtcagggtgctcgaggagaagttgctgaaagcttccttcaggctccgcagctcggcttgcagctgtgcaccttgtcaggtggtagtgggggcaggatgaggcagaggggccgtgtccccatcactgtccatgtgactggcccctcaatgtccccgcatttgccccagcttgtgctccaccccgcctccatcccttcccctcccatcgccccgatcgctgcccgccactgcccatgtctctttccctaccccttgcccatccctgctggcccccgtgaccctcactttgggacccagtcacacagatgaccaccagcagcaggatgttgaagctcagggcaagcagactgaagcagaccatggagcagagacgctgtgccaggggctgggcaggaggtggccctgtgggagaggggcatcaggagccggcagcctgggtgtggggagccggagggtaaagacagggcaccgaagcctgaggaggcataacctgggcggggggattggttggggccatgggggggggtcatcataggctttgaccccagcatttgagcattacacacacactcttacacactcgcacccatattaccatgtataaatatacacacgcagctaatctggtgcacacacacccatgcacacgactcaggatattcacatcagctgtgtgcaaagcccggatcctggagctgggggactgggagacgcacagggggcgggggggcagacccggccctgcctaggcacacatcctgagaagggggatctgtgaatggttttcctcccatccagccagtggcagaggcctccagatcacctcgggccttagtctcagctcttctaaggctcctgtcccctcagattggagactccagaagctgggccctgtgttcttcctaaaatccatactggaacagtccctcccctgccaaaattccattgagatccttaaatctgggtcattccaccatagcccactctccaagcacaaccctccaggtcccacctgttgtcctcatcccccaccacgcaaggcctcctccccagcgccctttgccctcgcttccctagaaacctcgttccacactaaatttgctcccctcagcccgaggtcatctcacaggtacctctcctgccccttgatccatctgcaccctgacagcactgacacacacattcacatgccctcacaaactcacacacactcacacactcacacattgctcacttcactcaaaaacacacatttgcacacactcatgaccacgctctgctgtacccactctcacatgtgcatatgcatgctaatgcacacattcatactccctcccacacacacacacctgacacacccacacacgtacactcacacacccacgtcttcctgcacacagagctgggctccctctctgctgcctccagacccagagcagctccagttgtcccagccctgagctcctctctttgcagcatccacctgcaaacagaacaccttctaggccttggaccctgactctgtggacttccttgtcttctcattcctatcaccccccgacccagcaggaccacatcctggggaggctcagtcaggggcccagaatcttcctccccaggtcacttcctgccactgtcctgagtcagacactgcccctgtaagtgactgtccataactcttcatctttttcacaccagtgacttccaccttccccactgcagccacactcaggaccccatttgacccagggaggcctctgacacctccactgcccactcccgctctgagcacagccccaccctccctctcactgcccccaccccttcctccaaggcctttgcattcctctccatccagaagcgctccatgaccacggtgttccccaccaagctggccctccatggctgagtccctgactgctgtcttcagcaccctccactcagagggtcctgtcctgcttcccagtccgacttatcaactcccaatgctgggtcagcccagcaacgtgtctgtatatccaccctgaaaccagactgcccacagggtagcccagctgtgcctccaggtagctctgagatcatgcaccagcattcaatttctccatgcttccattttctcgtgtgtaaaatggagatcacagtcgtagctacccgattggattgctcggataattagatgagttaaaatatgtaatgtgcttcttaggcaaaagtttgaacataaaagacagggtctgcccaagatgggaagagttcttctctccccagaaacaatcaaaacaaaaacagacaactatagaacatggcagctttcaagactctggacatcaggcaaggaggagtaaagatccctgagggataagaagcaaacaacaggaaccctccgatcaccccagcttactgtttggagagagtctgcaggttacaggccaggaaagggaagtccaggcagagcccaagagactccccacgttgaggagatggagctgagagtccgaggagaccaaaacaattaagagttcaaacgatcaaactgactctaagttgcttaactgcatcccggagcaaagctcaagaacatttagaggaatacaaaaatatccagcacccaacaaggtgaaattgacaatgtctggcagccaatcaaagattacaaggcatgcaatgaaacgggaaaacacaatgcataacgaggaggttcataaatatcaaaagagatccagaactgacacggatgctagaattagcaggcaaggatggtaaaacagatattatagccatatcccattatgttcaaaaaattaagtagaattgtggaggatatttaagagtccccaggtgaacttctagagataaaaactacaatgtctgaaatgaaaaaacacactggccaggcgccgtggctcacgcctggaatcccagcactgtgggaggccaaggcgggcagatcatgaggtcaggagatcgacaccatcctggctaacatggtgaaaccccatctctactaaaaatacaaaaaattagccagacgtggtggcaggcgcctgtagtcccagctactcgggaggctgaggcaggagaatggcatgaacccgggaggcagagcttgcagtgagccaagatcgcgccactgcactccggcctgggcaacagagcgagactccgcctccaaaaaaaaaaaaaagaaaagaaagaaaagaaaaaacacactggatggaaataatggaagatgagaaatgcgtaagaaaaatttagggccaggcactgtggatcacatctgtaatcccagcactttgggaggtcgacacggggggaatcacttgagcccaggagctcaagactagtctgggcagcatggcaaaacccctctacatggcaaaaccgtctctacaaaaaaaaatttttaattagccaggtgtggtgccacatgcctatagtcccagctacctgggaggctgaagtggaaggatcgcctgagcccaggaggtggaggccacagtgagttgtgacaagctactgcattccagcctgggcaacagagtgagatgagagagagagaggggaggggaagcgagggaaggaaaggaggggaggggagggggaggggaaggggaaaattttagttaacttaatgaacagcaataactctataaaatgaaacactgggagaaaaaagaattaaaaaatggaaagagaatgagtgagctgtgggacccttaatacatgcataattgaaatctttaaaagaaaaagggggtagcagaaaaaaatcaagtgctgagacaagtggaagatgggccccggtgagcagctgatcagtgtcagctcccatgatgacgttcccccagcccccaccacccgggctgctggagggaaatgcggtgactttgctacatcccttcagacggtccctcactggtgtccctcagcccattcgcgtgagctcactctcccattaatttcagaaatcctggcctctctccaagcctcctgctcaaactctaaattctgtcaccctcagaagattcagcagcatcccgtattctctctgagtgttcactatgtaccgggtgccgtgtgggcactggagttgcagaggagagtgaggcggacagggcctctgcctgtggggacaccgcctggtgggaagtccagccagccccctacagagagaggagatgctactggtgttcctgagtggtcctcgggagggacctcctatccctcctgtcccctgccctgccctgcccagcaccggccctccctcggttggccagcctcaggaatgaggagtccctcattccagcccagctaaccaatccccttcctaagctccaagcccctgctcctcctgcctccatggaacccggctccaccaccagcacccacacacctgacactcctccattcctggctcttgcccttctgcctagcactgctcagatctctctcaccttaaaatcttttcccaccagcctgggcaacatagcaagaccccatttctctaaaaaattttttttaatttgccaggcacagtggtgcacacctgtaagtcctaactacttgggaggctgaggtgggaggatggcttgagcccaggagttcgaggttgcagtgagctatgatcctgccactacactcctgtctctaaaaaaaaaatgtccaagatacttaggtccttcagtcaagatttattacagaaggatccagggaagggtcttgggagatgagaggagcagggatcttccaggatctctctgtgctcacgtcccccacccatcccaactcaccccacctctacacacacacacacacacacatacaatcacatacacacactaacacacacactcacgcaacacactcacacacacaacatacataacacactcacaacatacacacacaacacacacactcgcacaacatacacacacgcacaacatacacaacactcacacaacacacaaacatacatacactcacacaatacacacacacaacacacacacaacatacacaacgtacacacacacaacatacacacactcatacacaacatacatacacacaacatacacacaacatacacacactcacatacacaacatacactcgcacaacatacacacatgcacaagatacacacacaacacacaacatacactcacacacaagatacacacaacatatactcacacaacatacacacacaacacactctcacacacaacataccctctcacatacacgacatacacacacacaacatatgcacgctctcgcgcacatatacacacacacaacattcactcacacacacacacagagtcccagctgaatctgcattcctcatatgcacatacgtgcacacgcacatacgaggcacatgtgttcttgggttgggaggagaagggcaggcagttatcttccagatctccccacacctctggcacatgcctttcctggggtcctggggtagacaggaaggtgaggtgagggaacaagcgggggtgtcgggccctcctcagtccctgttcacagagtgggtgcggcagagacctcaaagggacagagcaatcatgagctgagacagagggggagcaaagccgcagaaactgcacacttgcctttcaaaaatggatttcctctcctgggattcagcctgcgagtgcctggcccctcaccttgatggaaaggatggtcattttcctccgagctcagctgctggatatcttgaaagtccttggccatgatggggcccgggctggagctggagctggagctgggctgggctgggctgaggttgctctgagggctggggctggggcagaggtgcagattcacgtggaggttgatggtgggatggaacgcagggtcggaggggttcggggtggtggcctgggtaggatctgaggttggcagggcgtttgggatgaggtttgaaatcccgctgggtcctttcccttctcaggagaccgcttgggccttgacctggccaggagacccctccccacgctcatggacccgaccacccacagcttcccatggggtcctccccatccctgaaccaaggcctccttgttcccaagcatcctcgtcccagttgcctccccagcctcagttacctgtgaaaggtgtggagagcggacacctggctcccgcaggcaaccctggccttggccaaggaggggttaaagccaggagaactggggcaggtggagctcacaggggagaggagagtggaggaggggctggtccgggcaaggcctgcactggagggtctgagtgtccaagctctaacctggcacctcctggcctgggactttggacagt

SEQ ID NO: 29 - DNA, 13489 bp, Homo sapiens; identical to SEQ ID NO: 27
  source 1..13489: mol_type = genomic DNA

SEQ ID NO: 30 - DNA, 13489 bp, Homo sapiens; identical to SEQ ID NO: 27
  source 1..13489: mol_type = genomic DNA

SEQ ID NO: 31 - DNA, 12988 bp, Homo sapiens
  source 1..12988: mol_type = genomic DNA
agattcaagcatttgtttcttctttcctacgccattgaagaggctgacgattataataattacaatgaattacagaaggaggtgggatctcagtcctccagggtcagggactcttaaactacctcctttctctctttgctcagctcttccccatacccctgtctcagtgtttcttcctttcctcaaaatcctcaacagagaagccagagctgggcaggtgtggggtatgggttagccagaggtgtgctggggtcaggccacctcgccggtggcattccgccttttctcacacacccagcggtacacctgcaggcagaagtcatcgttccagcggccatccggctggacttcaacacagtcttcacttccacccagctcgtgcccgtgccaattatctggctgagtgacagcccagttcctaaggaggcaagagaaaactcggactctgccacggtggtgagaaagcgacttacccatcctcctcctcttcatgaccattttccttgaaggccgagagtggagctggggtgtgccctgctacccagtctggggagaacccaaccgcagagaaagatgtttcctatgcccagtcccagcaaccctcacccccagcccagaagagcacagctttggaggggttggagtctggggaggagaggattggggaatttggtccctgagggacgagtcagggtagcttggagtgaaaggccagggggctgtccccagagaaatctaacaaggagatgagggaagaggccacttacttgtagttgtgcctatagtctgtgccatccacccatttccaagagccatcactgtccgtgagacctatccaggtattgaaggggttcgtgtgttgtacaatgaatttctggaaacacaggcaaacaggaaatttctagtctcttgtgcctttctcctccctccatgcaggcatggaactgtggcccctctcagccttccccagcctgatctgccctcaggctgaagcaccagctcccgacaagactgcttcctagctttttcttccgtcactctagctactgttcagtgcacatttgctaggctagacttcgtgctgtctgtgcaaagatgatctcatttaatcctcagaagctctctaagatgggcactgcagtgaccacattttgcagggagttgcagagccagagagccaatcctgtacctgagttagtggccactgtcccctgttcacagccctgggccggtgtcccccttcattcccagcttatggctctacccaagttccggttctctccctgtcttctgcccacagcctcgaactcctgggatcccgaccctggtccctgctcttactgccccccagaccccagacccactgaagatctcagtttcactggcctctcaagtacattggcccctggtagctctcgcttctatgtgtagctgtcatttcctgagatctgtcaggcccgggagcttctaagcttggacccactgcccagggccccattatgatctagctacgtggagtctgacaatcggggcaaaataggaagacaccggggtgtgaggaagcagcccggacagccagttgccaggggcttgggtgaaagtggacttcgagcctgcagatagctccccgggacccacgcgcacccacactcccagcacggtagcccctccaagtggctttctcttacacatacagctgttcctggggacctaggtcccgtggttcggtagggtaggaggggaaggtgtggtcacctggttttgtggagaaagtggagagggatggatccgttgagcaacgtgcacacttaacaattccctttgacagcctggaattttccttccaacagtatttgaaggacaattgcctaattctactctcactctctagaaaaacaactaaggttgcagttattcacctcttccgattgagcatcagaaactggggcatccctaaattctggaatcccacaaataggacaaagtcccatgcatgaaggggcagccctcagaggcaggtgaggctgctccccaaattcagaggagtcaacggagttggagagaaagtgcctggagacaacacacactatgtgctgctacctgctgccagccctccctcccatcaccacgagaaacagaacaactgagcagactacaaattagcagtatccagcccgccgtgttaaagactgagaggaggaatcaaatcatgccagatgatcagagaagacagtccgggagaattcattccccctttcctgggtgaaccataggaaagaaagcactgtgcccattcacaaaagtaatggagaaaatcatcatggaacttatgcccccaaaaagaaagaggaagatgaggcagatgaaaaatgaactgtgatatcaaaaagagaggtgaaaaatagactttgaaaagaagccttgtttcggaatatgaggggatgttggagaacagtttcttttttattattattatactttaagttttagggtacatgtgcacaacgtgcaggtttgttacatatgtatacatgtgccatgttggtgtgctgcacccattaactcgtcatttaacattaggtatatctcctaatgctctccctccccgctcccaagaacagtttctttacatgcttcaaaaattttaaaaagaatgacataaaacatgaaagaagatataaaaaaaaaagagaacatgataaggaaaggaaatgaaaagtttgagctacatactaaaaaaaaaagcccaggtgtggtggctcacgcctgtaatcccagcactatgggaggccaaggcaggtgaatcacctgagatcgggaattggagaccagcctgaccaacacggagaaacctcatctccactaaaaatacaaaattagccaggcgtgttggcgcatgcctgtaatcccagctacttgggaggctgaggcaggagaatcgcttgaacctgggaggcggaggttgtagtgagccaagatcgtgccattgcactccagcctggtcaaaaagagcaaaactctgtcttaaaaaaaaaaaaaaaaaaaaaagccaggcgtagtggctcatgcctgtaatcctagcactttgggaaggccaggcgggaggatcacctgaggtcaggagttcaagaccagcctggccaacatggtgaaaccttgtctctactaaaaatataaatattagccaggcatggtggcaggcacctgtaatcctagctactcgggagactgaggcaggagaattgcttgaaccgggaggcagagcttgcaatgagtcgagatcgtgtcactgcactccagcctgggcgaaagagcaagtctccatttcaaaaaataaaaataaacaaaaaatttcagataaaacacttgaggggccgggcgtggtggctcacacctgtaatcccagcacttcaggaggccaaggcgggcggatcacgaggtcaggagttcaagaccagcctgaccaacatggtgaaaccctgtctctactaaaaaatataaaagttagccaggcacgatggcgggtgcctgtaatctcagctactcgggatactaagacaggagaattgcttgaacctgggaggcagaggttgcagtgagccaagatcgcgccattgcactccagcctgggcgacagagcaagactccatctcaaaaaaaaaaaaaattttttttttttttcagatacaacacttaaggaacctaggaaaggaaagactcagacacatgggaataagaggtatcctggtctcctcacctttcctatggaagttatacaaacttttagttttcaaagccaataattttcagcctattatttaaagttatacaagtaatcactggaataactctaaataaactacatagtttccaaaataccataaagaagaaaacaaaaagaacacctctcacatagcaattgtaagaaaattaagaagcatgtaaagcagaaaaaagaaaggactagggttaaacatatctattagaatgtaaatgagacactcacctattaaaagaaaaggtacttattagatttttaaacatcaaaaacaaaacctgccaggtgcagtttttggattacagtggctcagacacctgtaatcccaatattttgggaggcccaggcgggcgaatcgcttgaggccaggggttcaagaccagcctgggcaacatggcacaacaccatttctactaaaaatgcaaaaaactacccaggtatggtggtgtgcacctgtagtcccagctacttgggaggctgaggtgggagaatccgttgagcccgggaggcacaggttacagtgagctgagatcatgccactgcactccaacctgggcgatagagccagatcttgtatcaaaaacaaaacaaaacaaaaaacctatataggagaaataccttaagcttagctgccctgtgctgcccctcagggaatggtccaggatgaagccaagattaatttaaattagcatttttttttttttttgagtcagagtctcgcactgtcacccgggctggagtataatggcgcagtctcagctcaccacaacctctgcctcccgggttcaagtgattctcctgcctcagcctcctgagtagctgggattacaggcacccgccaccatgcccggctaatttttgtatgtttagtacagatagggtttcaccattttggccaggctggtctcgaactcctgacttcatgatccgcccacctcggcctcccaaagtgctgggattacaggcgtgagccactgcacccggcctaaatcagcatttttaagggcgagatccaggagtcgatatattttttttaactcttgaagagattgcaatgtacagtcaagactgagaatcattaatttaaaacagagattcaaaaaggtaagaaacaaaaggatggacagagatacagcaagcaaatgcaagtgacaaaaaaatcaaggaccgtggtatttatatatcagataaattcaaggcaaaaagcattaactgggacacacgttggcttcatagtgacgaaagcaccgtccaccacgaagttgtagtggtcatgagcttattgtgtgccaaatcacagagcactgagatcttaggttgaactgcatgaaactgacatttttataggtcaaaactgatgaaatgttggcaagttcaacctgatcagtaaagcaaaatatgttcgtactcacagtatgctgtaaagtactaacagagcctgatgtaatgcaaacaatacatatattctggcccctgtatcatatggcttaactactgtggcattaaaatactttgaagttcagccagacgcggtggttcacgcctgtaatcccaccactttgggaggcggaggtgggcggatcatgaggtcaggagttccagaccagcctggctaagacggtgaaaccccgtctctactaaaaatacaaaaaaattagccgggcatggtggcacgtgcctgtaatcccagcactttgggaggccgaggcaggagaatggcgtgaacccagaaggcggagcttgcagtgagccgagatcgtgccactgcactccagcttgggcgacagagcgagactccatctcaaaaaaaaaaaaaaaatggataaaataagcctgatccagcctcccagagcaggccttccaagggcttcctcctgcctgtgggaagcgtggcctcacctgctcctcccaggagttgatgaccaccaggtgtgcgttctccagctggcagtacttctccgcctcagcccaggccttcccggagtgagagaaccagtagcagctgccttggtgctccacccagttgacggggcagcaggtcctttgggagcctgaggggacagggggcagggagatgagatccagccggaggggcaggcacactgggcctggagacggccccacccctaccgttgctgtggaggagctccatctggcaggccacgaagcgcaggtccacggggaagtgcttcagatggaagagcagggcatcgtgatctaggacagacaggctgaaagtgctgccggcaggtgtggtccccacctgctaggctccagcctgtggctggggaagcatatacacccacagacacgtacaccatgcatagaccacaccacacaccataccacacacacaccacagacatgtacaccacacatagaccacaccacacacagatccatcacacacacacaaacacaccaagagacacaccacacacatcacatgcgtacacacacatataccataccgcacacacacagactcatctcacacacaccaccacacatgcatacacacacaacacacacatatacaccacactacacaccacacacagatccatgacatatcacaccacacatacggagagagacacagatacacatgcttgcaggcacacacacgcacgcacgcacacgtgcacactacacacaccgcacacgtacacactacacacaccgcacacgtacacatgcacgcacatgcgcacacaccccggaggctctctgacctgctttcaggtcctgctgctgtttctccagcttggctcctagggatgtgatcttgtcacccacgctgcctcctggaagcggaaagccagctgtttccccgctgagcctccctccgtcctcatgctgctgggggaccgggggccagcgcctcgtcctgggcgatgcaggcgtccacctcctggcttcctggaccacacccaggctccctgcactgccacagtggctcaggccactctcctgcttcagtcccttcaatgggtccccattttctcaaaataaagcctcgctctgtcagcacggctcacctgcgtggccgggcccctccccacctctctctggccaccccttacctgcctgcccctccgatgggcctgccacactcgatttgctcacaggcccaagacatggtgccttcctcacctccgggtgtcgcagatccaacctctccacctggcactaacctcgtccgtccccacctgcctccctcctatacatcccccagggcccctggacgccttgcccagcctgcacccccacggcaccccacacagccctgttgcagactcggcactgagcccagcaaacctgtgcggataaatgagaacccagccgtccagcccctcaccgtgggtgctgattgcctggacctccgtcagggtgctcgaggagaagttgctgaaagcttccttcaggctccgcagctcggcttgcagctgtgcaccttgtcaggtggtagtgggggcaggatgaggcagaggggccgtgtccccatcactgtccatgtgactggcccctcaatgtccccgcatttgccccagcttgtgctccaccccgcctccatcccttcccctcccatcgccccgatcgctgcccgccactgcccatgtctctttccctaccccttgcccatccctgctggcccccgtgaccctcactttgggacccagtcacacagatgaccaccagcagcaggatgttgaagctcagggcaagcagactgaagcagaccatggagcagagacgctgtgccaggggctgggcaggaggtggccctgtgggagaggggcatcaggagccggcagcctgggtgtggggagccggagggtaaagacagggcaccgaagcctgaggaggcataacctgggcggggggattggttggggccatgggggggggtcatcataggctttgaccccagcatttgagcattacacacacactcttacacactcgcacccatattaccatgtataaatatacacacgcagctaatctggtgcacacacacccatgcacacgactcaggatattcacatcagctgtgtgcaaagcccggatcctggagctgggggactgggagacgcacagggggcgggggggcagacccggccctgcctaggcacacatcctgagaagggggatctgtgaatggttttcctcccatccagccagtggcagaggcctccagatcacctcgggccttagtctcagctcttctaaggctcctgtcccctcagattggagactccagaagctgggccctgtgttcttcctaaaatccatactggaacagtccctcccctgccaaaattccattgagatccttaaatctgggtcattccaccatagcccactctccaagcacaaccctccaggtcccacctgttgtcctcatcccccaccacgcaaggcctcctccccagcgccctttgccctcgcttccctagaaacctcgttccacactaaatttgctcccctcagcccgaggtcatctcacaggtacctctcctgccccttgatccatctgcaccctgacagcactgacacacacattcacatgccctcacaaactcacacacactcacacactcacacattgctcacttcactcaaaaacacacatttgcacacactcatgaccacgctctgctgtacccactctcacatgtgcatatgcatgctaatgcacacattcatactccctcccacacacacacacctgacacacccacacacgtacactcacacacccacgtcttcctgcacacagagctgggctccctctctgctgcctccagacccagagcagctccagttgtcccagccctgagctcctctctttgcagcatccacctgcaaacagaacaccttctaggccttggaccctgactctgtggacttccttgtcttctcattcctatcaccccccgacccagcaggaccacatcctggggaggctcagtcaggggcccagaatcttcctccccaggtcacttcctgccactgtcctgagtcagacactgcccctgtaagtgactgtccataactcttcatctttttcacaccagtgacttccaccttccccactgcagccacactcaggaccccatttgacccagggaggcctctgacacctccactgcccactcccgctctgagcacagccccaccctccctctcactgcccccaccccttcctccaaggcctttgcattcctctccatccagaagcgctccatgaccacggtgttccccaccaagctggccctccatggctgagtccctgactgctgtcttcagcaccctccactcagagggtcctgtcctgcttcccagtccgacttatcaactcccaatgctgggtcagcccagcaacgtgtctgtatatccaccctgaaaccagactgcccacagggtagcccagctgtgcctccaggtagctctgagatcatgcaccagcattcaatttctccatgcttccattttctcgtgtgtaaaatggagatcacagtcgtagctacccgattggattgctcggataattagatgagttaaaatatgtaatgtgcttcttaggcaaaagtttgaacataaaagacagggtctgcccaagatgggaagagttcttctctccccagaaacaatcaaaacaaaaacagacaactatagaacatggcagctttcaagactctggacatcaggcaaggaggagtaaagatccctgagggataagaagcaaacaacaggaaccctccgatcaccccagcttactgtttggagagagtctgcaggttacaggccaggaaagggaagtccaggcagagcccaagagactccccacgttgaggagatggagctgagagtccgaggagaccaaaacaattaagagttcaaacgatcaaactgactctaagttgcttaactgcatcccggagcaaagctcaagaacatttagaggaatacaaaaatatccagcacccaacaaggtgaaattgacaatgtctggcagccaatcaaagattacaaggcatgcaatgaaacgggaaaacacaatgcataacgaggaggttcataaatatcaaaagagatccagaactgacacggatgctagaattagcaggcaaggatggtaaaacagatattatagccatatcccattatgttcaaaaaattaagtagaattgtggaggatatttaagagtccccaggtgaacttctagagataaaaactacaatgtctgaaatgaaaaaacacactggccaggcgccgtggctcacgcctggaatcccagcactgtgggaggccaaggcgggcagatcatgaggtcaggagatcgacaccatcctggctaacatggtgaaaccccatctctactaaaaatacaaaaaattagccagacgtggtggcaggcgcctgtagtcccagctactcgggaggctgaggcaggagaatggcatgaacccgggaggcagagcttgcagtgagccaagatcgcgccactgcactccggcctgggcaacagagcgagactccgcctccaaaaaaaaaaaaaagaaaagaaagaaaagaaaaaacacactggatggaaataatggaagatgagaaatgcgtaagaaaaatttagggccaggcactgtggatcacatctgtaatcccagcactttgggaggtcgacacggggggaatcacttgagcccaggagctcaagactagtctgggcagcatggcaaaacccctctacatggcaaaaccgtctctacaaaaaaaaatttttaattagccaggtgtggtgccacatgcctatagtcccagctacctgggaggctgaagtggaaggatcgcctgagcccaggaggtggaggccacagtgagttgtgacaagctactgcattccagcctgggcaacagagtgagatgagagagagagaggggaggggaagcgagggaaggaaaggaggggaggggagggggaggggaaggggaaaattttagttaacttaatgaacagcaataactctataaaatgaaacactgggagaaaaaagaattaaaaaatggaaagagaatgagtgagctgtgggacccttaatacatgcataattgaaatctttaaaagaaaaagggggtagcagaaaaaaatcaagtgctgagacaagtggaagatgggccccggtgagcagctgatcagtgtcagctcccatgatgacgttcccccagcccccaccacccgggctgctggagggaaatgcggtgactttgctacatcccttcagacggtccctcactggtgtccctcagcccattcgcgtgagctcactctcccattaatttcagaaatcctggcctctctccaagcctcctgctcaaactctaaattctgtcaccctcagaagattcagcagcatcccgtattctctctgagtgttcactatgtaccgggtgccgtgtgggcactggagttgcagaggagagtgaggcggacagggcctctgcctgtggggacaccgcctggtgggaagtccagccagccccctacagagagaggagatgctactggtgttcctgagtggtcctcgggagggacctcctatccctcctgtcccctgccctgccctgcccagcaccggccctccctcggttggccagcctcaggaatgaggagtccctcattccagcccagctaaccaatccccttcctaagctccaagcccctgctcctcctgcctccatggaacccggctccaccaccagcacccacacacctgacactcctccattcctggctcttgcccttctgcctagcactgctcagatctctctcaccttaaaatcttttcccaccagcctgggcaacatagcaagaccccatttctctaaaaaattttttttaatttgccaggcacagtggtgcacacctgtaagtcctaactacttgggaggctgaggtgggaggatggcttgagcccaggagttcgaggttgcagtgagctatgatcctgccactacactcctgtctctaaaaaaaaaatgtccaagatacttaggtccttcagtcaagatttattacagaaggatccagggaagggtcttgggagatgagaggagcagggatcttccaggatctctctgtgctcacgtcccccacccatcccaactcaccccacctctacacacacacacacacacacatacaatcacatacacacactaacacacacactcacgcaacacactcacacacacaacatacataacacactcacaacatacacacacaacacacacactcgcacaacatacacacacgcacaacatacacaacactcacacaacacacaaacatacatacactcacacaatacacacacacaacacacacacaacatacacaacgtacacacacacaacatacacacactcatacacaacatacatacacacaacatacacacaacatacacacactcacatacacaacatacactcgcacaacatacacacatgcacaagatacacacacaacacacaacatacactcacacacaagatacacacaacatatactcacacaacatacacacacaacacactctcacacacaacataccctctcacatacacgacatacacacacacaacatatgcacgctctcgcgcacatatacacacacacaacattcactcacacacacacacagagtcccagctgaatctgcattcctcatatgcacatacgtgcacacgcacatacgaggcacatgtgttcttgggttgggaggagaagggcaggcagttatcttccagatctccccacacctctggcacatgcctttcctggggtcctggggtagacaggaaggtgaggtgagggaacaagcgggggtgtcgggccctcctcagtccctgttcacagagtgggtgcggcagagacctcaaagggacagagcaatcatgagctgagacagagggggagcaaagccgcagaaactgcacacttgcctttcaaaaatggatttcctctcctgggattcagcctgcgagtgcctggcccctcaccttgatggaaaggatggtcattttcctccgagctcagctgctggatatcttgaaagtccttggccatgatggggcccgggctggagctggagctggagctgggctgggctgggctgaggttgctctgagggctgggg

SEQ ID NO: 32 - DNA, 17757 bp, Homo sapiens
  source 1..17757: mol_type = genomic DNA
gtggcgggcgcgacactatccgtgcggccaggcggaggtgagtgcgcggcggccggatgggcgggacgggcgtggaggacgccgagcaccgtggcgcgcgctcacgtccgcgtccccaagggctgcgctccctcaagcgcagtgcccagaactcggagccagcccggcccgggggaccctgctggccaaggaggtcgtcagtccggtcttgtcttccagacccggaggaccgaagcttccggacgacgaggaaccgcccaacatggcctcggaggtgagtgggacctcggggactccggtcctcctagcctccaaaggagagagtgggggcgccagacctgcctcgggccaccctgctgggaatcgccctccaggaagcaattttgaaaattacctaggaagcctgcacccccagccctcccgggcgcatcatctggagcccagcagtcacctttaccaggactcaccagtatccgcaggcagcccttgtggcaaacccaccaacccacactactaggggtagagtggctctgccctcacctcacagtgatgcctgcctggccaggaaaagtggctcccaagccttcagccttccaactcttccttccttcttaccacgtgtcctcctgtcaggtcccaccccacaccacatcccttctcctgctagagcaattgtccctgtttatagaataaagctcagcccctaagtgttcttgtccttgactgtggcatgtggaaagagccaggaaaaaggggacgtcgcctcgtggctccagcaaccctggtgcctggtcccttcctgtctcactggaccctgcctcttagggtcagtggctcctggcctctcctcctgaccactgagatgctggattcccaggcagaggttttccttccttgggccatagttgatttatctggcaatgggggtaataatagctgtcggcctcactctgtaaggcactagattatgaggccattgctttggacccttcaggtgagaggggctgttcgcctgatgcttgatgaagggaactccgggaagcaggaggtctgggttccaggcccttttggccttcattagctagcaattcacttcctctttctcaatgccctgcaagctcagtgccctgcaagcttctgggtcatggcaggggggtagggcctggactttggagccaaacagacttggtttctgtaccagtcacttgagccctttaaacctctttcctcatttgtgaaataggggtaatattgcccacctcataaaaggccgtaataacatatgtgaaatccctagcacagggctgagcaacagtaggtgctcaataaatggtggctaaccacaacaatactgatatttctactttgggaggccgaggcgggaggactgctgaagcccaggaattccagaccagccagggcaatgtaatgagaccctgtctctacaaaaagattttgaaaattacccaggtgtggtggcgtacacctgtagtctcacaggaggcggaggcatgaggattgcttgagcccaggagtttgagactgcagtgagcatgatctcaccactgcactccagcccaggcaacagagtgagatccagtttcaaaaaaataaaaataaaaaaacctggcaggcatggtggctcacacctgtaatcccagcactttgggaggtcgaggtgggcagatcacctgaggtcaggagtttgagaccagcctggccaacatggtgaaaccccgtctctactaaaaatgcaaaaattagctgggtgtagtggtgggtgcctgtagtcccagctattcgggaggctgaggcaggagaatcgcttgaactcgggaggcggaggttgcagtgagctgagatcgcaccactgcactccagcctgggcgacaaagcaagactccacctcaaaaaaagaaaaaaaacccacaagtcccaaaaccaaaactggtatttcccatgtacattcgaccttaactgttgctcattcaacccagcccaactcagtgccccatcccctggccctgaagagaccattctggcccagatgtgtcctggcttggagtagcaccttctgctaccacactaggcctccactctcctcagtgcccaaggggaggcacctcactctgatctccctgtggggtcctcttatgcctgccagtaaggataggagtttggttctagagcagagtggtctggcttccaacaagcccagtgttctaggtgacctcaggttgccccaggccttcctgtaggttggcactaattggtttggctgcagctccacttattaagtagttatttttattactaacaacctaggcagggtggcccaggagcccgctgggggaggcggtgccaggctcctggctgaggggcaggctggccccaattctgactggctggctccagtgatcaggaccagggccccacgtggtgctttgctggagatctaggcttggtggggcagctgtggggtaaggggcaggaccagctcaaagatggggtgggggcggaggctgcctctgcagggcagagtcctttggcagtcgggactgttgggcatagaggagtcagctcacagctcagggccagagcactggagaggtctctggggtgcatacaggaaccaggagtggagctgaagcatgtcctatcccctgccagccctcccttagtaacagctggcatttctcgagtccttcctgagcaccaggcaccgtgttatgtatgcaatttgcaaatattatctgattaaatgctcacaataaggctatcagagaggtactattattatccttatcttattattattattattattatttttaagaaggagtcttgctctgtcgcccaagctggagtacaatggcgccatctctgctcaccgcaacctctacctccaggattcaagtgattctcctgcttcagactcccaagtggctgggactacagcttcctgccaccgcgcctggctaatgtttatatttttagtacagatgaggtttcaccatgttggccaggctgatctcgaactcctgacctcaagcgatccacctgcctgggcctcccaaccctgagggtttttgtttttgtttttgttttgagacagagtcttgctctgtcgcccaggctggagtgcagtggcacgatctcagctcactgcaagctccgcctcccgggttcacgccattctcctgcctcagcctcccaagtagctgggactacaggcgcccaacacccccatgcctggctaatttttttgtgtgtgttttcagtagagacggagtttcaccatgttagccaggatggtctccatctcctgacctcgtgatctgcccacctcagcctcccaaagtgctaggattataggtgtgagccaccacgcccagcccctgaggtttaataataggtgccaggccaggtggttaatagaagtctggggcattgtagggggacagaggaggatatatgtccccattggccattgtagactcccttccacaaaaaggacgtcagtgaagtgacatgcccacctctaccccaccctcctcccagtcctgggcactagggctgctccccaggtgttctgtaccccctccccactctgtcccatgccctggcctctgccctctttcaaaacatagatgtggctggcgcctaggctcatgcctataatctcagcactttgggaagctgaggctggaggacagcttgagcccaggaattcaagaccagcctgggcaacatagtgagaccctgtctctaccaattattttattttattttattttgttcatttatttatttattttgagacagagttttgctctgtcacctaggctggagtgcagtggcgtgatcttggctcactgcaacctccgcctcccgggttcaagcgattctcctgcctcagcctcctaagtagctggaactacaggcgagtgccaccacgcctggctaatttttgtatttttagtagagaccaggtttcaccatgttgaccaggatggtctctgtctcctgacctcatgatccacccaccttagccttccaaaatgctgggattacaggcatgagccaccactcccagtcctataaaattttaaaaaaatgtctgggtgtggtggcgcatgcttgtagtcccaactattggggaggctgaggcaagaggattggttgagaccaggagtttgaggctgcagtgagctatgatggtgccaccgcactccaacctgggtaacaaagtgagaccctgtgtctaaaaaagaatttaaaggccgggtgtggtggctcacacccgtaatcccaggactttgggaggccgaggtgggcagatcacgaggtcagattaagaccatcctggctaacaaggtgaaaccacgtctctactgaaaaaaaaaaatacaaaaaattagccaggcatggtggtgggcacctgtagtcccagctactcaggaggctgaggcaggagaatggcgtgaatctgggaggtggagcttgcagtgagccaagatcctgccactgcactccagcctgggtgacaaagagagactccatctcaaaaaaaaaaaaaaaaaaaaagaattaaaaaagatttttttaatgaacaaaacaggctcggcacagtggctcatgcctgtaatcccaagcacttcgggatgccaaggtcaggggatcacctgagatcaggagttcgagaccagcctgaccaacatggtgaaaccccgtctctactaaaaatataaaactcagccaggtgtggtggcacacgcctgaaattccagctactcgggaggctgaggcaggaaaattggcttgaagccgggaggtggaggttgcagtgagccgagatcacgccactgcactccagcctaggcaacagagtgagactctatctcaaagaaaacgaacaaaacatagatgcctacataccattcctctgcccttggctcctggggagtaagggatcacccagtgacctcctagaaggccagtgacaatggggggtgtcagggtgcttttcagagccaagggagtggtaggaattgggatcttagtccagctccaagctgtgagggagagagttgcagggcacttaagcttggtggagaccctcaaggcctctttgcctgtccctgcagcaaaggttctggacaccagagccaagtccagaagccctggtggaacaggggtgaaaagcataggttctgacttcagactgctgggccgcagccctggctatcccaccccaggtgagagcaggctgctctgtgcctcagtttccccatcttcatagtggaattgtattggtgcctacccagagggttgtgtcaacaattaggatggcacctagcaccttggtcagtggtgggaaaggttccagaagttctgctgtggtcccaggggtgtctcaggccctgccatcatctccttggaggggtgccatgtggtgggaaagaaccccaacttcaaggccacacacagtggctcatgcctgtaatcctagcactttcagaggccaagatgggaggatcacctgaggtcaggagttcaagaccagcctggccaacatggtgaaaccccatctctactaatgatacaaaaattagctgggtgtggtggcacgtgcctgtaatcccagctacttgggagtctgaggcaggagaatctcttgaacctgggaggcagagtttgcagtgagctgagatggcaccactgtactccagcctggccgacaaagtgagactctgtctcaaaaaaaaaaaaaaagaacccaaacttttggtgttcagccatgttcccatgctcactcccagggtggtgactctgggaaggtctcagcctccttgtctgcccagttagaatgatctgatgcccctgctaccatcagacttgataagtttcccaaagactctttgcaagaagcactgttctggagggtggaggagagactaattgttcttgctctcctggccagagtgggaagctttggggtggccggtttgtgggtgcagtggaccccatcatggagaagttcaacgcgtccattgcctacgaccggcacctttgggaggtggatgttcaaggcagcaaagcctacagcaggggcctggagaaggcagggctcctcaccaaggccgagatggaccagatactccatggcctagacaaggtacttgccgtggcccaagccccacccaaggccccttccctgtggccccaggctcccaccaaatccctgagcaaacagtgcagtgttgcccatctgtggtttcacattgaactaattatatactcaagtgctgtttaactgtgtgccttgatgactgcctctctccatcctttaatgacccctgtggcccacatggctcatgggtaaaggtgtgctgggcctgagatgccccctcccagggtgcgcttccaggactcagctcctgggcagggacagtcagtcaccagggatagggtgggaccaaggcaggggctctcttggctgctgatgcctgctcacctgaccccggcattgctgctacccactacaggtggctgaggagtgggcccagggcaccttcaaactgaactccaatgatgaggacatccacacagccaatgagcgccgcctgaaggtacgacccctggagccccaccgctttccttgcctcccctctccaccttgcccagggccactttgagcattagcaccattctgtttacttcgccattggcagacagcatgtgagacctcaggacatgagccaggcaccctggctcatgcctataatcctagcactttgggaggctgaggtgggaggattgcttgagaccaggagttcgagaccagcctgggcaacataatgaggtcccacagctacaaaaattaaaaaaagaaaagaaaaaaagaacaggcctcagcagaaatggcgagagatttggggaggacccggagccctggggtatggaggtaggttggcagggctgatgaggaaaactgccctgcctgggttgactcctctgggggtatagaccgtgaccctgggtctcccttcacctccaggagctcattggtgcaacggcagggaagctgcacacgggacggagccggaatgaccaggtgctttagcccctccaccccctgctccgtgttgtcccaaccttgaggagcccagggggcagttagagttctgcagcggtcctggctcctcagggaagcaacacatcggcctccctgagcaccatctcctccttgcacaggtggtcacagacctcaggctgtggatgcggcagacctgctccacgctctcgggcctcctctgggagctcattaggaccatggtggatcgggcagaggcgtgagtcctacagggacacccagggggcagacagaggtgtgatggaagcctgaacaggagacctagggggcaggggtgaacagcgtgggggtgccaggccctgggggacaggggcatcccagaactccaggatcgaggcagagcagccaggagtgggccatttcctgcaggccccaatactcccatgccagtctagctcagcaggcagagaagactaacccttcgtggggctgggtgcggtggctcacgcctgtaatctcagcactttgggaggccgaggtgggtggatcacctgaggtcaggagttcgagaccagcctggccaacatgggaaaactctgtctctactaaaaatacaaaaattaggcaatgtggtggtgtgcgcctgtaatcccagctactcgggagcctgaggcagaagaactgcttgaacccgggaggaggaggttgcaatgagccgagatcgcgccattgcactccagcctgggctacagagcgagactcctgtctcaaaaaaaaagaaaaaaaaaaaagaaaactcaccatttgcagatttgaaggcaggaagctaagccaagcacagctagcttggctgtgcctggagcagccagagtcactccccacactgcctgtcccccagatcccccatcctaagcttcgcctccccatccagcccatctggcaaaagacagagccaaaggctgcctcctgctggcctcatttcaggctttggcttctgggacctggtgtctttgggactggatttgttccttgcagacctggacgaagagctgctgagaagtctccatgtgttgtcagagacccctcctcttcctcaactccctgtgacccctgttgtgcagacttgggggaaaacaagggcacaagaattgtcacccagcaggtggtgtggggctgctaggaggaacagggagtgtctgctactgagttcagggtttctttaattttttgttgttgttgtttgttgttgtttttttttttttgagacagggttttgctctgtcacctagtctggagtgtagtggcgctatctgagctaactgcaaactctgcctcctgggttcaagtgattctagtgcctcagcctcccaagtagctgagattacaggtgtgcaccaccatgtccagctaatttttgtatttttttcagtagagatgggttttgccatgttgaccaggctggtcttgaactcctgagctcaggtgatctgcccgcgtcggcctgccaaagtgctaggattacacccataagccactgcgctcagcttaatttttaaatttttaactttttaaattgtctttagagatgagatcctgctctgtcacctaggctggagtgcaatggcttggtaatagctcactgcagtctcaaactcctggactcaaatgatcctcccacctcagctttctgagtagctaggaccacaggtgtgcaccacctgtgagacagagtcttgctctgttgcccaggctggagtgcagtggcgtgatctccactcactgcaacctctgcctcccaggttcacgccattctcctgcctcagcctcccgagtagctgggagtacaggtgcccaccaccacgcccggctaattttttgtatttttagtagagacggggtttcaccatgttagccaggatggtctcaatctcccgacctcatgatccacccacctcggactctcaaagtgctgggattacaggtgtgagccaccgtgcccagccgcgaattctttaaattttttgtagaaacagggtctcactatgtggctcaggctggtctcaaactcccggccttaagtgatccttccctcttggcctcccaaagtgctgggattaaagacttgagccaccgtgcctggccttgagtacagaatttcttcatggggtgatgaaaatgttctaaaattggttgtggtgatggttgtacagtaaagtgtaaactttaaatgagtaaattgtgaatgatatctcagtaaagctggtttatttaaaacaacaggccaggtgctgtggctcacgcctgtaatcccagcactttggaaggctgaggcgggtgaatcacctgaggtcaagagttcgagaccagcctggccaacatggtgaaaccccatctctactaaaaatacacaaaattagctgggtgtgatggtgggcacctgtagtcccagctacttgggaggcaggagaatctcttggacctgggaggtggaggttgtagtgagccgagatcacgccactgcattccagcctgggcaacaagagcgaaactctttctcaaaaacaacaacaacaaaaaaacaggccaggtatggtggctcatatctgtaatcccagccctttgggaggccaaggcaggaggactgcctgaaaccaggagtttcagaccactctgggcaacatagcaagaccccatctttttttttttttttgagacggagtctcgctctgtcgcccaggctgaagtgcaatggtgcaatctcaactcactgcaagctctgcctcctgggttcatgccattctcctgcctcagccctcctgagtagctggaactacaggcgcccaccactacgcccggctaattttttgtatttttagtatagatggggtttcaccgtgttagccaggatggtctcgatctcctgaccttgtgatctgcccgcctcggcctcccaaagtgctgggattacaggcgtgagttaccgcgcctggccacaagaccccatctttacaaaaaactaaaaattagctgggcatggtggcatgtccctttagtcccagctactcaggaggctgagacaggaggatcgcttgagcccaggagatcgaggcagcagtgagctatgatcatgccactgcactccagtctgggcaacagaacgagaccttgtctctaaaaataaaaacaaaacaaaacaacaagaaaacaggaccatcactcacagcacctctgcctctgccctgcctacttgaatgaggtgcagggcatctcacctgctcagagcagcccttgaatgagccccagctatttctagggtcctcaaacgaaacctcccacggccaagtcatacccaacatgggcctcctcccctattctggcccctgctcggagatgctgagtgacagaggctggacttggggtgtttctggcaaagcctcactgcaggaagccccacagctcaggcccagtccttggttcacacggtcccacttccagcttcttttgcccttaagactgatttgtccctgggagatcaccagatccctcattcaggtggagtgctgcagcgtgacactttttccaggggtgacccaggcctgcagggttccagtgtcacaggcaggccttgcatgagcctccacccgagcttctgctcctcctctcccacagggaacgtgatgttctcttcccggggtacacccatttgcagagggcccagcccatccgctggagccactggattctgaggtgagccaggtgaggtgcaggggctgtgctagaggggaggaccccggctgccctgaccctcctgcccctggcttcccacagccacgccgtggcactgacccgagactctgagcggctgctggaggtgcggaagcggatcaatgtcctgcccctggggaggtgggtgaggctccagtgccccgagggcctggtgggggtggctgctgcatagccttagggattgacagagctgggaagtgcagagtgggacagaaaaccgccttatctgctcagcgggggactctgcatggagccccagctctcgctaaggtgacgaccaagccattgaatgtgtctgagcagggccagagccctccagcaaggctcctggcaagcccagcctgctgccctcagcctgacatgtgggaacatgtgtcaggagacaagtgtcctgcacccagggtgacttagtgcttggggacaagtgttttgtggacacttggggacaagtattctgtacccaaggagactgggccagggaagaggctaagcgccaggtggttgccctggcaaccaggacttggttctctgtgtgtgcgttcgtgtgtgtgtgtgtgtgtgtgtgtgtgtgtgtgtgtgtgtcagggctgcctgccaggagccctggtcaccatgaatccctgtccctgcagtggggccattgcaggcaatcccctgggtgtggaccgagagctgctccgagcaggtgagacgtcctgcccctcctccccagggagaatcaccctcagcacccgccaagacctgcagacacacctgaaaccagagggcaggggcctgtggctcctggtgaaaccttcattcattgcctatgggcactgaggtcatcaagttcaggggtcactcatggcagggatgcctggtactgagagactcagggctcctgcctccctcctgggactgtgcaaaagatccctccccccagctgttgccccaccctgatcaggggagggggctgggcaacctagttgggggagagggggccactccctgtcctccagcttagccctgcttcctcccacccccccagaactcaactttggggccatcactctcaacagcatggatgccactagtgagcgggactttgtgggtgagtcctggggagccagtcccctgccctgtgcctcactttagtccttcagcccagcttctctccagtttcctcccacacctccacggacaggctggttgtggtgatattgtacactgaagtataaaccttaaatgggtaaagtgggtggggcatggtggttcaccatgcccagcactggccaacatggtgaaaccccatctctactaagaatacaaaatttagctgggtgtgtggtggcaggtgcctgtaatcccagctactcaggagttctgaggccagagaatcacttgaacccaggaggcggaggctgcagtgagccaagatcacgccagtgcactccagcctgggcaacaagagcgaaactccatctcaaaaaataaaataaaataaaataaaaataaataggccaggcatggtggctcacgcccgtaatcctagcactttgggagtccgaggcaggtggatcacatgaggtcaggagtttaagaccagcctggccaacatggtgaaaccccatctctactaaaagcacaaaaattagctgggcatggtggtgcatgcctgtaatcccagctactcgggaggctaaggaaggagattcgctggaacctgggaggtagaggttgcagtgagccaagattgtgccactgtactccagcctgtgcattgggagcgagactccatctcaataaataaataaataaataaatggataaattgtatgtgagtgataactcagtaaagctggtttatttaaaacaacaacaataacaaaaaacacgctaggtgcaatggcttacgtttgtaatcctagcactttgggaggccaaagcagaaggattgcttgagcccacaagtttcagaacagcttgggcgacatagcacgaccccatctttgcgaaaaatgaaaatttagccgggtccccccaccgcctaacctcctcctgccccctgtatggtcaggctgggtggggatgggagaggcctggtgactgggaaccttttctcccagccgagttcctgttctgggcttcgctgtgcatgacccatctcagcaggatggccgaggacctcatcctctactgcaccaaggaattcagcttcgtgcagctctcagatgcctacaggtaagccctgaactgccacctccatctgccgctgccggcctctgtatcccccgccgcccgcggacgtggctgccttcctccccgtcccacccctccgccagacctggccattgcggcgctggaccagccaagggtccagccccttcagcgccagcacctctgtccccagcacgggaagcagcctgatgccccagaagaaaaaccccgacagtttggagctgatccggagcaaggctgggcgtgtgtttgggcgggtgagcaaggcagggggaggggcggggcctctgggctgatggtgggtggccaggggggcaggatcccgggtccagcccctgtgcctccctcttcccgcagtgtgccgggctcctgatgaccctcaagggacttcccagcacctacaacaaagacttacaggtgcgaggccgggggaggcctggctagtacgtgccagttctcagggctctggcacactcaggcagggccccaccccgggattgccatacatcctcccatcctgtgcacacagctccatccgtggctgcccttgaactctctgcccttcctttgttggggtattgagtgttcttcccatggaaggcagtggggatgcctcagtgggggggtggggctgtggggaccctgggtgccagggggctgctaggccctcacctcctgccatgtgcctcccaggaggacaaggaagctgtgtttgaagtgtcagacactatgagtgccgtgctccaggtggccactggcgtcatctctacgctgcaggcaagacatcacccccctgcttctcctcccctaggtcccaggcactggggtgggcatgcggggagggtggccttgggaggaggtgaggtggggctggaggacctggggcagggaaggagaggtgtgctcgctcctgctcctggggaacagggaaaggacagaaactgctgccatgcagtggaagtagatgagactcagggggcctggggcctgtcaaatggcctgaccagaactctttaaaaaaagaaaatctaaacaaaaggccaggtgcagtggctcatgcctggaatctcacactttgggaggccgaggcagatggagcacttgaggtcaggggtttgagaccagcctggccaacatggcgtaaccacgtctctactaaaaatacaaaaattagccaggcgtgatggcccacacctgtaatcccagctactcaggaggcggaggcagaagaatagcttgaacccaggagatggaagttgtagtgagccaagatcatgccgctgcactccagcctggaccacagagtaaaactccatctacaaatatataaattaaattaaattaaattaaatatctttaaaaaacattttttagagacagggtcactctctgtcgcccaggctggagtgcagtggtgcggtcgtagctcactgcagcctcaaactcttgggctcaagtgatcttcccacctcagtctccagagtagctgggactacaaacatgcgccaccacgcctggctaatttttttattttttgtagagacagggtctccctatgtttcccaggctggtctcaaattcctggccccaagccatcctcccaccttggtctcccaaggtgctgggattataggcatgagccactttgcctggctgatttcttttaaaatcaattattatgggaaatttatgtatataacagctagagaatgcataatgaaccctatgtaccgacacccagcttcaatgataatcaactcacggacatcctggctccagctgtctttacccacagctctctcccactcccttacccccttattttgaagcaaattcccatcatcacatcatttcattcctaaatagttcaggatatgtcttgaaatcagtgtttcttggctgggtgcagagcctcatgcctgtaatcccatcaatttgcgagactaaggtgggcagatcactcgaggtcaggagttcgagaccagcctggccaacatggcgaaaccccgtctttactaaaaatataaaaattagctgggtgtggtggtacacgcctgtaatcccagctactcaggaggctgaggcaggagaattgcttgaacccgggagatggagactgcagtgagcagagatcacgccactgcgctccagcctgtgtgacagtgcaagactccatctcaaaaaaaaaaaaaaaaaaaaaaggcagtgtttctggaggctagtcccccaactagcagcaccagcatcacctcagaagtcctgagaaatgtgatgtgaggccccactccagatggctgaatcagagactctgggggtgctccccagcaatttgtatttttcttagtaaattctccagtggctaggcctggtggctcatgcttgtaatcccagcactttgagaagctgaggcaggagaagcgcttgagcccaggagttcaaaaccagcctgagcaacatagcgagaccttgtctgtaaaattaaaaaaattaaattagccagtcgtgatggcgtgtacctgtggtcccagccacttaggagactgatgtgggaggatcccttgagcccaggagctcaaggatgcagagagccaggattgtgccattgcactccaacatgggcgaccctgtctcaaaaaagcccaaaacaacaacaacaaattagctaggcacggtggtgtgcatggctgtagtcccagctacttgggaggctgaggctggaagatcccttgagtccaggctgcagagggctataatggccactgcactccagcctggacaacagagcaagaccctgtctcctaaaacagaaaacaaatcctccaggaacatctgatgcatgctgaagataaggactctttgaaaacataaaggccagtaaaacatacaggccagtaagtgttcatagcacatgtaaatattatcgataattatgagaagatggttcaagttgagagtgagacagagccgagtgggtaagagagtatctgcccaaggcagggatgtcctggcagaggggcaggtcctgggcctggcagcttcagatcccagggtccccagggctcaccactcgcccacctgtgcccccagattcaccaagagaacatgggacaggctctcagccccgacatgctggccactgaccttgcctattacctggtccgcaaaggggtaagtgtgtagcagccagggggagggtgaggagatggggtgccccccccagagggtgggggagctcaggaatgggtgcaagcggcccagcctggtggctcacccctgtaatcccagcactttgggaagccgaggtgggcgggtcacttgaggccaggagttcgagaccagcctggtcaacatggtgaaaccccgtctcttttgatgtaaaaatacaacaattagctgggtgtggtggcacactcctgtaatcccagttactcgggaggctgaggcaggagaattgattgaactgggaggtggagtttgcggtgaggtgagatcgcgccactgcactccagcctgggcaacagagcgagactttgtgtcaaaaagaaaaaaaaaaaaaaaaggaagggggtgcaggcaatggaggcagatcagggcatggagaaacctgcctcagcgccatcttcctccctggcacccagatgccattccgccaggcccacgaggcctccgggaaagctgtgttcatggccgagaccaagggggtcgccctcaaccagctgtcactgcaggagctgcagaccatcaggtacggcccatccccttccccatgctgcctcctaggaagtgagcctgggtgcctggagcccagggtggcctggcgccctggcccacctcttcctctctccccagccccctgttctcgggcgacgtgatctgcgtgtgggactacgggcacagtgtggagcagtatggtgccctgggcggcactgcgcgctccagcgtcgactggcagatccgccaggtgcgggcgctactgcaggcacagcaggcctaggtcctcccacacctgccccctaataaagtgggcgcgagaggaggctgctgtgtgtttcctgccccagcctggctccctcgttgctgggctttcggggctggccagtggggacagtcagggactggagaggcagggcagggtggcctgtaatcccagcactttggaagggcaaggtgcgaggatgcttgaggccaggagtttgacacagcctgggcaacacagggagacccccatctctactcaataataaaacaaatagcctggcgtggtggcccatgcatatagtcccagctacttgtaaggctgaggtgagaggacacttgtgcccaggagtggaggctgcagtgagctatgatcacgccactgcattccagcctggataacagagtgagaacctatctctaaaaataaataaataaacgaaaaataaatggaagcggagaaaactgggcaagggcaatgagagtcgtagacgggaagggaagagggggctcccatcatagcctctgctctgtccaggccccatccccttcagacagggtatcacagtgacctcctaggccaggagcgatggctcacgcctgtaatcctagcattttgggaggcctgggcaacaggaagactccaactaccatattaaaaaaaacatgaatgaaagcaaaaa

SEQ ID NO: 33 - DNA, 17757 bp, Homo sapiens; identical to SEQ ID NO: 32
  source 1..17757: mol_type = genomic DNA

SEQ ID NO: 34 - DNA, 17757 bp, Homo sapiens; identical to SEQ ID NO: 32
  source 1..17757: mol_type = genomic DNA

SEQ ID NO: 35 - DNA, 17757 bp, Homo sapiens; identical to SEQ ID NO: 32
  source 1..17757: mol_type = genomic DNA

SEQ ID NO: 36 - DNA, 56567 bp, Homo sapiens
  source 1..56567: mol_type = genomic DNA
ccggcgcgcccctgggagggtgagccggcgccgggcccaggcccggacctggtgggaggcggggggaggtggggacgaggcctggggaggcgggccccgcccatctgcaggtggctgtgaacgctgagcggctccaggcgggggccgggcccgggggcggggtctgtggcgcgcgtccccgccacgtgtccccggtcaccggccctgcccccgggccctgtgcttataacctgggatgggcacccctgccagtcctgctctgccgcctgccaccgctgcccgagcccggtaaggagccctcggcccctctcgctgcccactccctagccgagagcacccgcttcccgggcccagaggaggaggcgtagaagacgcccgccccggggcccgcggaggcagagggcggaccccgatcgccactcgccggggactgggaccgaggcaggagggaaggggctcccgatgctcaaacgcctggcaccggattccaggtttctggagcgtgggggacgcggcgggggcgcgagtccccgggggcgcgagtccccgggtccgaagagcggctcgggttatttgttccctgcgcagccgggtcctttctggactccttgtcggatccggcttcctctgtgtcgtgaagcccccacatggagacctggggagtccggagcgtgtgggggggctcccgattctctctccctctctcggactcgccgtctgtctccacctctatttctctgcgtaaaaccaggagtccagcccctctggggcttggacgtatcgctttccccgcagcctcagtttaccctggacagatgggcatggtggccctggctcccttccctgcagggggcggcagccacctggccctccccggtggggctggcggcctcgcggcggggtttcctgctggcctgggctgggctctgtgggaggggcagtgccaggaatattttctattcgggctgctgttgcctttggcccctgggcggctgcgccctccagggaggcagggtcattgtgaaagagaggaaactcctctcccaggcggccagggctgttcctgaggagggctggcctggcctcagtattcttctctgagaagtggagagtccactcccgagcagccgagtcaggctgcaggtctcagggcaggaacagacctgttctctccccaggggtagatcaagacctaggggacttgggctttgatcctcccgctcccagcaagcacaaacccagtgatggggagagctggtgaggccttggctcagcctccagattcccaagcttccttttcattttcttttctttctaaaaatttatcagagatgtggactcgtcatgttgcccaggctggcctcgagctcctgggctcaagcgaccctcctccctcgggcctcctaaactgctaggattacaggctcgagccacccaaagtgcctggcccccaagcttcagtctgttagagctggctggggctgagggctcaggaaacatttgcagatactgtgcggctgctaagggctctgtagactgttgggtgctgggcctgggtccaattgcacaataactgtgcctggggttaggttctgatgagagggagggagaagcagccacacggactgggaagcttggctaggagcaggaactggaggagtctccattccaaactccctctccctcccagaccccttaggcccaaggcctagggcggggaagtttgggggtgggggcgggaccctgtcctggcggggccatctgtgcaccatgctgagaagtaattctggttctgctctgtgggggtggatcaagtgaatgaatagtgactcctgcctgctgagcgcctggccggtgcgggggcagacacgtcgtgagagggaaggggaggccccactctcagcacagtctccattcctgagtgcttgggaagcaggcccagggccgcaggagccttggggtggagccaggcccaaaacagcctgctgcacaagcgcttccccctcccaacccgggcccatctcatctttggcctgctgggaggccagccaggtcaaccagatgcctcatctgagcactgactacacagtccctgaagtcagtggcttgcctgtgggcaccaggcacccatgtggaaagaggtaacttcgctggaattcagagtctaaggctctgatttctgatgtagctttgggcaaagttgatcttccagggcgtggctccctccccagacttggggtcgaccaggcacccataggcactttgatatgagtggaacgaatgaatgaatgtgcccttcgtccatcaccaaagacaaaccgagctcagctgagttagaatgtcagcgaggggttgcaggggaatcttccacggggcagtaggcctgagctatagcacacaggctctccagagaaatagtgggcaggttggccatgactcactggggggctggttttctggaaggtgtgtagagtgaaggggagatctgaggtctcctaggagccagggagtggaaggcctagtgcagggaagagcaagtggcctgcagtcaggctgggtttgaagccgctagcttgtgacctcggctggccgcttagcctctgcctcctcctttgtaaataggtggtaatggcagtctccaccttgagaggatgcacctgtgactgtgaacatagtagccgctcttgttgtcattccagctctgacgttttcaagtagcacgagttttccttagtgtcaagtgagcgcccaggctggcctgtttgctggaagctggacagatggctgtggctggggccacagagaatgccatcccaatgaaagccaggtggctctggtaccttgacgcgaggccaccttccctcctcccaggtgtctcttccggggaaggagggctggagggcagtgggcatttgccagggagctggagaaacctgccgtggccctttctgggggatgtggtgggggtggagctgggactaggggaggctgaattcagccaggatctgcctgccaggcgcagctcccaggaagaaagcccaatgtctgggagggtcagaacccagagggctgtcaggttgtacagatgaggaaattgaggcttagcaagccaggaacttggctgaggtcagccatagcagcggtgcacagagcttagtgggcacatacatgcttggtgcccagctctgggctccttcccccagcatctcacccaatccttacagtcgccctgtggggagcaggctgtttgcacccctattttgcagctgagcagttatgctagagagctgaagccactcaaacccatgtctggtggacttgacctctgtcctgtgcctggagtgagcgctcactggattgcagctgtggttccttctctccctgtcacttcctcccccgacatcaaaccctcagtttcatttagtttttgcctcgggctgcaaatgcagcttagggacctgcggaggctgagggaggggggtgccccacccgctgctgggagggcaggagcaacgctgctgtctgattgcatcattttcccaagcccatctgcccagctcatttctctgcatgcatacactggccccaacacccacacacgtgtgcatgcacacaggcacacatgtgcaagcccaaacacatcacacacatgcatgcacacacattgtgtactctcaggtacgcacccctgggtgcacacaggtgtgtgcgcgcgcacacacacacacacacacacactgtctcaggtacacacgccaggtccatgcattgcttcacactgcccagccccagaggctgaaggcctcagagcccacacctgcccagctacaacctggcaggcaggaggggctcactggtttcttttggtttatttaagacagagtttcactctgtcacccaggctggagtgtggtggcacgatcttggctcactgcaacctttacctcccaggttcaagcgattctcgtgcctcagcctcccaagtagctgggactacaggtgtgtgccgccacactcagctaatttttgtatttttagtagagacggggttttgccacgttggccaggctggtctggaactcctgacctcaagtgatccacccacctcggccgtccaaagtgctgggattacaggcatgaaccactgtgctcggccatgagagcatgtgtaggactccacagcttcagggcaccccagccctctttttgcggtgaggagctgacctccagagagtggaactagtagcattgttctaagtgcctgccacaggcatctgggagatggtccctgtttccatggagctcatagtgggggagagggcagttagaatacagcatgatggccggatgtagtggcccatgcctggaatcccagcactttgagaggctgaggcaggcagatcgcttaagtccaggagttcgagtccagcctgggcaatgtagtgaaaccccatctctacaaaaaatacaaaaattaggcaggtgtggtggcatgtgcctgtagtcccagctacttgggggtggtggcactgagctgggatgggaggatcccttgagcccaagaggtggaggctgtggtgagctgagattgcatcactgcactccagcctaggtgacagaatgagaccctgtctgaaaaaaaaaaaaaaaaaaaaaggatacagctctgatgggcaggaggcatggcgggtcactgaggcgatgcaggtgatccagctgtttctgtggagctgcccctccgtgtttctgtggagctgcctctcttggctccaggtgcctctgggaggaggcaggagcaggggtgactctcagagctgggtgaatcttgggccagcatcatcagatcacacttgcccaggacttcccttccttgagtctccagtggtggtcttgtacctatgagcagggggttaaggagccgagctgatctgagttggagtcctggctctgctgcctaccagtcaaacgagatgcagggcaagttcctcagcccaagcctcagttttcctgactctaaaatgaagagaaccccagatggaagggcttagcctaagacggacatgtctattcccttgattgtggtgttgatgtcacgggcgcatccgcacgccgaaacttgctaaattggacacaaaaaaatatgcgattatttttgtagttgatgaatgtgctgattgggtattctcgtgtgtgtgtgaggtgccaccctcaaactttgttatgatgttggcacattacccatctgatatttaaaaaatgcaatttatgatatgtcaagtagacctcaatagagctgttttaaaacatacaacagaatttcccgcaacccaaccacaccacccgcgccatcacacgcaaacaggggtaggcttccacatatttcctgaatgccttctggagcagggggcaggaggcaggaggcaggacaggtggctctggggctcctggacctcctctgctcagtgaggctgctcacaggagattgggcggctggaaagtaaggtttagggcctctgggatggcccaggctacctgcaggcagctgagtagctctgcttttgcagagtggttcactgcactgtgaaaacagattccagacgccgggaactcacgcctccaatcccaggtactgcccaccttaagtcctccctgcctgccttcctccctccttccctccatcctgcatggccaattgcctggctgcagttgccatggataccacctgctggctccagggttagggctggctgagtcaccagcaactcaggggcagggggttgaatgcccagtagggacgttgtgggcaccgaccagaaccatcttctctgccccagctgcatggtccatgaggtgtttccccttctaagtccaaagggcagcacaggcctgtgagccccggctgactggcaggtgggaccgtgcagcatgcacgggactgaattctcatgtgacggagctccaaagtccacctggctacacggccaggctctgcagcagaggacgggaggcctgggaaaggcacttcctctccccgagcttccaggcacacagagagtgctcaggatagcgatgcctgcatcactgcaatggtgatggccgggtgacccttctgggctccacttccccagtagtgtctaataaagaccctgggtgactctgaccttgtgacgttggtcagactccagtggaaacgttcccaggcagaacaaacatgccctgtacatttgggaaatgcgggatgctggggccaggtgtccacggaggctggaaccaggaggcctgggcccacatctgcccctgctgcttgttgatccgatgaccctgggcaggtgacctcgtctccctaaccctggtttcctgttcagcaaattggacacagtgaagacgcccaagcccagggccacaggaggcatgtgggggaggggggtgcagggcgagcccaagggcagcccaggattcagggagagccctcggggaagaagcatggctgcaaagatcaggagacaggaggccttggcgccttcgggaggcttcattgtgacggagggtggggcaggatgggagaccgcaggcacttcccggctgcagagggcctggctgcagagagccctcgtgcccatctgtccccccgggaagggccgctggttgcagaggtcttaggcctctgcctgtctatcgccttccctccctgggcctcagtttctctacctccacactgggggaagttggtctctgagcccctccaaactgggcattggcagagttgaattcagaggcgctcacatttggagacacgatgtctaaaattccagccagtgaaggttccatggggttgcaggtaggagagggactggggctgggcccctgccccacagcatccttctccacctgcaggtgggcggcggcactgcgtgctggggaagcacagattcttgtgccctctgtgaccttgagcctgccactgacctctctgagccctgctggctgcctccccaataggaatgacaactcctacttcatgaggttgtagtgggggctcaggggcacagggagatcccgctgaggctcccagggccctgcctggtgcttggcaaggagcagttctgatgggggatgtgtcagctgccagaggctcagagccaaggcccctcccacatctcctgcctgcgtgcattcctcacatcctggccttgggccaaactgctcagcctcagccgccttccctcgatgctggaggatcaggtccaagagatgcctctccccgaccagcctaggactgcagtcagcattcccaggccccagtgtggtctgtggggctgtgtgcagagtgtgcgaggtcagggttcccgggggtggcaggcactgaaggtgaacatcctgttcccgaccttcagtggcagcttgcccaggagacaaggctgtccaaggccaaggtcggggctgggctgtctgcaggggctggcggggggcactggctgtctcagggtcactcaggttgttcctcgactcccgccagacgctatgtccagcaaaggctccgtggttctggcctacagtggcggcctggacacctcgtgcatcctcgtgtggctgaaggaacaaggctatgacgtcattgcctatctggtgagggagcgacctgggtgtctgtcttcctgcgtgtcctgcaacctgtcctgtctgccccctgccagcctctgtctgggttgtcagcctgtctgctcaccgtcactcattcaagcctggcctcttctctcgaagcctgtcttgaactggaactaggaaaatagcttctcgttgtactgcctcactttctccatctgcaaattggccatccttgagatgccttccagagccaggtgatggaggcgcggggagggcacagaagtgaacttggcagtgctgctggcttagcctgcttgcagagaggcatgggctgggacctgctgccagccctgggaaggcacacagtcttcccatctccagagtatgctgtcagcctgcagtaattcagcaaagattgtggaatcctgagctggaaggaccctgggggatcacctggttctgggatgggaaataggtcacaggtgatgggttatgtgtgaagccacttcctcatccagggcccataggagtcatccctctcaaactagctcctcttcgactgaacctggccacagctctgagtccttctctgtgtggctgtgctgttcaggactcttaggtgcaaattttagaaactgaactcaaaccaacttacgcaaaaaggaaagggaaaagacaattcttggctcacacaactgagaactccaggggtaggatggcttcaggcagggctggatccaggtgcttctaagatctatctccaactctacttggcttcattcttggcctctccacagggcaggcaaggctcatggtcaccctcatagcccacctttcccaaaaaggagggcttacccccagtagggcccatggggacccaccacgcattagtccctatggctgcatcatggggtgcgaggcttgggccatgagcctactccttcagtgggcgggatttcttcctctccatccctgtggaatggggtccacccaggaaagaaggttctgtttccagaggaagtgagcctgggtctctggacagacaaaacttagctcttgccaaaagtggcttgtttgccggcatattggcatgtctaactgcgcccaatgcccttgtcattcaggttggggaaagtgaggcccaggggaagaaatactttgctcacagtcacctggtgggtgagagcacagctttgaggggctgcaaagagcccagggtgtatccatctcactgtaggtagcacagcggggcaatcagagctggagctgggcgtatagacccctgggctaccacctgggggatttaaaagctgaatgtgattcagataagcacctgcagctgggctttggcaagattccagggtctggtgagccgaatgaagggagtgagggctgaggccaggatctgggcagcaggccagagtccaggcagcaggaaacatggcagtgtctagacaggggctgtcagaccccgaggtcagggcactggccacagggacggagctggaagttcctgagcacgggcttctctgcctcccgcctctcagctgcctcaggatggccaaggcatggcctttgactagggaggagagctggaggctaggaaggccctgacaagctaatctttgcactggctgagaaagagttttctggaaaagacagatgagtttcaggagaaccctagaccttccagcaatgacagcagatggttgtctcccagcagcctgtgtggccagggccaggctcagccaatgctccaacccatggaagccaccagccatcaccacgctacaatccagctcccaatctcacctcctggaagaatctcacctctccaggccttgggctttgtcctttttccttcttactgtgacttggccatggaatggaagctgtctctgtagcagggggtgggaggctgctgcatgcggatggtgtgaactcagggctccccccaggggctgacggagcctctccgcttctgcttctcaggccaacattggccagaaggaagacttcgaggaagccaggaagaaggcactgaagcttggggccaaaaaggtaccaggcgggaggcagggatttgggctgggagtggggcggtgatgtggagggcagtggtggatgctcctgccccagggatcccatcccttccagtgtgtcttcttgcttctaagagtatgagatcatcctgctctcaggtgtgtgaaccctcttgtttttctgcctcccccacgccctcttccacccacccaccttcccatccaggtggagtgtctcttccccacccacataccttcccttctcttttatctctctgtccatctatgcacccactcaccctcttttatctctgtttatctactcgtccacatatccatccatcattcatccctccattagctatccatcgatccatccatccatccattcagccatccatccatccatcacccacccatccattcacccatcatccatccatccatccatccatcacccacccatccattcacccatcatccatccatccatccattcatccattcatccatcatccatccacccatccatccatcacccatccactcatccacccatccattatccatccatccattcatccatccatccatcatccatctatccatctatccatccatcctccgtccattcatccatcatccatccatccattcacccatcatccatccatccatcatccatccattcatccatcatccatccatccatccattcacccatcatccattcatccagccatcatccgtctatccatccatcatccatttattcatccatcatccatccatccatccatcattcttcatccttccatgcatcatccattcatccatccatcatctacccatgcatccatccatcatccatccgtctattcatccatccattcatccatccatcatctatccatccatcccattatccattcacccatccatcccttcattatccatccatccatccacatatccatctgtcattaatccctccactgtctatccatccattcatccagacagccagccattcatctatccatcccccatccatccatccatccttcatccattcaccgtttttctatccatccattcatccatccatccatctgtcatccatcatccatccttctgtccatcatccccctacctgtccttccctcttttatctctctgtctacccattcttccattcattcaacagaatcagagaactccaattgagtctggtgccttgattgtgaatctaggcatgtggcaggcagacccctgtcccatacagggcatttatgatgaacagtgtcatcaggacccctgctcacatgtgctcactccccatggagaagcccttgccacttgtgccccttcatttgggagagtgagcaggggacatagcagggatgatgtgcaaggccaccagcccacctgcagggtcagagctgatcccctctgtggggtgcttctgcagggttgccagggtaattagcatgttaaaatgaacacgggagggagtggatgccccagtcccaagtcacctactggccacaggcctggaactagaatgtccctccttggttctgtgcctcccgagtgctggagagcagaggggttgtctgagcagtagtccaggaaggggagaaagagccctgagtgttgaagattcgagtgcgctttcagcagcgcaggagcaggctttgtgcacggcttcagcttttgtcctttattctagatgagcagttctcaaaacttgtggtcttgggaatcctctacactctaatttacgtggcgtttttaatgtttattttcttgcatataacattaggatgggccaggcacagtggctcacgcctgtaatcccagcactttggcaggctgaggcaggcagatcacctgaggtcaggagttcaagaccagcctggccaacatggtgaaaccctgtctctactaaaaatacaaaaattagctgggcgcgatggtgggtgcctgtaatcccagatgctcgggaggctgaggcaggagagtcgcttgaacccaggaggcggaggttgcagtaagctgaaatcacaccattgcactccatcctgggcaacaacagcaaaactctgtaaaaaaaaccaaccaaccaaccaaacaaacacaaaaacacatttatcctaatgttttttatatatccttagtcccaattgctttcttttctatgcctttttatttcattttttaaaaggatttttttcaaaataattatagacacaggaagttgcaaaagcagtaccaagaatttctcgactcttaaaaattattgaaggccttggctgggtgcggtggctcacgcttgtaatcctagcactttgggaggctgaagtgggcagatctcttgaggtcaggagtttgagaccagcctggccaaccagcctagtttctttagtagagaaaccccacatgcctgtagtcccagccactcgggaggctgaggcaggagaatcacttgaacccggaaggcagaggttacagtgagccaagattgcacctctgcactccagtctggatgacagagagtccatctcaaaaaaataaaaattactgaaggccttagagagcttttgtggattacatctgttgatatttatcacattagaaataaaagctgaaatgttttaaatgaacagttcatgttaacataagtaacattacacttatgaaaaataactattttctcaaacaaaaaattttagttaagaatcttattggcttccatttttgcaaatctctgtaatgtctggcttgacagaaaacagatggactcttgtagcggttttctgcattcacttgttttttcgtttgtttgtttgtttttcttttttagcctcccagggcttcctcgctatgtgatgccttgttttattgaagtttatgaagaaaactgggcaacacagtgagatcccatctctacaaaaaataaaaaacttagccgggcgtggtagcacatgcccgtagtcccagctactcaagaggctgaggtgggaggattgcttgaacccaggaggttgaggctgcagtgagctaggatcacaccactgcactccagtctggatgacagagaaagaccctgtctcaaaaaaacaaaaaaaaagttttcactcagtgtctccctgaaaagtcattgggaacccctgggggtctacatttcaagaaccattcctctggatcggggtttctcagtcttggccttgttcccgtgtggctggccgtcctgtgcacgggaggattttagcagtatccccatagcctttacccactagatgccagaattccaccccccacctggtagttgtggcaaccaaaaatatctccagatacttccaaatgcctcccctactcccacccccaacagggacaaaaccgtctctggttgggaactactgctgtgagatcttaggtgacaactaagtttcatcttgttggggctgatttagaagccacatccagtttcacagaacggtgcatcaggattgattagcaggctggccgcggtggcttgtgcctgtaatcccagcactttgggaggccgaggcagctggatcacctgaggtcaggggttcaagaccaacctggccaacatggtgaaaccccgtctctaccaaaaatacaaaaattagcaagccatggtggcatgcgcctgtaatcccagctactcaagaggctgaggcaggggagttgcttgaacctgggagacggaggttgcagtgagttgagactgagccactgcactccaacctgggcaacagagcaagacttcgactcaaaaaaaaaaaaaaaaagagagctattgattagcaatgtctgccatgagtgcaggagggagagtaacagtgcagtgtgctgggattgatgaatgatgtctactacagatgcagaagaagaagcaccaggtacagcgggggtggccccgtataggtctcagctagctgaggcccctggggctctgtatgccagatggcccctgtccttgcctacttcttccttctgggctcctcttcccgtaggtgttcattgaggatgtcagcagggagtttgtggaggagttcatctggccggccatccagtccagcgcactgtatgaggaccgctacctcctgggcacctctcttgccaggccctgcatcgcccgcaaacaagtggaaatcgcccagcgggagggggccaagtatgtgtcccacggcgccacaggaaaggtgaggcacctgggaagggccgggcagagggagatggaggcggaggggtgtgggaaggagatgagcacccctcgagcggtttcctggtgtgcctccggggcagacttggtgcaaggcagctacatggctttgtttagaccccaatgagaggggtaacagctcgcccctgcgctctgtgcactgtggcacctgaacgcccattctgagtcctcacctccaccttctgctgtgggagcgatgtcaccccatttggcagacttgctgctgaggcctggggacattgtccaaggtcgcattggccaaggtcactgcgtgagtcccccaggggacacgcaggaaagtgttgaaaaccctgagttggcagagtagggttcaaaggcagctctgctgctggcttgccgtgtgtcctcagccagggcccttctccccttcctgaacctcagtttcttcatttgcaagatggggctcatgccatgtcttagtttcccagggcgagggtaacaaaatgtctcaaactggtggcttagaacacagaactgttctgcctcatggttctggaggcctgaggtccatagtgagggcatgggcagggccacgcagcctctgaaggtgccaggaagcctccggctcaggcctctctccagcttccagtggcctctggtgtcccttagcgtgtggctgcgtcactcctgtccttccgtcctccatcttcccaagctgtcttcttcctgtatctctgcattgtcttccctctgcttgtctgtttaccttccccttgctacaggaacccgtcttggattagggcccttcaatgacctcatcttaacttggttactttttgtgtgtgtgtgtgggggagagggacaaagtctcactctgacgcccaggctggagtgcagtggctcgatcttggctcactgcaacctctgcctcccagattgaagcaattctcctgcctcagcctcctgagtagctgggattacaggtgtgtaccccaccacacccggctaattttttgtatttttagtagagacggggtttcgccatgttgggcaggctggtcttgaactcctgacctcaaatgatccaccagccttggcctcccaaagcactgggattacaggcgtgggccaccatgcccagccttaacttggttatttctgttaagaccacatgaggccacattcggagggactggggttaggacttgaacccattattttgtggaaacacaaatcaacccatcccgtaccccttccctccgggccgtgtgtcccagtgcagactgcggggtccccgtggggtgcaagacaggaagccccctgcctgctgctcttcggaaggcagtccttgagaaaccagattcctgacaatgttggcaactgtcagccgatgtttttataaagacccaagtcatgagctctcagtcagcggacagcatgccaagagcctggtacaggaattgactgtttaccaaccccacagtcagaaggctcggaaactccccagtgacggggagctcactacctcgcctgcccgggctggtcagggtgctgatggtgggaagtcctggctcactgtgggaggtcctggctcactgtggtgcagggacacacacagctaagatgatgatggaggagacgcggttgatttgagggtggcctgggagacagccacccaccaggatggcacctgtcatgtctttgaaagtccaagtgttcatttcttcaccggagcactggttcagcaagcttgcactgggtatctgctgggagttgggtgcttgctggcattggcacagtgctaacttcttgggctcattgcgtaccttcagagagcccatttcctggcaagagaagagaaaatggatgtgtgatgaggaatgggagtggggccaggggtctgtgccagggaactgcgggagcagcaggcaggggctgaggatgagtctagaggagtgaataatggcatggaagagtgtgagaggcagagggaacagcctgtggaaaggcttagagccaagaggccctgaaggacagtctgtctggggctgtggagcaggagctattgctgtgggggaggcaatagggccaggactgggctgaggccatgctgggaggtttggcttcatcctgagggcaactgattagtgggtggaaggaggtctcaggttggatggaggtggccagtgactaccccagcgagatgctggggaagagacaggggagagcttctcacagactgcggccttggtttttactgtcactccagctgtggatgatgggatggtaggaaaccaggcaaggaggtttgggcgggcctgagctgttgggcaggaccgtgtgtatgctgccatctgtgcaaaggtggtggcagaggaggagaacccagaggatcaggactgggcgacacagcgagactctgtcccaaacaaaaaaaaaagctcccgacccatctgccttaatggaaagagctggatcgtgagcttcctatcccagaaggcatacaagccgagggcaggggatcagaattctgggaggggtcctgccctcaggtctttccaacggtaccattaaggttcagtagggcggcattcaggtctggtggagtgcatgggtgggtgggtgagtatgggtgggtcggctctggctcaggcagttcccgggtccatgcggagacccccaccccggaccagcccacatttagcctgcaacagcctcccgcagccgtgtgcgcccctcctccatgtggccaccagagggcgccagaggcttgggtttgaggccttgggggccgacaaaggcgggaggaggtggcggcaccaccggggtcctctgttccccatcctggacctgcagggcgtggttctgaggagaacgccccccaagctagtgctatggccgctcgggacttgggggcgtccctgcattcacactcagaagacccaacagggacggactccggggatgccggggagtaggtgctacctggcacagccacctctttcctggggttgacaggcaaggcgtacttctgcgcctcagtgtccctttatgacagtacccaggaaacccccaacagcctctggagacaatttccgagaactgggggtatgagtggagaaccaggaaggctgggagcgaggggaatccaaggccttggaggtgctggtccagccttcaggcatttaccccctgagtaaccacccagcaccaccatcccatgagtatccacccagcactgccccgggcgccatcacgggggacgggccaggtggaggctttcgggtctttgggctcagggaaggtgacagtgaaatgttggggggacaacggattggcctgggatgtgagggggaagggcatcctgtttgctggaaccgcctgagcccagccctgaaggcagaggcggaggcagcctcccttcccagcaccccgtccagacagcacctggtgcagaaattgagccgcactctcccctcccatgccctgctgccagccccacccctgcccacccagagagctgcaccgaagctggggtggcccttgcggggctcctctctccccctagttttggaagaggggcctggaaatatgattctgagactctagccggggagcgagagttttgtaaatggcaccatctgtatgggtgccccagggcagatgggagaccccaggccccccagtcccagtgggaccgtgtttacatgcatgtttacacacgtgtgcacaaatatcagcatgcggacactcgtgtgtgagacactacatcctccttctccccggaaagctgccaggagctgccctggtgctggggtcttggggttcagagggggaaggattagactggcctccttggctcttgcctgagacgagggcagagtttgaaccaaggaagcgtttgtttggcctcttcgagggtctctggctcctgaacagatgggtgtccgcatggcagcatctggatgggcagacagcagcccagccgtgcctggctggtgaggcacaagccgtctttgtgttggggaaacatgaagctgtgggggaaaatagctgggccatgcaacgtcggaccatgccttaccatctaaaatgaggctgtcttttagttgctccaggaacggggccggctgggggtcagcaggcaaatgtggccgcccccacctcagtgtcctcatccgtaagatgggactaatagaacctgcctcctggggctgctcaaaggattcagtgagttaattatgcatggagctcagctgggaagcctgagtgtgaaccgttaggatgagcgagtttgctgtgtggccctgggcaagtggctgcacctctctgagcttcactttcctcacccataaaatatggctaaaaatccccctggccctgggggcctctctgagtgacagcacatagtaggtgctcactaaaggggctgcatggagggtgagtgaggccagcccaaggcctgtgccgcacacacagctcccagctctgcagagaggctgaaccctggattctgtgccacctgacgagagtctggaaaatagcatgtaattcccaccgctgcctggctgcgcccatgcagttttcacagtaggcaaaaggtccctctgtcatttccacagcgcttaagtctccctctgggctgccgagcccacggggaagcaggagacgtgcgcggccattttctctctggggacagagctgggctggcggatgcctgcgctgaccccggcctcctcctcctcggcatcagtgtggacggtggtcccggctatgtcgggggtaacgttcacagctcagtggggtgttgaggtgtctccatttgcccacagaggatgcaggcgaggcaacctgcccgagggggtggctgtggtgctggggacctgggcttgggtcccgggcctgccctggctgtgtgtccttggactggttcctttcccttcctgggcctcagtttccctctctgtgcagagaagagctgaggagcaaaaggccctcagtggtcacctagttccacctcctccctgacaccagccattgaagagatgcggaaactgaggctcagagaggtgacagggttcccaaatgtatgggtatgggggagtccaagcaccctggtgccccagccctgaagtgagcttgatttggggcagggcagggtcagcaatgtgggggccttgaggaagagactatagtgcgagctctggggctgcaggagcagggcctggccccccaggtcttgccagtggctgggcctccagctccagggggtcagatgtgtcctgcacccacccacgtgacatgtgtgccctctcctatactctgccatgtccccagacgtgcacatctccctcctgccacatgcccacacatacacgacctacactgcatgacctcacatgtgtacacgctctgcccagctctgtctccgccacgggctgtccttgtcctcacgtcctcccccagactccagaacccccatcctgtggctcctgacagccctctgttctgcattgcaggggaacgatcaggtccggtttgagctcagctgctactcactggccccccagataaaggtaggatgtggctcctccccttagcagggagcactagcatctgcagcacctgatggggaggagggcacagggttctgggagattccacaggacaggcacagaatctcctccgtggcaggggtgcccatcgggtggacagcctgctggggaggctcccttcgctggggccagctccaggggacacactttcttccccgccattcattcttcccggagaggctgtccaggtgctggggcacgggatagaaagtccctgccactcttcagccacatccctggcatcccaggtgtgggcaggcatggctctggcaccccaggtgcgggcagggatggctctggcaccccaggtgcgggtggggatggctctgaaacgtggttgctggtgtctgggatgctcagagccctccgagccccagtcagagcccccagctatgcctggctcctccccaggccacctgtgcctggtccccagcatctcttgagcctttcctggggtgggaatcaccaggatctcagggcctcaaccgccctggcccgtggcatgtcacccaggcaggagggcacctgtgggtattgcccagactgctactaccatccccacccctccagcttgaccttggacctggcctgcgtccatgcatgaatgatggacacgttccttccttcactcgctagctcatccttcatccagtgtctactgagcacccactcagctccaggggtgccgagtgcagggcccagggcagggccgagcagtgggagtttgaggcacactgccgctgcaagctgcccaatttttctagtagccatatatataatatataaatatttttatataatatgtattacatataaatacatatgttttatatatatatatatatatatattttttttttttctttttctggagactcgctctgtcacccaggctggagtgcagtggcacaatctcactgcaacctctgcctcccaagttcaagcaattctccctgactcagctcctgaataactgggactataggcatgcgccaccacacctggggtttcagcattttggccaggctggtcttgaactcctgacctcgtgatctgcccgccttgggctcccaaagtgctgggattacaggcgtgagccactgcacccggctgtagtagccatattaaaaaatagaaaaatgaaacaagtgacatgattttaataacatgttttaccgaaaccgatatatccaaaatattatcattcctcctataatcaatgtaaaaaaataattattaatgtttacattcttttttcttctgtgttgagtctgcaagacccagaatgtgctgcatgcaggcatgtctcgctagctggctggatttcaggtgctctgaatggccacccgtggcttgtggccacctgtgggcagcacaggccgggactgagctcttttgaggccgctttgggctcaagctctggaagagttgccccctcctaagcccccaaggggctcacaggagtttccattttgttctttctaagaggaatctctttccccgtccctttaaccagctggtagctcttgggatgcgtggcctggaggtgagccgtaatgagctctaatgatctgttttgaccccagacaccaggcagctcagtggctgggacagtagctgcttgttgacttgctgccagcgaggccgcaggacggggccctccctcggttcccacagcagcttgtggggccagggtgtccagtttcgaggtctttgtctgcagaggccaagcccaggcactgagatgggattggggcaggggccaagctgctccaggagctgggagtagggctgtggtcttcccatggctgctctgaggggctgaggaggtggcgggccccttccattgccctgcaccactgtcagctccacggcccagcagccaaatgacatctccacccccacacacacatgcccccgagtcctgctcagaggcaggggcctggtgagctccagggctgagtcgggggctctttttaccagctcaggccgaggggctcaaggggaatgagcttggtccctcagccaggctcagagtcttcccccacttctttcccttccacacccagagaagtgggtggggggcagcctatgcctctctgggcccccgaccacacgtggggccaggccagcagcggcagctctgtggactctccctgggtcacggcagtggccctgtggctgaaggtgctggcaaggaccatgaaccccgtctagttcaaactctcaggtctcatctggggagactgaggcccagggaacagggacccccttctcaccccaacacaccaccattctgccatggagtgcaggctccgtccagccagccccggtgagggagtctgtgtccttcccctccttcatggggctccctctcaccctcacaacagcatcctctctggggacatgctggagacccccatgggcccctcccaggagaggccagctctgcagcttacaggccaggggaagcccacagctcggccctcccggctctgaccccttgtcctatgtccaggtcattgctccctggaggatgcctgaattctacaaccggttcaagggccgcaatgacctgatggagtacgcaaaggtatggccgagtctccccaccacccccaacctttccctatagcccccttcccgggcacgtccctgctgggggctgtctgagccagtggcctaggccgggactgaccccatgtgatgggggattgaacttccaccccagctgcctacacacgtggcctctgtcccctgggctgaccccacagaggtgtggtcatctgccagcccgttgccagggcggagccgctctgaggccatttcccagtcccccgagccagaggacacagggctcactctctctcctgctccctgggaggcggagaccagagccctgcttgccacctccgcagtgtgtgtgtcttggtgtgtgtcacttggggggatggctgggggatgtgatggccggccggggggatgtgatcgggagctgttctcccaattccctggatactaattgcccctagcgctttccccgggaacaggtaggcgctccaagggacagtcgcagacaaagccttttatggcaccagccctttttgaagtacaagttgcaataaaacatattagaagttttgcatcaagatccttagccgctccccagggcacctttctttttagcgactcgatggcagcccttgacaaacagcctcaatcaatcaggccggggaaaagcaactcagcgcacacaccagaaaattgctcaggtttttaaatagcagtcgccaaggctggctgtgagctctcgctgcagccaaggtgccgcgtggtaggggaggcggcagggacgcagccctgcccccgccgccagcaacccattaagacctggagtgctgggagggaagaccttctccaccatctgttgttttattattaagaggggagtttacaagagcaagcccatatgttgccaaacaaattgtcaaatagcagagctattaagggagccgggttggtgaggtttctcccctggtctccttgatgatatagaatatgaagcgtgtttcatctttaagaataatgaattggagcccccacccagctctaccctcacgcctcgagtcctggatagagaggggcagggccgacccatacgttgccctttctttccgttaagtccccagacaaaagcagcttctggtttttctagcatagatgagtctcaggagcacactgctgtccttccttctcaggttttgaggagaaggtgctgagctcagcttccatcccaaataaccttttgagccggaaaagtttgccagggaaagatgagcatggccccctcggccacctaccctctcctggagatgggtttcatcagaaatgactgtggggaatctgagcacgttctagaaggaggcagaggcagtgtttctgcacccaggaaatgtcagaatgactgagcagtgatgaggcctcctccaaaattctgagccaggcaggatctgagatggatgacacaaaaatcaatggggctttcaaaaatctctgctttcaagacgcttcggtagccaaggcaaaaaggcgccagaggactcataaaaaacatgcatttgcttcgctggccatcctctcccaacccatcgtccaacggaaaaacactcagaaccaccccatccttgtcactgtcaccataatttaaaaaaaaattttttttagagacagtgtctcactctgtcacccaggttggagtgcagtggcacaatcctagctcattgcagcctcaacctcctgggctcatctgaccctcctacctcagcctcctgagtagctggaactacaaacgtgccctagtacatctggctaatttttgtttttcatatatttatttatttatttttttacagacagggtctcaccatgttgcccaggctggtcttgaactcctgaactcaagtaatccaccctccttggcctccccaaagtattgggattgcaggtgtgagccaccacacccagctttggctaatttttaaatttttttttgtagagacagggtcttgctatactgcccagcctggctataattattatttttaaagccagactacaaggtgggagctagaaacaggatggtctcacgttgtctacatgttggagatcgttttgttttttctcctcaattacaatgagagtgtgaggggaggcacctcgggaccgagagaggctgggaaacacaaatctctttggtcttgggagggtcattgtcattggcccctgttgctttcctccccgccctttagcctctccttgctcctggacggaggtccgctgagaagggaggcaaaggttctttcacgccaccgcccaaaaacagaggctccacggagcctggccggctgctcttcttagcacccagctgctgagctgagtgaggagcgaggacggagcccagcaggccaccaggacatctctgctggagagtccagtcttgccttgcacagggtccgggtacccatgcctggccaagggcacagggcgagtgtgtgggctgaagagtcttcaaattctagagtagatcgtgggctgtgttttgtttttttaaatttcagttttcacgtgtaatatggtaactgttgatgagataatctacacaaactaaggctcttaggggcccttagtgattttttctttctcttcttttttttttcttttttgagatagagtctcactctgtcacccaagctggggtgcaatggcactatctcagctcactgcagcctctgcctcccaagttcaagtgatgctcctacctcagtctcccaagtagctgggactacaggcgcctgccaccatgccaggctaatttttgttatctttagtagagataaggttttaccatgttggccagactggtcttgaactcctgacctcaagtgagccactgcacctggccttgtaggctgttttaaaatgagtctcctggctttctagaaaaccccgaaaccagagcatttagcctcattttaatgttaaggtggtgatggggaaacagctgctccctgcaggaggcctctagaatctcaccatcttgggaatgagcctgagtggggtcgatcccatcaggagagagatgggagggtgacccggtgggggctgcctgtggttcccacagggatccagtggggctgaggggctgaaggggctcagaggcagagcatccagtctcgctggctctgaggggctgggtggggccccttcagtgcaccctgtgccctataagcttggggccaggagagcagtgccaggtgtccgagtgcaggaggaggctggagtgcacgagctggattccagtcgggcgtcatcaagggtggtgcgggtccccagggcgacaagcctcatcttcttcctcctcttaaggctgagtcaggtgggccttccatgcgtgacctgcagccctcttagcctgggcctcctgggcagaggtgggtgtcctcctgtaacaacagactgggccatttaggaagcgaaacagagccagagccgagtgccttggagacgggatctgctgggtgttccccttctagggtctgcagagtgatgtgtgtggctgttgcgccaggcccagggaggggtgcccccagaaggtgtgggccatgagctaaaagctctccctgcatcctacctgtcctggggtccacaggaagcactgcctgggctctggtgccaggtgccccggtccacagtgcgagcgggttcacacaagccccagctcgtagggtggtggcggggctggttggctggtgccgggagacctggctgggcatggcacctgcgtgcttgctcagtgcttcaggggtccttgagatgtagactcaaagtcttctggaaggaacctccaaggtcagcattgcagacacacggtcctgcagtttctctggggcatgtccagcaatagggtccccccagggaggtgaccgtgaccaacactaggaggtagccagggtcttgtctgaatgggggccagagtttggggctctctgaaaaagcagggcccctgggacggacctcacgcgtccttccagccgccttacctccacctgtgctgtctctttcctgcagcaacacgggattcccatcccggtcactcccaagaacccgtggagcatggatgagaacctcatgcacatcaggtaaatcccaccctccacccatccttggtcctcccgggctcattccaaaggacggccacgcgctgccccaggacgtcctggtgacccccacaccagtggtccctgccctcggggagctgagaggcctcaggcaggacagaggtcgaagcgcccggctcatgcactgccctcattgcagttctgctgagtgttgttggggagatagatcatggggacccggcctcatcaggagtatcaaggagggcttcttagaggaggtggcattcaaggatggagaagaggcccagatgtggcacaggggaagagtgtttaaggcagaggcagaggcccccccaaccacgtgcagagccccggggcagtccccagaagacaggtaaaggccccagctctttcttacaacctgcagctccacgggtgactatggtgggcccagaatgtttcaggcaggttggcagcagatgctctggcagagagtaaaaggcagaccaggctcatgggcacaatggggtgtgtgtgttgggggatggggacatgccatgtccctccccagctgaccctgtctttcctttcccctccgcagctacgaggctggaatcctggagaaccccaaggtaatcccccaaaccccatctcctcccagctggccacctttggtggtagcagctccatgccgatgctgtctgatgtatttatagcctaatttgaaatttcacgggggccagccgtggggctggggccgagccctgcctgtgttccccgacccccgcactggcccccctctgcccaccgtctcctcgctgcatttgaagacctccccccgcccttcctcttctaattgcctctgggatgaacaggggaaggaaatatctcagggcagcatagagagagagtgtgattgtgagacaataaagaagtaattaggcagatgagacacttgggggagggcccagcctgtgcccaccagctcccaggctgtgctgctggagttttggttgtggggggtggggggaggcatggctgagagccctaggccccatttgtctggatccgtgttgcacacccgccaccaccggccaccctgatccggtcccaagcttcccgggcgggctggactgggccctcagctctgtttgaagtttcgggtttctctcccgggggtagggggcttctttgtgtctacccctgcccactgtgggaggtgggggaggcagggccaaatctatcatgggaagagaaaaatctctttgtccctgagggaatgtgtcttagttcccgggcccagccccacaccccggggaggctggtttggaggcgggaaaagtgtgctttttgaggggatgcagctgggcctgggggaatcaagaagaccagctggaggggagggtgcccggggaggtttggtgaaattggggagcgccagagccccgcccaggatcccccagggcccgggcgtctgtcactctcacgcccgcgtgccgccccctggtcggtgttggctgtaatatcacatggcagccaccatgtctggggagcgggccgggggtggcattgtcctggctcagttcctaggacactggctgggagcatcctcactttatggttgaggaaactgaggcccgggcaccggctgctcagggcgagggaacgggccctggggctggtgccctccagctctgtggctcccctactgcccacggcccctccctgtccaaacctgtcactcaggagagctgccacccttgccccctgggggctgatggcccctgtgtgtggctgctgcctgctggtcacaggtttttctagttcatgctctgctgaccccacaacactcaggccagccaccctaattagccagtcagtcagctccaagggaggcagggaggccgagcctgcagggtggcttccaggcagggcatcctctcaggcccgtgggccccaagcatgctgggcaaccactcccggccattctccaagcagcctatggcctctgcaagcagcctatgggggcagagaggaggcccccccagaatagaggacctcaggattgagaaagcagagcaaggccagagggaaatcaccccctcggaccgtgcaggagggcatccggggcctggagcaggttactgagctacggtgggcaggtcctgcgccctcccaggcctcctgtctcatgagggcattgggtggagaagtcagtactaaagagaatctggattaaggatcctgctacctcacccacacttgggtcccagagacaggaaacccgagtctaaatcccaacttttcttcttattgctgtgcaacctcgagcaagttacccaacctctctgagcctccagtactccttgcccaaagtgggaaaacacagcacctccctcctagggcatctaaagcgcttggcctgtctcagggcaagccctcagtcatgcagctgggggtcccatgctacctcttcatgggaggaagggtccaaggtcctctcagggacccctctcaagaaaggctgggctgggctaagctgggtgtgagtcaggggaaacatcgttcctgctgagaggcccggggcacccagagtcccacccaggcacccagagtcccacccaggcacccagagtccagtcactctggaaagaagtttgccccagccatgcagactccccaagggctttgtgctgagggtggggctcaacgtcaggacgcacccttgcatccctggacctggcagccctgtccccctcgggatgagctcaggggaacagagcctggggaacccgtgcccctccccctctccaaaagaagccaggagacctgcggaagggagggcttgaaggcagatggctgagccattttctgcctccgtgagggctgattgaagggcaatgaggcagctaatgcgaagaaagatagaaatttacttgctttaacttcatacggtccacagtgaaagagttcattcagtcgccggcccgccatagctgatggatgaataaaccatttgcggcatcgatcatgcctctacatcatggtttagttcatgggccatttgcttccaatttctccttctcggggcctgtttcatgctttctttcgccctctccccctagcccccaccccgactctctctctctctttttcttcactctcttccctcccccgcacccccccccccccacagatgacattggaagtgagccctcccgctgggagggataaatagatggcattgatacttggcaacaaactatttgtcattagaactgggcttttaggaaggagagtaaaaagaaggcaggcgctcgagccaccgcggaatgcaaagcaaatgtcattttatttctatttagttattttatttaatcggcgctgtcaggtgcctgcccgacagctgcctctgacttccgctgcggtctgcagaaactcgtcctccagtcttcccatcccctctccttccaaatgcacacactgtcagcctccacttcggtctggggctccctcaggaagtgtggcgggagagaaagtgacaagcaacgcattgaaaacagttgacagtcgggcccagcgcaggtggaggtgggagagagctgggcttgggtgggagtggggccctcgtaccggcaccctggttggaggcttgggggagtcccaggcagctggagatggggctgtggagttgtgtggtcaccccaagatccagtccagttcactttacctttttgctgaggatgagccttgggacccgtctgtgcccagggaatgctgcagttggcagggtgggccagccctgatgcctacctgtggctgtgatgctggctggctctggccacaggcctcaccctgtttctcagcccaggttactacagcagctgggaaccagcataaggtggcggaaagagtccctgtgtttagcttccaaagcatggtttggagaagccacctctcagccttggctttccctgtggtccatagaggcatcaggctgggggtccctcagggcccctcctacctcctggagtctgtcttcagggaaggttctgggttcttgttcctgccccacaaatgggcactgatgcagggatacagctggccctgagtcacatcgtaccttggaggtgggggtggaggatccaccacagtccctgtcttagaaggatcaattgtcctggtttgcccaggactaagaggtttcttgggacaaaggactttcagtgctaaaaccaggagaaatcagggcacttggtcactctaacacagagccacaggcaaatgaccacaggtgagcttccaaggcacttatgtagccccatcccatgcagaatgaggaggaggctgggccgagcatgtacccccagagtgaatttcagctgccctttccacctgcagagcatgttcccgtttgtaccaggccttccctgacattttcctgtgtgttttcatgtccaattaaaaaatatatatatactacttaaattgtaagatggccaagggcaggtatcattttccccattttacagatgaggaaactgaggctggaggaagtgaagcttccccaaggccccccagcctgagctcttgatcctggcacggggtaatgcccatcactctaaaatacaatgtgtatttggcgaggacctcgcggggctcctgtcctgagtgccagggaacaagtcccacgtggtctctgcctgcacagaactcacagttgtagctccagtccctcccgctcagcctcaatttcttcatctgttgatggggtaagagcgcttgaccttcttaccaaatggggctgctgagaactcagactgcagatgggaagcaatacgtgaatgtgtgcaaggtgttttttttttttttttttttggtgggggggtgggggacggaatcttgctctctcacccaggctggagtgcagtggtgcaatctcggctcactgcaacctccgcctcccaggttcaagcaattctcctgcctcagcctcctgagtagctgggactacaggcgcatgccgccatacccggataatttcttttgtattttagtagagatggggtttcaccgcgttgcccaggctggtgtcgaactcctgagctcaggcagtccacccacctcagcctcccaaagtgctaggattacaggtgtgagccactgtgcccagccgtctgcaaggtttttaaagcaaagatgagacagcagttcctggatgtcagcaggtgaacaaggaccccaggcacaggatgcccacaggagggacctgagcagtcaggcccaagaggccccagtccccacagtggcaaatgtccaagccacggcctgggggagctggggcctccgaaggtgggagggaatttcgagagtttcaggcaacacgcagcccctccaccactgcatcagacgagaggcccattttccaacacgcccaagaaaaaatatacataaaggttgatgtgttttcaaatgggtttttgctttgctcttctcttttctccctgtgagtattaaccttggggaccctggggacggctcggcttgccagagcacctgctggggtcacaggcagtcattagctttgcggtcagtgcagaataaaccccaatcccgagccggcgagagcgtgcgtgccgctcctgggaagccctcggaacgccgccttgctcctccaaagtcacactttttcctgcctgacttgttcctctccagctattctacctccagctgtgggggcgtcgaagaaaaagatgagatcaagttgaggggaaaaattgtctgatttctccagccctttgtttcccaggcctctggcaagcgaggctggtgctaggctgagggctggggaccgggggatctgccggaccccaccagctggtggggaaatggacagaggagaggggtgcagatccccgcgggaggtgggctgtagggtgtccagggactggtatgtcatctgcccaccactttctgtcttttttcagaaccaagcgcctccaggtctctacacgaagacccaggacccagccaaagcccccaacacccctgacattctcgagatcgagttcaaaaaaggtatgtgcccacctgttgggactcgaagggggttgacttttggggccctggctcctttcccctccctgcctgggaacctaggccctctttacccccgccctgcattcctggaagctagagttcaggcaggggcttcaaggtaacgcacagcccacctccctggacagtacaacccatggaccatggatgcctctaggcttgggaggaacatgccctcggctacccatcactcgggttcatgggcaccaggtctggaatgagagcgctctagtccctgaacagccactcaactttcctgggcctcagtttcctcagctgtatctgaggatgaaagagtgcctgctgttttcctggggtagaatgaggcctgcaagggagcgtccagccctgggccctgaccccggaaggtgctcagtaaacggtgagtgttggcgagctggcctcatggacccctgggaccccacatggaaagccttcgccagtcttcattgagccgctctgggcctcaccctgctgaccccacgttcaaagctgcggccactcttgctcccctcggcagtggaggctgtcctgatcgctccctccttctcactgctgtcaacaagaagcgtttgctgacctggcctgagtgcctgggtgcctgagcttgggagagggcatctcttggcctggaggaaggatggagaagcgaggcatgcccgcctgggctcagagggagggctcagagggcgggctcagagggcctgaaggggtaccttttcaggaggctggagtgatcagggaggcttcctggaggaggtggtgctgggcacaggggcacccaaggaccaggcggggggctggcccattcgtccacaaagtggctgcccacactggagctgggatgagagggagagaggctcgtggagaggcctggcccggctctggcgctcggctcttaccccggctaccacagaaaggaggatagggtggggaagcctcaggccggtggggaggcagagctgcagatccccctctcccccttgctggtgtgaccttgacagccagcttcaccatgctgggccttgggtgcactcatcaaaaaacggaccacaggcatgatgctcacaggtgcccggcatggtatgtggaatggggtgtcggaggctaagtgctttaataatctgcctcttctgggcctttcccaagagcttggccaagccagcgactgtcttccttgctccccttcatctgtcccaacctactggggggccaaagaggaccccaaaggcagccgggcccccaggcctgtttgcaggcacagagcctccctttaggatcatctctgagaagatggtgggagtggccccagcagcacctcctggctccctgcacagggctcccaggagcctggagagccgtgagggtgggaggcgggtggcaggctgcggagggtcctgggcaccaggctctggcagccctgcccgaggaccagggcagctccgcaggctgagctggagaagaaacgtgacctattgtcatgatttggggactgtctggaagaagaaaaaaagaccggaggaaccctcccctggctagtgcccattcactctctagttaatttatttgaagttttaatctaattattaactattttaaaggctaagaggctttctccagcagcagcaccaacaatgtcacctcttctcccgggcaggccccatctaaggccccagcgaaggccgataataggaccggggagggagagaaagggagagaggagaggcggggggtggtgagaggggcttaaggttcattattgggcagacttacatttaatagcaatttacaaccaagttataaaacccctggaaatgggggttaagaatggcgaggctgacagcgccttgagtgaagcccctccaagcggcgcctggctaataaagcctcgaaagccgctattgaggcctgattggcacccgatggctcgctccatggtaatgagccgggcagatgggtgggggattagccgccaactttgaacagcttttctttgtcactgtttcagctctcttgttagccccaatacatttattgctcatttcacaccgctcgagaaagtgccccttgctattcaaagtcaaccccgaacccacccactgcccccacccaaccccttccctcctgccaccccggacccagctcctcggattcagggacgctgccgacacctcgcctgctggagcgggcaccgtgtcacccccatcaatcagatggctgcgtgtgggtctggggtacagggtcggggcgcggggtccgcctgacagacgtggcagggggctgtgtgtgtgtgtgtgtgtgtgtgagcgagtatgtgtgtgcttgagcccagccacacctcggccaggcggcccccgggtgactggtgggacagaaggtgctcccggcgtaagacaatggtggagcgtgaaattcaattagttcagggcctggttccaatttcacagcccctaaatgcaaaaggggcaaagagaatgggagggtgggggagagcgtttttattgcattttctctttcattctggggggctttctcgccccttctctccctgcagcaggcctcaacctgcacagggcttttgaaggagtcatttggagtccatatctgtcacatccatttaaggcgtttcgggaggagggagagggtggggtggcgggtgcagactcctccgctgagccgggcccagaggcccactgccctctcttcccaccctaggggtccctgtgaaggtgaccaacgtcaaggatggcaccacccaccagacctccttggagctcttcatgtacctgaacgaagtcgcgtgagtgtctgcagccctgtccggcctcttgggaaccgccgtctcgggcgagcacgagcctggaccgttgcagctaatggttgtggctgaggctcaggggtgcggagcacaggccatgtcccttccccatagccacagagtttcccggaccagggggacccatttggcaggagaggctccgtggtccttagccttggaagataacaaccccaggaggtctcctgcctccaagggatcattaggccggggctctcaggcccttggctggatgggaggccaggatagaaggaaagggagcagtagttagctgtggcgctaggcagggccccaggacacagggaacggaaggaacaatgtgaactcacacctgggcaatccctgctctctctgggcctcagtttccccacctgtccagtgggcacctggactaggtgacccggctcagatgtcctcttgagtcttagatcctgaaatgctgcctaatgtgtggcctaagctgtgcccaccctgggacagcccagctgggtgggtgactctgagccttgcggtagcgcccgaacctaatggaccagttcttcccacaggggcaagcatggcgtgggccgtattgacatcgtggagaaccgcttcattggaatgaagtcccgaggtgagtctgctcagcctccctcagggcctgcctcgggacccagcaaacccagagatccctgagaccctgtcccctttggacgctactacccccatgctccgtgggcgaccttgggcacgtcctttcaccacaccccgtgagaccgcagtttccctcctgccaagtggggatcgtgggccctttgcccctgactttcagggtgttatgagaagagctgtccaagggctgggagaggcccaggagggcctggggagtctccgaggagcagggaggccagggccaggcctggaggtcaggctgtcttgtgtctggggtgggcaggccgggtgtggaggcagaccgtgcaggcccgatttcgtggtcattaaggccgcatggaggccgccggccaggcagggcgaaaatcctgccaggggtgggcgctgtggctgcacaggcactgggagccggccagggcctaaggacctgtcccagcatcaggcacggctcactggcccttttctccagggatggggctgtgccacagttggggctgtgccgcagttgaggctgagcttcagtgtgacatgcctgccacctcggctggcctctagcctgcctagcctcgtatccgcctgtggctgggcccaggagcagggcagttggtccccaagcaggtgcctctgtcttctcttagtagccaaagcccatgattccctttgtcagccaatcagcatttcatcttgaccacaaccctcctctccaggactcagtttccccattcatacaccaaggggatctcagctccctgagggtctgccagtgtgtgataaagccatgctgtgttctttcttgggggtcctaagagggaaagagcaaggtttcagcagttgcagcccctgaattgggcacctgaatttttatactggtggtggggtcagggcttcctgtttcggtaaatgttcaggtctctttgcttagggttgatttgaaaagataccacaaccaaatatcacctggccacggtatagtcacggccccatgtctctcaggctatttttactaagattctaaaatccaaagagagccgatcaccccatgtgggccagaagaaaagggtggtggtccggagggcaggatgcctgcttctggtctcaggtttgccctgccttgcccaacaaccttggacttgtcatctatcgctaggcctcagtttccccaagtgtaatgcggtaggcgctgggagttgcatcactctggctctgacctgtctgcgtttccctggaaaggcatggcagcatggaccggggcggggacgggcttgcctcgaaagacatgggagcgcggaaggggaggcaggctcgcctctttcttgtggctttagctccttgcttgctgttattcaggagaaacaacctaattgaagctctggggaggccttgagaacaatgttactaattagctgctcctttttatccgggcttacctttgtctcttacctatattaacatgtgattagatgcccctttgtcgcagcctgcccttgggagccagcgcggtgtgcaccctccagggagagctgggagggaccttgaggagccacagaccagcaccccatttacagatgcggaagccagggctggggaggggtgggatagagggcttgcttcaagtcccaggcactttagtggcaggaccaggactgccatctgggcccagagtggcatggagtggagggctaacagcttagactggagttggacagatctgggttcaaactcatgtatggtggcaggaactggtacactggaagtgctccataaatagccatcagtcccccgggcatgtggaatggggacagaagcagcccccatcctctgggagctgtcagtgtggcggggggtggggtgggttccagtattgcacctgtcttatcataataagggcctgccacaggcatgcccttgccatgcctgtggcaggcatcaccagtcaatgctggcattatcctgttgactccagaggtatctcagggctgcttgcaggcactaccaaatgatcaggattggcatacgtgatgaaagtgtattgccttccctattggaaagataaggactggcctgaagtcactgtgaaatggcatcctgtggggtggggcgagtcaagcagagttgagcaaaaatgaactgaaggaggtggttagtgatgaaaacctggaatgcactattctgaatgtggaatggtagctgacagcattccacggaggctggacctttttcccagaatgggggcctcatccccgtagaaggtcaaagccatgagatcaacagtctgttccaatccccgtggctccttaccacccacctggggaaagcttcctggagcccagccttcactctgccctggtactttgtgtgtgctgttggaggctctccccaaaagcacagaatttagtcagtgtcgtacagggaagaaaatcgggattctgacggcaagaacttgctgtgtgatcttaggcaagtttctccctctggaactccaattgtcaaggggccagatgaggaggtcgtatcatctccctctgaatgtcctcactcacctattttcttgctttgggttggggagagaagacaaagttgctaggtaattttagggtggtgtcttgtttttatttctctactccaaatatttcatgtgagaaggaaagaggagagacggtaaattagggcactgtggattcccccatgacaaggtttttattaagtgtacagtaatgagagaagctgttaatcgtcaattatattgagggcagaacagaaagatgctattgtccgtatctcggtgtacaaggggaacatgtcatttgtattgattttacaaagctcgtaattgaaattcgttaagggctgatttttttctctggggggcgggggcgggtagggagttgggcagcgccagtgccctgggtctggggtggcctagtcagcggcgctcagggtcagggacagggggctggggaagccgcggctggagtagctttctccgtattgtggctgttcacatgtcattatcacattatctttttaactctggaggggggctaattaagtgaagtaaatgaaatcagtggggaggagaaggggggcaaggcaggccggagggaagccgagggaggccgggaaggagccagcgcatgtccttgtgctcagcctctttctctgtctcctctctggccccagacttctcccgccgctctcccctctccgctctcctcccagccctgcccgtctcacctctgcctgcccccgccttgctcctcctccttgccttcctttcctcctccctctctccctttcctcctccctctctccctttcctcctccttcccctcttccctcccttgcccttccctctttgcacatcctcctccccattccccactctcccctcctgtctcccttcctccttactcctccactttctggcccagaaggaacaagggctgtcacccacttgcccaacgtgcccacccaccatctggaacattccagatggagaatggagggagacctgtgaagcaaaaaggttttcagccccagaggcccacccaggatggggcccgccaggcaccaggagcatagaggatggctagagtcccaccctgactggcctcccatcaccatggcaactgcttctcaccttggccctggtacctaagaggggagcccttgggctccagccaacccctatgccccacctcttccaaatcacttcttctactttcccaaaggaccagagcctttagtccaggtgccctcacctccagcccaggccccagctgagctggcggatcccactcaattctgcaaaattgctcattctgcctaacctggcagcctcagggacagatgagaagaatttgggccacagtagctgtttggttcccacctctttctgcttggtccactctccccccagccacccctggccacccctagatccttgcccgtctccccactccccgctgcacctttcttggcagtaattatggtgtgattgaagctgctccacagagaactgctgacacctctgtctttttcctgtaaacacggggagatgaaaatagacacttggagctgctgtgtgtgtcactccaaagatgtccgttgtctcttccacggcaacacagaggctcagctgtcatttcctccttctctctgcgcagtggtttgtatgccgactgtcaaaagccccaaattcatagtcttttagcatcaggtttctgtcactgttttttttttccagaagaaacacacagaaatcatctgtaccccctacccctgtggagaggagagggaagagctttaaacgcacacacacacacacacacacacacacacacgtgcgcgcgcgcgcgtcggcagcaacctaaaaacaagttttttgatccgtcacaattaacactttcgaagaaaaggagcaggaatattaattgcactggtgtgttttgtggctgcagcctttccccttgcccgtgagccctccggaggctgcctgggagggtggcagccaggaagccggtgctgggggctcaggaagaggagggttctgcctggcctctgcccaccagacattctctgctcccggtggcactggcctcattttcctggggacacctgtgatgggccagtagctggaggaccttggacaagtcacagctcttcctcgagccctgaaccccacctgcgccctcccctctctggactgatgggaggcgatgctgtggcctcgaatgttctcgagacaagactgtcagtaagtagggcacacctggaggacgctctgaacacttacctttgaggtaggtcccaaaggaagttggaatgtcagagcagcaggaacttgcagccttcttgttttccagatgggttgcctgggtctaagagagggggctgagaccggccaaagtcacacagcaaagccaagctgggcaccttctgtaaaggccaagctgggcactttctgtaaagcatggttgtaggactcctggtgcccagctccagccctgcaaatgtagtttggactgccctacagttggccgagctgaggacagaaaagcagggaggcgggcctgggtgtctaggagttgaaaatgaggagggctcctgctaccggcctacccaggatggcgccattacgactctgtggccagtgtaaggatgggctttgcaagtttctggaattttccaaaatgtacccaaactaatcactagaaggcctgtttccaacccgatatgtatccagttctagcatgtgccaggatggaggaccagcaggactttgtcagtgtcgtgctcttgggaaattgctttatttctggtaataaggtttctaggctgattgaaaatttgctcctcgaactttatcgttatatctgccattttggagacagagatttcctgtttctgcacacactggtctttctggacacactgctgaaccattcccctttctggtggcttttttggcactgtcatgtttgtgtgcggtcatcatgttttgttttgtttctctttcagacagggtcttgttctgtcaccgaggctgtagtgcagtggtacgatcatgactcactgcagcctcaacctcctgggctccagcaatcctcccacctagcatacaccaccacacccagctaatttaccatttttttgtagagacggggtctccctatattgcctgggttggtcttgaactcctgggctgaaacgatcctcccaccttggcgtagtagctaggaccacgggcacatgccaccacgcccagctaatttttttaattttttggtagagatggggtctcactatattgcccaggctggtcttggactcagctcaagcaatcctccctccttggcctcccaaagttctgggattacaggtgtgagcccccgcatacctggcctgtgctaagttctatgtccctgttctccaggctgtctataatgacttttctcagtcattcctctgtttctgctgccatcagcctttttaccccttcctggtttgtggctctgagctactctgcagaaaatgatgacggacccatttgaactgttttacaagagtcacggtgaggcctgaggaactcccgagggatttgagggcttggatctctgcataaacttggagagaggccatttcctaatcagaggtcacaactagattcagacggtggacatgccgaaggctgcagcccccaccaatgaagcgggatgggctctttcacagcacacgatactcatatttgcacctggttgctctgaggggctttcacaagcatgtcacctgacaccagtatatcaggggtttacagatgagagaaccaagcccccagagaggttcccttctgcccaggaacacggagccatggtgagaaccaagcttttcctccacagcaacagcctggacttgggctttttctctcacgctctggttagcagttgatcactttgccaaaggcccttcgaggccacctggagctgagatgggagaccccggggccgggcccattccccctccagttggctgggtggtattaggcaagccacccccctccccaggcctcaggttctcatttgtaaaactggtgtgtgggactagatttaaggtgagtccagagtttgcagaggggcctctgttcctcccagcacaacctctgccatctcttctatatgctgggcttctgccgcaggctgtttgaatattaggttggcagctaacagtcgggagaacacggtaccggattgatcctaatgcaagctctgacatttccgtgattctaagacttaaagatcaaagactggaggagttctccaaggaggaaacttctggttagtgcacgagggctcagcagactcagcctccccagatccccggtaggcttcagagtcaaaaccaatatccttcatggtttttttttttttttaatttaaaactgtggtaaaatacatgtaacataaaatgaaccattttaaaatgcgtaagcgtgccgctcaacggcattaggtcctttcccagggctgtgccactgtgactaccgtccacctccagaacattttctttttgcaaagctgagactctggccccatgaaactccccattttccctaccccggcccctggcagccaccatttctggctgtatgattttgatgactcgagggacctcgcatgagtggaacatacagtgtttgtttttgtgcctggcctttgtcacttagcgtcacggccttatgttgatgctgtggcatgtgtcaggatttccttccttttttttttttagacagagtcttgctttgtcacccaggctggagtgcagtggtgtgaaatcagctcactgcaacctctgcctcccaggctccagtgatcctcctgcctcagcctcccaagtagctggggctacaggcatgtaccaccatgcccggctaaatttttttgttatttttagtagagacggggtttcaccatgttggccaggctggtcttgaactcctgacctgaggtgatccacctgcctcggcctcccaaagtgctagaattattacagtcatgagccactgtgcccggcccccttccttcttaaggctgaataatattccatcgtatggatggactgcattttgcttcttcactcatccctcgatggacacctgggttgcttccgcctcttggctattgtgattaatgctgctatgaacatgagtgtacaaatcctttctgggtttttttcaagcagccactgtagaaagatgttagtaaattcccaggataactgagaacctgcccttttagtgatgtaacgtatggtggaagaaaggaagctctcggggtagaatccatggagatgggggagctatggcccctgctccacccagacagcagctgcagggcaggcttgcccaagggccagctctgaagttgatgcgagaggtcgcactcctggggcaagagggggcctgggctgtgtgctgtgggcggtcctgcctcttggtgccccactgtcctccaatgcagtaggaccttcccccagacccagctcagcccaagaccaggcatttctgtctcactcggagatcatctgttccaagcaggttgttttccaaatggagggactgggcctgaggtcacaagaggggacttgagcaatcccttctcccctgaccttccagggttgggcctccacggccaggtgacttacagggcagcagacagcactggtgagggactcgggggcctacattcagttcccagctccacctagagcaagtcccttctcctcttgagctcagtttccccatctgcacggtgcggtcagcctaggtgattgcccaagccctctgccaccccagtggcctctggagagacctggccgcaggggccccatgggctgaaggtggcatgtgtgtacacatgtgtacatgtatgtgcacagctgtccccctcccctggctccctggtggaagggaagaagggatatttggggctctgggctctaccgtagtcgctttaattacaggctttcaacctcgggccggtgggcacgcatggggagggaggggttgctgctccgaaaccctgtcattttctagcgtctgagggccccttcaaagggggcatctagacattttctccacaagccgcagagtggactgtcgtggccccagcatgaacataatgacagatgcattttgcagcaagctgggagtgaatgggtccggccggcttgtctcctgtcagacgactcattattattattatttttttttttgtcatttgctgacagtttgggtttcatgcgtttctctcttttttctccttttccccctgcctggaaaaatggctaggtatctacgagaccccagcaggcaccatcctttaccatgctcatttagacatcgaggccttcaccatggaccgggaagtgcgcaaaatcaaacaaggcctgggcttgaaatttgctgagctggtgtataccggtgcgtaagactctatggctgccccctctaaccgcctcacaagggatcccaaagtactatcaggctctcgggcctggccctcccctccgtatcagcaccttcctcccctgccgcccactgccatcctcatgtgagaccccaaaaggtgcaggccaaagggggttgagggaaagtgcagggcatgagggagcaaggggatgctagaacctgccttgccatggggtgtgtccagggagatgcaccggcttcccaaggtgtccggcagcttccaccccctacagtttgcatgactgcagcaatgccaggcactgggcactgtgcggcgacatgcatcaccccgcatggtcctcacaactttcccaggaggtctgcagctccttgtacacgaggaaactgaggctcagaaggaaagcataaaaccagaagtggcctagctgggtttgacccccaagtcaggctgtctccaggaagaacctggacctactccatgaacttgagggagaggctccctggaccaggaactcagccccagaccccagtaccgcaggagccagatcttgaccatgaaaccactggggtggccacagggcctgagccctgtcacacacccagcccatgtgtggaaggaccggtgggtgacagcacctgaggcgggggtgtccccgttttgcaggtgaggagcccgggtttccatgccttggaatccaggcctcctgactccaaaatccaaccctcatgtggtgtaacagaggtccccaaactacagtccctgggtcaaatccagcccgtcacctgtttttgttcagctcatgagctaagaatagtttttacatttttattttatttatttatttatttatttatttgggacggactttcgctcttgttgcccaggctggagtgcaatggtgcgatcttggctcactgcaacctccgcctccctggttcaagcgattctcctgcctgagcctgctgagtgactgggattacaggcatgcgccaccatgcctggctagtttttgtatttttagtagagatggggtttcaccatgttggccaggctggtctcgaactcctgatctcaggtgatccgcccgtcttggcctcccaaagtgctaggattacaggcatgagccactctgtctggccagtttttacatttttaaatggttgggaggaaaaaaaattttttaatgctatttcatgacaaattatataaaattcaagtgttgccgggcacggtggctcatgccaggtgaggtggctgtttctgcattgtctgtggctcccctggagcggcaaggggaggttgagccatttgagagagaccataggacccaaagagcctaaaatattgactctctggcccttcccacccacctccataacatacacatagccctgatttggggcgttacattaaacagctgccctgagctgtgggaggacaggctgctgcctgaggccgatcctcacatcttcgggggcctggacgtcaggggacctgtgcaaagttagtattagttaatcgaatagctacctgggctaagctctcctcccctcgcctctccccctccactcccagattttgtttccttttaagcctcctaatcactgtaactcatctcaggatttcgagagggctcgatggttattggctggcgttatttctccctgccattgttccttgcagctttgaagccaagtttctgcccccgttcccagggacagacaggtgcttaaataccattgtctcctgcaggctttccagcccggcgggattgcgaccccgaaaggaggattttagttacaaagtgagagagtcattaagacgtggcggaggagagagcacctggccgggctgctccggggcctccacggaggctgatcccaccgtggccgcggccacggctgccacttatcctgccatcttgctgctaggctctgagctgggcacctgatggggtattatctaatattagctgcgcagaggtgaggaaacggaggcccccaggtgaagacactcacccaggctctcctggctggtgatgggcagctttgagccggggacaggccagctgtagcggccaagttcccagttactccaacagattccaggatgctcgtgatcaaggggcacggcggcacagacaggggaaccctgggtgtagggcacagtttggctcctggctgcggtcacgatgcctctacactggactggctgggttgagtccctgctctgacagccagcgacaagccctctacatcccaaactgaggtacaatgattaggagacttaaaaggaaacaaaatctcagagtggaggcgagggagagtaggggcttcttctgggtagttatcactaatattaactttgccctggtccgctgacatgcagggccccacaaacatcaagatcggcctcgggcagcaggctgacccccacagctcagagggcctgtttgatgcgattttccccatgagggatacagacatggtatagaccagggctttgcctgatcatgttacttaacttccctaggcctcagttttcccatctgaagagtgggaataacagttctacctgtctggtgggtgaggactaaaagtatgagtatttgtaaagcacctggaacaatgtctggcagacgagtgcttattccagtgcgtgaaataactgcgagcgcccggcgtggtttcccagtgtggaggcgcggcacttggagtcttgcctctggctgggttaatggtcttgagcagggctgtctcttccttgagcctcagtttcccctcctgtcaaataaagggcaccaggctgagggcacgccagggtctcttcccagtcccgtctagctcctgggtggaaagcccaccattctgctgtaatgcttggcttcctcagagcccttgtggtctcggcacagatagggagactgaggcacagggaagccctcctgccccagcctcactcctagaggccctaggttctgtgaccactgccactctgcatctgtgtgtctgtgtgtggctggctggctccctctcctctcccaccattcccaaatttcctggtctggctgtgtgagcttcaggcagactgtctccaggagtggcaaccagggttagcctggcaggaccccagcttcaggaccctggcagggcccagaggagcatctcatctagggggtatagctcacttcttctcccctcacctccatttcttcagcaataaaatgggtataatgtgcaactcacacagaattgctccagttagaaaggatcgcatgtgtttggctgggcctagcagcacgggggaggggtccctctccagctcagccctaagccccacccacagtgatctgcaggtctggggggtgcagggtctcccccattgcagcttatgccaggctcactggcccccaacccaggctgggtccgctgggaaaagaaatctgagcagaagaaccctgtggggcagaggtagaaaattctgagataaagcccaggccagttgctcccacagagatctctgtcctatctctggctccatctcctgcctgtcttccggcctggaaacttaatgggctaattatcccagctccgtcagaaagatggccaagcccaggacaccagggcatggggggctgggagaacatcagtggccccctccacgagggtctcggggtgtgttggaaaaagccctgggccagagttaggagtgcttcatcagacctgggctcttccaaagtcttgctgtgtggccttggacaggctctttccctctctgggcctctctccctgtgtacagtgagggctggcacagagcatcatgttcaaactgcaaatgcaaaacgctttgcgctctgtgcattccctcactgcatccacacaacctctggttagcaatgttttctcactgtgcaaatgaggaaaccgaggcacagggaggttaatcacttgtccaggtgtggctgggatgcggactcacagggtgggacactggagagcaaggactcaacctctactctccgtgcttggccctcccccgcctctgcaagccccaggaccccatcccagaagcctgtcccctttcccacggaggacctctgcaggtgcccccaggggcctgggcctcccacaatagccgcagcccctgggctgacccagccctttatcagggcaggagatcatgcgccatctggccctgcagctgcccaggtgggctcaccttccaggctccatttcaggaaactctagccttgccctgtccctccccccgccatggcctgcctgcctgcctgcctgcctgccccttggtcccagcctccatcagcagaggctagagagaggccgggggcagactggggtctgagcgctacccctccctggcctttagggctctcggggagaggggagggagcatgtttctcaggcacctcctgcccccacctacacaccaagggatgttctggccatagagaaagctccaagtttatcataggaagcagagttgttacaacttgggccaacacaagtcaaatggaggctccccacttccggcctgtgtgatcctggagaagtttcttaacttctctgagcctcccttcctcacccagaaaggggagaggctaagagagtttctctcagagtgctgtctatgaggattcagggagctagcccagatcaaagcctgagcgcagtgctgcttatctatgcagaaatattctatctgcccaggaaaacagcagcaggtgcagaaaacagctcactgattccaaggggtgggctctggccaggactccagttcacagtagcccctaaggctggtgctgctcagtgctaggggctccacatgaaatattactgtgacatccccactcaacagatggggaaacagaggcacagagaggggaaggctatgcatggccatggtctgaaccaccacccagctgcctgcactggacacccatatcaccaagccccaggcagcatgtgcctctgagtcctgtctgaggtcttctgcctcccccggagattagagcctccattgggccagggatggggtccctttaccactgtgtccccagttgctggcctgtggcacttcctgaatgcctatggcatgaagcagtgggtcacttccctcctcctgacccttagggaaatgacctaggtggtcacctccttacccacaggccctttgcaaggttagagggcagggctatgaaagcatggtcctcaactcagccactggcaagcgcacattgtgccagtctcgcgggaggcagtcatggtctgcatggcggggtaaaccatggggcacccttcctgtgccccaggtctccctgtgtcctcgcggtgcaggaggcctccctagtggtatcctgttttcctccctgtaggtttctggcacagccctgagtgtgaatttgtccgccactgcatcgccaagtcccaggagcgagtggaagggaaagtgcaggtgtccgtcctcaagggccaggtgtacatcctcggccgggagtccccactgtctctctacaatgaggagctggtgaggtaggtgccccacacctcattctgacccccacttgggcacagagcctatcttttgactggatcctcaagacatctgtgcctgagcacatgtcaggcaccatgcagagcacagagtgatggtcacagaggatatagacaccactatgctcccgtggaacttacaggctagctgggagaaaggcatggatcaaaccattaccagaatgtagaattagacaaggtggcagcgggctgtgaggaatgcaggatagtctggctgggtataataactgggattggctaggaggggtggtgcatgcctgtaatttcagctactcaggaggccgaggtgggaagattgcttgagcccaggagttcaagaccagcctaggcaacatagaaagaccttgtctcaaaaaaatatatatacacacacacatacatatatatatatatatacacatacatatacacacacacacacacacacacacacacatatatatataaaataattggggttgtgaagaagctcctttgctattcaaacaatagcagaaggagttaacaggtgaatggggggaggggtggaagggcaaaagtggccagggggaaggagctgaagctagatcttaaagggaagggcaagatcagatctgtgcatttagagggtcctcctggctgctctggagaacggatttgagtaggtgggaggtggaagggcacctgtggaaatgcggtagcttggaccatgctgatgattcctggactagatagcagcaggcgaatgtgacacatatctaggaggagggattgaaatgacttggatgtggagggagatggagggtccagaatcaccctggtgtctggggtcgtgagcagctgggtgcagtccctgggttgaggaaatgctcttgaggaaggatcatgcatttggatttaggtgtcatgagtatgggtttcttttgagatagctgggaaaaactaactggaaggccgccggacacttgggtctagagttgaggagaacccaggctgaagaccctggagcatcataggcattttgatgttctctgaagcgctgggccaagagagactgcctaggggaaagcgtggagtgagacaagaagggaactagccaggcaagatggtgcacacctgtaatcccaactctttgggaggccaaggcaggaggatcgcttgaggccaggagttcaagaccagcctgggcaacatagtgagacctcatctctactaaaaataaaaaaattagctaagcgtggtggcatgtgctcgtggtcccaactacttgggaggctgaggtgggagcgtctcttgagtctgtgagatcaagggcgcattgagccatgatcatgccactgcactccagcctgggcaacacagcaaaaccctgtctcaaaaaataaatacataaagtattagccaggtgtggtggcatgcacctgtagtcccagctactcaggaggctgaggcaggaggatcacttgagcccaggagctggaggctgcagtgagccaggattgcaccgctgcactctaaccttagtaacaaagctaggcactgtctctttaaaaaaaaaaaaaaaaaaaaaaaaggaaacacaactggaaccatgagatttctcattgatggaccaggcagaaggtggccaaggaggagcccctggaggggcaggagggccctggtgagccagggcaaaggtggcaggtaacgattggccactcctgtgtccgccccgtggatgagagtgacctgcaccaagggacgaggtgtcacctccagaggtcacctggccaaactagagatggggcaggcccctgtgggacagacagcccccactagacgtgggtcccctaaggcccagcttagctcaggctaaggccagcccctccctcctggaggctggttgggaattaaagtacgagtcttgtttggcagtcaatattatttttttctttcccttctccttgccatgttgagtttctccccgcttcaatctttctaaacactttataagccataaatacaactgagtcagtttagatcagttggggtaaatgtcaaattatcttctctctttctctctctggctctttcttccctccccctccaaatcaacagcctctaataatctgtccaacccttcattaagccttacagtctcactcagggagattaaatgaataaagtaaaaagggaaaggggaaaaaagagagaaaagcaggagcatttattctcactgtgtctccgaccatttcccttttctttttgatttctacatcgctgacttgaaagcccttgagtgacagcgtcacagggaccagcgaggaagccgtgagaggtagcagagctggaaatgccgtggctcagtaggtagaaagtaacgtaattatagagcaggtcagagccactcgaatgagcaaaaataaaagcacagaggttttctgtagaccgtcaggggaggtaaaaaaaaaaaaagaaaaaaatcattgtaaactctttttccacctccccgctcacttcaaaccacaattttaaaaagaggttttttagttcctgagaaacccctcttggaactcccagcagcctcgtgggacaagtttgtccctggatgtgggccctctttgcaggggctgccagggcagctgggaagttcccaccttggggaacgggatggggagagtttgttgtgacttgtgagagatggaggtgaagggacagatggacacagaggtggggggattctgtgtcctacgttctccctgggctgagtataggggccagtggggctgaggctcggtttctaaaacaaggtctgttgaagggatctgaggaggttggtggtctagtttggtctagctcttcctaagcactgactgcacagaaaggggtggccagcaaaagtctggtatctcctcctcttccagggaatgcaagctcctagtggcttcagtgcctgagccctggaggggccgtggaggtgtggaggagggaggaagggacatcaaggaggtacaggagcatgggagtgactctgcagagagttccacgcacccaccggcttcaaggcctggtgaaggtcagggcccgggtcctgaacaaatcactggggccaggcagatgcagagacctcatttgttcttgtaaaaagtccactgtctacaaagaaccagtcagagggccagcctcagggtctcaaagcagcagatcctcctgcctcccaacaccgacccccgctacccctacctcgagaaccttgagtcagctttgtcccaaggctggaattctgcagacaagggtctgattcagagcaggacatgacaagggaccccatcctctcagaggctcagaggctggccttgtggagtaggaggcatctgagtccacgtgccctaagtgcttagcacaaccataattaatgaaggcaatgggtgattgattgcttcggtctggcccctccctgtggacaccactcttgctcttccttccttggcacctggcccagcatctggcaggcagcaagggcttaataaatgcctgaacaaatgaatgagtgaatgaatactgttagtactagtgggtgctcaccatgtgccaggcaccagctacattatttcatgtggggccaaatgtgacactgagagctaaccaccatcacgcatttcacaagtgcaaggctgaggctccgagtgcaggaatactggcctgggctctctggtggcgggtggcggaaacaggacgcaaaccccagtcagctggctggagtgactgccatggttaggaaggttgggaggagcagctaagggtggagagccccaaagcagaaggctggtgagtctgagaggtggaaactgtagagaggtaaaatctgctctgctgagtacagcagcagtcaacccagcattttccatgacacactggcagtgggtgcccaggtttcaggatggattaggtaaggtctaactggttggacacatgaggggaaaggtgacttggtgggcccatctcgctgtgaatgctggaggcctccctgcagcttgcgaaatgcccttgtgctattgcaattcacaccccaaggcctcctgagccttcaggtcactgcatgccatccacacagtcccaagggcacagctggcttggacgagttacccatttacagacagagtgctctggttggtggaattcatagggctagttctggggtggctgctcctagcctcctgccacattgtgtagcagggaagaggctgctgtgtgctccactagggctctccaacctttgggtgggtgcctggcccagaacagggttccctgagttgtacagaaattcaatggaaagccgacgtgcagggagggtttggacccacacaggggaaatgccctggcatctgggaggtggggctgcttctggccccagcagtcctcccttcaagcagaggccagggccaggctgagctgacaagcttctactctccttgcagcatgaacgtgcagggtgattatgagccaactgatgccaccgggttcatcaacatcaattccctcaggtgagaagctcagggccctgacgggccttcagagcctccaggtgtaaagggtaggctttgagagcccccaggtgtaaagggtaggctttgatgcgaccttgactgctgccctgccctgccctgccctgccctagacaaaccccactttcctgtccatctgcccatagcatcctcagaagcatgctttgatagccgacagtaacagagggtcctaggcattggggtcctaggttcctgtgtcccaccgggtgcctctgatacttgccctcccctcccgctaagccacagggactccactatgagctcctttgcagggcaggttaaacaaggaaatagcatagaggtggagagaagcctttgttttctgtcaccatacctgagctgtaggtctagctggaagccatcctagccacgtggatctccatggcccaggagggtggtgcacgtcatctgaagtcactcagacctttgatcctctgtgagtcaccagtaagagtgtcagctgtacctgcctcacagatgcagtgaaggttcaatatgagcctgtggaaatcaagcatgcggctcaggcttagaccctggcatgcaggaagagccaggggcagtgccagcagcaagcacactcagcccagggccggtgtgctcaagggcaaacagggtcgtttgtcaccagcagctaacatagactaagctgctctgggacactctcctaggatgtctcatttaattcttacacaaaatttgcaactccccgggaacaggctgagtggttaagtaactttccaagggtcacacagctaggaggtggtggagctgagtccggagggcctgtcctgctgtgggttctccatcaccagctcccttctcatggggattggagtctagaagaagatgcaagtcagtctcctcttgctaacaacatgccctgggcacagagccatcattttctcccagagccagtctcttgtccctggaggcacctcatgccccgagagatgttgaagcccgcccatctgcccagggtcctctcccttcccctccgtcacctccacctcccctgcctcctgcgccctctgtttgtattttatgactctataaacccttttaaatggcccagaacaaacagggcttacatagtggcctcttcatttctcctattgccagttaaacgctttgtcttcaacaatgacaaacaatgttttccccctaagataaattaattacattatcctgattggagggcaggaggggccagggcgggagagggaatagaaaaaaaggcaacttcacacacatcttaacaaacagctgccccagccaccccagctctgcctgaattaattgaacccagtgtgtgttgttattgttaatttacatttttctttgttttgaatctggtttacaggctgaaggaatatcatcgtctccagagcaaggtcactgccaaatagacccgtgtacaatgaggagctggggcctcctcaatttgcagatcccccaagtacaggcgctaattgttgtgataatttgtaattgtgacttgttctccccggctggcagcgtagtggggctgccaggccccagctttgttccctggtccccctgaagcctgcaaacgttgtcatcgaagggaagggtggggggcagctgcggtggggagctataaaaatgacaattaaaagagacactagtcttttatttcta

SEQ ID NO: 37 - DNA, 56313 bp, Homo sapiens
  source 1..56313: mol_type = genomic DNA
ctgctctgccgcctgccaccgctgcccgagcccggtaaggagccctcggcccctctcgctgcccactccctagccgagagcacccgcttcccgggcccagaggaggaggcgtagaagacgcccgccccggggcccgcggaggcagagggcggaccccgatcgccactcgccggggactgggaccgaggcaggagggaaggggctcccgatgctcaaacgcctggcaccggattccaggtttctggagcgtgggggacgcggcgggggcgcgagtccccgggggcgcgagtccccgggtccgaagagcggctcgggttatttgttccctgcgcagccgggtcctttctggactccttgtcggatccggcttcctctgtgtcgtgaagcccccacatggagacctggggagtccggagcgtgtgggggggctcccgattctctctccctctctcggactcgccgtctgtctccacctctatttctctgcgtaaaaccaggagtccagcccctctggggcttggacgtatcgctttccccgcagcctcagtttaccctggacagatgggcatggtggccctggctcccttccctgcagggggcggcagccacctggccctccccggtggggctggcggcctcgcggcggggtttcctgctggcctgggctgggctctgtgggaggggcagtgccaggaatattttctattcgggctgctgttgcctttggcccctgggcggctgcgccctccagggaggcagggtcattgtgaaagagaggaaactcctctcccaggcggccagggctgttcctgaggagggctggcctggcctcagtattcttctctgagaagtggagagtccactcccgagcagccgagtcaggctgcaggtctcagggcaggaacagacctgttctctccccaggggtagatcaagacctaggggacttgggctttgatcctcccgctcccagcaagcacaaacccagtgatggggagagctggtgaggccttggctcagcctccagattcccaagcttccttttcattttcttttctttctaaaaatttatcagagatgtggactcgtcatgttgcccaggctggcctcgagctcctgggctcaagcgaccctcctccctcgggcctcctaaactgctaggattacaggctcgagccacccaaagtgcctggcccccaagcttcagtctgttagagctggctggggctgagggctcaggaaacatttgcagatactgtgcggctgctaagggctctgtagactgttgggtgctgggcctgggtccaattgcacaataactgtgcctggggttaggttctgatgagagggagggagaagcagccacacggactgggaagcttggctaggagcaggaactggaggagtctccattccaaactccctctccctcccagaccccttaggcccaaggcctagggcggggaagtttgggggtgggggcgggaccctgtcctggcggggccatctgtgcaccatgctgagaagtaattctggttctgctctgtgggggtggatcaagtgaatgaatagtgactcctgcctgctgagcgcctggccggtgcgggggcagacacgtcgtgagagggaaggggaggccccactctcagcacagtctccattcctgagtgcttgggaagcaggcccagggccgcaggagccttggggtggagccaggcccaaaacagcctgctgcacaagcgcttccccctcccaacccgggcccatctcatctttggcctgctgggaggccagccaggtcaaccagatgcctcatctgagcactgactacacagtccctgaagtcagtggcttgcctgtgggcaccaggcacccatgtggaaagaggtaacttcgctggaattcagagtctaaggctctgatttctgatgtagctttgggcaaagttgatcttccagggcgtggctccctccccagacttggggtcgaccaggcacccataggcactttgatatgagtggaacgaatgaatgaatgtgcccttcgtccatcaccaaagacaaaccgagctcagctgagttagaatgtcagcgaggggttgcaggggaatcttccacggggcagtaggcctgagctatagcacacaggctctccagagaaatagtgggcaggttggccatgactcactggggggctggttttctggaaggtgtgtagagtgaaggggagatctgaggtctcctaggagccagggagtggaaggcctagtgcagggaagagcaagtggcctgcagtcaggctgggtttgaagccgctagcttgtgacctcggctggccgcttagcctctgcctcctcctttgtaaataggtggtaatggcagtctccaccttgagaggatgcacctgtgactgtgaacatagtagccgctcttgttgtcattccagctctgacgttttcaagtagcacgagttttccttagtgtcaagtgagcgcccaggctggcctgtttgctggaagctggacagatggctgtggctggggccacagagaatgccatcccaatgaaagccaggtggctctggtaccttgacgcgaggccaccttccctcctcccaggtgtctcttccggggaaggagggctggagggcagtgggcatttgccagggagctggagaaacctgccgtggccctttctgggggatgtggtgggggtggagctgggactaggggaggctgaattcagccaggatctgcctgccaggcgcagctcccaggaagaaagcccaatgtctgggagggtcagaacccagagggctgtcaggttgtacagatgaggaaattgaggcttagcaagccaggaacttggctgaggtcagccatagcagcggtgcacagagcttagtgggcacatacatgcttggtgcccagctctgggctccttcccccagcatctcacccaatccttacagtcgccctgtggggagcaggctgtttgcacccctattttgcagctgagcagttatgctagagagctgaagccactcaaacccatgtctggtggacttgacctctgtcctgtgcctggagtgagcgctcactggattgcagctgtggttccttctctccctgtcacttcctcccccgacatcaaaccctcagtttcatttagtttttgcctcgggctgcaaatgcagcttagggacctgcggaggctgagggaggggggtgccccacccgctgctgggagggcaggagcaacgctgctgtctgattgcatcattttcccaagcccatctgcccagctcatttctctgcatgcatacactggccccaacacccacacacgtgtgcatgcacacaggcacacatgtgcaagcccaaacacatcacacacatgcatgcacacacattgtgtactctcaggtacgcacccctgggtgcacacaggtgtgtgcgcgcgcacacacacacacacacacacactgtctcaggtacacacgccaggtccatgcattgcttcacactgcccagccccagaggctgaaggcctcagagcccacacctgcccagctacaacctggcaggcaggaggggctcactggtttcttttggtttatttaagacagagtttcactctgtcacccaggctggagtgtggtggcacgatcttggctcactgcaacctttacctcccaggttcaagcgattctcgtgcctcagcctcccaagtagctgggactacaggtgtgtgccgccacactcagctaatttttgtatttttagtagagacggggttttgccacgttggccaggctggtctggaactcctgacctcaagtgatccacccacctcggccgtccaaagtgctgggattacaggcatgaaccactgtgctcggccatgagagcatgtgtaggactccacagcttcagggcaccccagccctctttttgcggtgaggagctgacctccagagagtggaactagtagcattgttctaagtgcctgccacaggcatctgggagatggtccctgtttccatggagctcatagtgggggagagggcagttagaatacagcatgatggccggatgtagtggcccatgcctggaatcccagcactttgagaggctgaggcaggcagatcgcttaagtccaggagttcgagtccagcctgggcaatgtagtgaaaccccatctctacaaaaaatacaaaaattaggcaggtgtggtggcatgtgcctgtagtcccagctacttgggggtggtggcactgagctgggatgggaggatcccttgagcccaagaggtggaggctgtggtgagctgagattgcatcactgcactccagcctaggtgacagaatgagaccctgtctgaaaaaaaaaaaaaaaaaaaaaggatacagctctgatgggcaggaggcatggcgggtcactgaggcgatgcaggtgatccagctgtttctgtggagctgcccctccgtgtttctgtggagctgcctctcttggctccaggtgcctctgggaggaggcaggagcaggggtgactctcagagctgggtgaatcttgggccagcatcatcagatcacacttgcccaggacttcccttccttgagtctccagtggtggtcttgtacctatgagcagggggttaaggagccgagctgatctgagttggagtcctggctctgctgcctaccagtcaaacgagatgcagggcaagttcctcagcccaagcctcagttttcctgactctaaaatgaagagaaccccagatggaagggcttagcctaagacggacatgtctattcccttgattgtggtgttgatgtcacgggcgcatccgcacgccgaaacttgctaaattggacacaaaaaaatatgcgattatttttgtagttgatgaatgtgctgattgggtattctcgtgtgtgtgtgaggtgccaccctcaaactttgttatgatgttggcacattacccatctgatatttaaaaaatgcaatttatgatatgtcaagtagacctcaatagagctgttttaaaacatacaacagaatttcccgcaacccaaccacaccacccgcgccatcacacgcaaacaggggtaggcttccacatatttcctgaatgccttctggagcagggggcaggaggcaggaggcaggacaggtggctctggggctcctggacctcctctgctcagtgaggctgctcacaggagattgggcggctggaaagtaaggtttagggcctctgggatggcccaggctacctgcaggcagctgagtagctctgcttttgcagagtggttcactgcactgtgaaaacagattccagacgccgggaactcacgcctccaatcccaggtactgcccaccttaagtcctccctgcctgccttcctccctccttccctccatcctgcatggccaattgcctggctgcagttgccatggataccacctgctggctccagggttagggctggctgagtcaccagcaactcaggggcagggggttgaatgcccagtagggacgttgtgggcaccgaccagaaccatcttctctgccccagctgcatggtccatgaggtgtttccccttctaagtccaaagggcagcacaggcctgtgagccccggctgactggcaggtgggaccgtgcagcatgcacgggactgaattctcatgtgacggagctccaaagtccacctggctacacggccaggctctgcagcagaggacgggaggcctgggaaaggcacttcctctccccgagcttccaggcacacagagagtgctcaggatagcgatgcctgcatcactgcaatggtgatggccgggtgacccttctgggctccacttccccagtagtgtctaataaagaccctgggtgactctgaccttgtgacgttggtcagactccagtggaaacgttcccaggcagaacaaacatgccctgtacatttgggaaatgcgggatgctggggccaggtgtccacggaggctggaaccaggaggcctgggcccacatctgcccctgctgcttgttgatccgatgaccctgggcaggtgacctcgtctccctaaccctggtttcctgttcagcaaattggacacagtgaagacgcccaagcccagggccacaggaggcatgtgggggaggggggtgcagggcgagcccaagggcagcccaggattcagggagagccctcggggaagaagcatggctgcaaagatcaggagacaggaggccttggcgccttcgggaggcttcattgtgacggagggtggggcaggatgggagaccgcaggcacttcccggctgcagagggcctggctgcagagagccctcgtgcccatctgtccccccgggaagggccgctggttgcagaggtcttaggcctctgcctgtctatcgccttccctccctgggcctcagtttctctacctccacactgggggaagttggtctctgagcccctccaaactgggcattggcagagttgaattcagaggcgctcacatttggagacacgatgtctaaaattccagccagtgaaggttccatggggttgcaggtaggagagggactggggctgggcccctgccccacagcatccttctccacctgcaggtgggcggcggcactgcgtgctggggaagcacagattcttgtgccctctgtgaccttgagcctgccactgacctctctgagccctgctggctgcctccccaataggaatgacaactcctacttcatgaggttgtagtgggggctcaggggcacagggagatcccgctgaggctcccagggccctgcctggtgcttggcaaggagcagttctgatgggggatgtgtcagctgccagaggctcagagccaaggcccctcccacatctcctgcctgcgtgcattcctcacatcctggccttgggccaaactgctcagcctcagccgccttccctcgatgctggaggatcaggtccaagagatgcctctccccgaccagcctaggactgcagtcagcattcccaggccccagtgtggtctgtggggctgtgtgcagagtgtgcgaggtcagggttcccgggggtggcaggcactgaaggtgaacatcctgttcccgaccttcagtggcagcttgcccaggagacaaggctgtccaaggccaaggtcggggctgggctgtctgcaggggctggcggggggcactggctgtctcagggtcactcaggttgttcctcgactcccgccagacgctatgtccagcaaaggctccgtggttctggcctacagtggcggcctggacacctcgtgcatcctcgtgtggctgaaggaacaaggctatgacgtcattgcctatctggtgagggagcgacctgggtgtctgtcttcctgcgtgtcctgcaacctgtcctgtctgccccctgccagcctctgtctgggttgtcagcctgtctgctcaccgtcactcattcaagcctggcctcttctctcgaagcctgtcttgaactggaactaggaaaatagcttctcgttgtactgcctcactttctccatctgcaaattggccatccttgagatgccttccagagccaggtgatggaggcgcggggagggcacagaagtgaacttggcagtgctgctggcttagcctgcttgcagagaggcatgggctgggacctgctgccagccctgggaaggcacacagtcttcccatctccagagtatgctgtcagcctgcagtaattcagcaaagattgtggaatcctgagctggaaggaccctgggggatcacctggttctgggatgggaaataggtcacaggtgatgggttatgtgtgaagccacttcctcatccagggcccataggagtcatccctctcaaactagctcctcttcgactgaacctggccacagctctgagtccttctctgtgtggctgtgctgttcaggactcttaggtgcaaattttagaaactgaactcaaaccaacttacgcaaaaaggaaagggaaaagacaattcttggctcacacaactgagaactccaggggtaggatggcttcaggcagggctggatccaggtgcttctaagatctatctccaactctacttggcttcattcttggcctctccacagggcaggcaaggctcatggtcaccctcatagcccacctttcccaaaaaggagggcttacccccagtagggcccatggggacccaccacgcattagtccctatggctgcatcatggggtgcgaggcttgggccatgagcctactccttcagtgggcgggatttcttcctctccatccctgtggaatggggtccacccaggaaagaaggttctgtttccagaggaagtgagcctgggtctctggacagacaaaacttagctcttgccaaaagtggcttgtttgccggcatattggcatgtctaactgcgcccaatgcccttgtcattcaggttggggaaagtgaggcccaggggaagaaatactttgctcacagtcacctggtgggtgagagcacagctttgaggggctgcaaagagcccagggtgtatccatctcactgtaggtagcacagcggggcaatcagagctggagctgggcgtatagacccctgggctaccacctgggggatttaaaagctgaatgtgattcagataagcacctgcagctgggctttggcaagattccagggtctggtgagccgaatgaagggagtgagggctgaggccaggatctgggcagcaggccagagtccaggcagcaggaaacatggcagtgtctagacaggggctgtcagaccccgaggtcagggcactggccacagggacggagctggaagttcctgagcacgggcttctctgcctcccgcctctcagctgcctcaggatggccaaggcatggcctttgactagggaggagagctggaggctaggaaggccctgacaagctaatctttgcactggctgagaaagagttttctggaaaagacagatgagtttcaggagaaccctagaccttccagcaatgacagcagatggttgtctcccagcagcctgtgtggccagggccaggctcagccaatgctccaacccatggaagccaccagccatcaccacgctacaatccagctcccaatctcacctcctggaagaatctcacctctccaggccttgggctttgtcctttttccttcttactgtgacttggccatggaatggaagctgtctctgtagcagggggtgggaggctgctgcatgcggatggtgtgaactcagggctccccccaggggctgacggagcctctccgcttctgcttctcaggccaacattggccagaaggaagacttcgaggaagccaggaagaaggcactgaagcttggggccaaaaaggtaccaggcgggaggcagggatttgggctgggagtggggcggtgatgtggagggcagtggtggatgctcctgccccagggatcccatcccttccagtgtgtcttcttgcttctaagagtatgagatcatcctgctctcaggtgtgtgaaccctcttgtttttctgcctcccccacgccctcttccacccacccaccttcccatccaggtggagtgtctcttccccacccacataccttcccttctcttttatctctctgtccatctatgcacccactcaccctcttttatctctgtttatctactcgtccacatatccatccatcattcatccctccattagctatccatcgatccatccatccatccattcagccatccatccatccatcacccacccatccattcacccatcatccatccatccatccatccatcacccacccatccattcacccatcatccatccatccatccattcatccattcatccatcatccatccacccatccatccatcacccatccactcatccacccatccattatccatccatccattcatccatccatccatcatccatctatccatctatccatccatcctccgtccattcatccatcatccatccatccattcacccatcatccatccatccatcatccatccattcatccatcatccatccatccatccattcacccatcatccattcatccagccatcatccgtctatccatccatcatccatttattcatccatcatccatccatccatccatcattcttcatccttccatgcatcatccattcatccatccatcatctacccatgcatccatccatcatccatccgtctattcatccatccattcatccatccatcatctatccatccatcccattatccattcacccatccatcccttcattatccatccatccatccacatatccatctgtcattaatccctccactgtctatccatccattcatccagacagccagccattcatctatccatcccccatccatccatccatccttcatccattcaccgtttttctatccatccattcatccatccatccatctgtcatccatcatccatccttctgtccatcatccccctacctgtccttccctcttttatctctctgtctacccattcttccattcattcaacagaatcagagaactccaattgagtctggtgccttgattgtgaatctaggcatgtggcaggcagacccctgtcccatacagggcatttatgatgaacagtgtcatcaggacccctgctcacatgtgctcactccccatggagaagcccttgccacttgtgccccttcatttgggagagtgagcaggggacatagcagggatgatgtgcaaggccaccagcccacctgcagggtcagagctgatcccctctgtggggtgcttctgcagggttgccagggtaattagcatgttaaaatgaacacgggagggagtggatgccccagtcccaagtcacctactggccacaggcctggaactagaatgtccctccttggttctgtgcctcccgagtgctggagagcagaggggttgtctgagcagtagtccaggaaggggagaaagagccctgagtgttgaagattcgagtgcgctttcagcagcgcaggagcaggctttgtgcacggcttcagcttttgtcctttattctagatgagcagttctcaaaacttgtggtcttgggaatcctctacactctaatttacgtggcgtttttaatgtttattttcttgcatataacattaggatgggccaggcacagtggctcacgcctgtaatcccagcactttggcaggctgaggcaggcagatcacctgaggtcaggagttcaagaccagcctggccaacatggtgaaaccctgtctctactaaaaatacaaaaattagctgggcgcgatggtgggtgcctgtaatcccagatgctcgggaggctgaggcaggagagtcgcttgaacccaggaggcggaggttgcagtaagctgaaatcacaccattgcactccatcctgggcaacaacagcaaaactctgtaaaaaaaaccaaccaaccaaccaaacaaacacaaaaacacatttatcctaatgttttttatatatccttagtcccaattgctttcttttctatgcctttttatttcattttttaaaaggatttttttcaaaataattatagacacaggaagttgcaaaagcagtaccaagaatttctcgactcttaaaaattattgaaggccttggctgggtgcggtggctcacgcttgtaatcctagcactttgggaggctgaagtgggcagatctcttgaggtcaggagtttgagaccagcctggccaaccagcctagtttctttagtagagaaaccccacatgcctgtagtcccagccactcgggaggctgaggcaggagaatcacttgaacccggaaggcagaggttacagtgagccaagattgcacctctgcactccagtctggatgacagagagtccatctcaaaaaaataaaaattactgaaggccttagagagcttttgtggattacatctgttgatatttatcacattagaaataaaagctgaaatgttttaaatgaacagttcatgttaacataagtaacattacacttatgaaaaataactattttctcaaacaaaaaattttagttaagaatcttattggcttccatttttgcaaatctctgtaatgtctggcttgacagaaaacagatggactcttgtagcggttttctgcattcacttgttttttcgtttgtttgtttgtttttcttttttagcctcccagggcttcctcgctatgtgatgccttgttttattgaagtttatgaagaaaactgggcaacacagtgagatcccatctctacaaaaaataaaaaacttagccgggcgtggtagcacatgcccgtagtcccagctactcaagaggctgaggtgggaggattgcttgaacccaggaggttgaggctgcagtgagctaggatcacaccactgcactccagtctggatgacagagaaagaccctgtctcaaaaaaacaaaaaaaaagttttcactcagtgtctccctgaaaagtcattgggaacccctgggggtctacatttcaagaaccattcctctggatcggggtttctcagtcttggccttgttcccgtgtggctggccgtcctgtgcacgggaggattttagcagtatccccatagcctttacccactagatgccagaattccaccccccacctggtagttgtggcaaccaaaaatatctccagatacttccaaatgcctcccctactcccacccccaacagggacaaaaccgtctctggttgggaactactgctgtgagatcttaggtgacaactaagtttcatcttgttggggctgatttagaagccacatccagtttcacagaacggtgcatcaggattgattagcaggctggccgcggtggcttgtgcctgtaatcccagcactttgggaggccgaggcagctggatcacctgaggtcaggggttcaagaccaacctggccaacatggtgaaaccccgtctctaccaaaaatacaaaaattagcaagccatggtggcatgcgcctgtaatcccagctactcaagaggctgaggcaggggagttgcttgaacctgggagacggaggttgcagtgagttgagactgagccactgcactccaacctgggcaacagagcaagacttcgactcaaaaaaaaaaaaaaaaagagagctattgattagcaatgtctgccatgagtgcaggagggagagtaacagtgcagtgtgctgggattgatgaatgatgtctactacagatgcagaagaagaagcaccaggtacagcgggggtggccccgtataggtctcagctagctgaggcccctggggctctgtatgccagatggcccctgtccttgcctacttcttccttctgggctcctcttcccgtaggtgttcattgaggatgtcagcagggagtttgtggaggagttcatctggccggccatccagtccagcgcactgtatgaggaccgctacctcctgggcacctctcttgccaggccctgcatcgcccgcaaacaagtggaaatcgcccagcgggagggggccaagtatgtgtcccacggcgccacaggaaaggtgaggcacctgggaagggccgggcagagggagatggaggcggaggggtgtgggaaggagatgagcacccctcgagcggtttcctggtgtgcctccggggcagacttggtgcaaggcagctacatggctttgtttagaccccaatgagaggggtaacagctcgcccctgcgctctgtgcactgtggcacctgaacgcccattctgagtcctcacctccaccttctgctgtgggagcgatgtcaccccatttggcagacttgctgctgaggcctggggacattgtccaaggtcgcattggccaaggtcactgcgtgagtcccccaggggacacgcaggaaagtgttgaaaaccctgagttggcagagtagggttcaaaggcagctctgctgctggcttgccgtgtgtcctcagccagggcccttctccccttcctgaacctcagtttcttcatttgcaagatggggctcatgccatgtcttagtttcccagggcgagggtaacaaaatgtctcaaactggtggcttagaacacagaactgttctgcctcatggttctggaggcctgaggtccatagtgagggcatgggcagggccacgcagcctctgaaggtgccaggaagcctccggctcaggcctctctccagcttccagtggcctctggtgtcccttagcgtgtggctgcgtcactcctgtccttccgtcctccatcttcccaagctgtcttcttcctgtatctctgcattgtcttccctctgcttgtctgtttaccttccccttgctacaggaacccgtcttggattagggcccttcaatgacctcatcttaacttggttactttttgtgtgtgtgtgtgggggagagggacaaagtctcactctgacgcccaggctggagtgcagtggctcgatcttggctcactgcaacctctgcctcccagattgaagcaattctcctgcctcagcctcctgagtagctgggattacaggtgtgtaccccaccacacccggctaattttttgtatttttagtagagacggggtttcgccatgttgggcaggctggtcttgaactcctgacctcaaatgatccaccagccttggcctcccaaagcactgggattacaggcgtgggccaccatgcccagccttaacttggttatttctgttaagaccacatgaggccacattcggagggactggggttaggacttgaacccattattttgtggaaacacaaatcaacccatcccgtaccccttccctccgggccgtgtgtcccagtgcagactgcggggtccccgtggggtgcaagacaggaagccccctgcctgctgctcttcggaaggcagtccttgagaaaccagattcctgacaatgttggcaactgtcagccgatgtttttataaagacccaagtcatgagctctcagtcagcggacagcatgccaagagcctggtacaggaattgactgtttaccaaccccacagtcagaaggctcggaaactccccagtgacggggagctcactacctcgcctgcccgggctggtcagggtgctgatggtgggaagtcctggctcactgtgggaggtcctggctcactgtggtgcagggacacacacagctaagatgatgatggaggagacgcggttgatttgagggtggcctgggagacagccacccaccaggatggcacctgtcatgtctttgaaagtccaagtgttcatttcttcaccggagcactggttcagcaagcttgcactgggtatctgctgggagttgggtgcttgctggcattggcacagtgctaacttcttgggctcattgcgtaccttcagagagcccatttcctggcaagagaagagaaaatggatgtgtgatgaggaatgggagtggggccaggggtctgtgccagggaactgcgggagcagcaggcaggggctgaggatgagtctagaggagtgaataatggcatggaagagtgtgagaggcagagggaacagcctgtggaaaggcttagagccaagaggccctgaaggacagtctgtctggggctgtggagcaggagctattgctgtgggggaggcaatagggccaggactgggctgaggccatgctgggaggtttggcttcatcctgagggcaactgattagtgggtggaaggaggtctcaggttggatggaggtggccagtgactaccccagcgagatgctggggaagagacaggggagagcttctcacagactgcggccttggtttttactgtcactccagctgtggatgatgggatggtaggaaaccaggcaaggaggtttgggcgggcctgagctgttgggcaggaccgtgtgtatgctgccatctgtgcaaaggtggtggcagaggaggagaacccagaggatcaggactgggcgacacagcgagactctgtcccaaacaaaaaaaaaagctcccgacccatctgccttaatggaaagagctggatcgtgagcttcctatcccagaaggcatacaagccgagggcaggggatcagaattctgggaggggtcctgccctcaggtctttccaacggtaccattaaggttcagtagggcggcattcaggtctggtggagtgcatgggtgggtgggtgagtatgggtgggtcggctctggctcaggcagttcccgggtccatgcggagacccccaccccggaccagcccacatttagcctgcaacagcctcccgcagccgtgtgcgcccctcctccatgtggccaccagagggcgccagaggcttgggtttgaggccttgggggccgacaaaggcgggaggaggtggcggcaccaccggggtcctctgttccccatcctggacctgcagggcgtggttctgaggagaacgccccccaagctagtgctatggccgctcgggacttgggggcgtccctgcattcacactcagaagacccaacagggacggactccggggatgccggggagtaggtgctacctggcacagccacctctttcctggggttgacaggcaaggcgtacttctgcgcctcagtgtccctttatgacagtacccaggaaacccccaacagcctctggagacaatttccgagaactgggggtatgagtggagaaccaggaaggctgggagcgaggggaatccaaggccttggaggtgctggtccagccttcaggcatttaccccctgagtaaccacccagcaccaccatcccatgagtatccacccagcactgccccgggcgccatcacgggggacgggccaggtggaggctttcgggtctttgggctcagggaaggtgacagtgaaatgttggggggacaacggattggcctgggatgtgagggggaagggcatcctgtttgctggaaccgcctgagcccagccctgaaggcagaggcggaggcagcctcccttcccagcaccccgtccagacagcacctggtgcagaaattgagccgcactctcccctcccatgccctgctgccagccccacccctgcccacccagagagctgcaccgaagctggggtggcccttgcggggctcctctctccccctagttttggaagaggggcctggaaatatgattctgagactctagccggggagcgagagttttgtaaatggcaccatctgtatgggtgccccagggcagatgggagaccccaggccccccagtcccagtgggaccgtgtttacatgcatgtttacacacgtgtgcacaaatatcagcatgcggacactcgtgtgtgagacactacatcctccttctccccggaaagctgccaggagctgccctggtgctggggtcttggggttcagagggggaaggattagactggcctccttggctcttgcctgagacgagggcagagtttgaaccaaggaagcgtttgtttggcctcttcgagggtctctggctcctgaacagatgggtgtccgcatggcagcatctggatgggcagacagcagcccagccgtgcctggctggtgaggcacaagccgtctttgtgttggggaaacatgaagctgtgggggaaaatagctgggccatgcaacgtcggaccatgccttaccatctaaaatgaggctgtcttttagttgctccaggaacggggccggctgggggtcagcaggcaaatgtggccgcccccacctcagtgtcctcatccgtaagatgggactaatagaacctgcctcctggggctgctcaaaggattcagtgagttaattatgcatggagctcagctgggaagcctgagtgtgaaccgttaggatgagcgagtttgctgtgtggccctgggcaagtggctgcacctctctgagcttcactttcctcacccataaaatatggctaaaaatccccctggccctgggggcctctctgagtgacagcacatagtaggtgctcactaaaggggctgcatggagggtgagtgaggccagcccaaggcctgtgccgcacacacagctcccagctctgcagagaggctgaaccctggattctgtgccacctgacgagagtctggaaaatagcatgtaattcccaccgctgcctggctgcgcccatgcagttttcacagtaggcaaaaggtccctctgtcatttccacagcgcttaagtctccctctgggctgccgagcccacggggaagcaggagacgtgcgcggccattttctctctggggacagagctgggctggcggatgcctgcgctgaccccggcctcctcctcctcggcatcagtgtggacggtggtcccggctatgtcgggggtaacgttcacagctcagtggggtgttgaggtgtctccatttgcccacagaggatgcaggcgaggcaacctgcccgagggggtggctgtggtgctggggacctgggcttgggtcccgggcctgccctggctgtgtgtccttggactggttcctttcccttcctgggcctcagtttccctctctgtgcagagaagagctgaggagcaaaaggccctcagtggtcacctagttccacctcctccctgacaccagccattgaagagatgcggaaactgaggctcagagaggtgacagggttcccaaatgtatgggtatgggggagtccaagcaccctggtgccccagccctgaagtgagcttgatttggggcagggcagggtcagcaatgtgggggccttgaggaagagactatagtgcgagctctggggctgcaggagcagggcctggccccccaggtcttgccagtggctgggcctccagctccagggggtcagatgtgtcctgcacccacccacgtgacatgtgtgccctctcctatactctgccatgtccccagacgtgcacatctccctcctgccacatgcccacacatacacgacctacactgcatgacctcacatgtgtacacgctctgcccagctctgtctccgccacgggctgtccttgtcctcacgtcctcccccagactccagaacccccatcctgtggctcctgacagccctctgttctgcattgcaggggaacgatcaggtccggtttgagctcagctgctactcactggccccccagataaaggtaggatgtggctcctccccttagcagggagcactagcatctgcagcacctgatggggaggagggcacagggttctgggagattccacaggacaggcacagaatctcctccgtggcaggggtgcccatcgggtggacagcctgctggggaggctcccttcgctggggccagctccaggggacacactttcttccccgccattcattcttcccggagaggctgtccaggtgctggggcacgggatagaaagtccctgccactcttcagccacatccctggcatcccaggtgtgggcaggcatggctctggcaccccaggtgcgggcagggatggctctggcaccccaggtgcgggtggggatggctctgaaacgtggttgctggtgtctgggatgctcagagccctccgagccccagtcagagcccccagctatgcctggctcctccccaggccacctgtgcctggtccccagcatctcttgagcctttcctggggtgggaatcaccaggatctcagggcctcaaccgccctggcccgtggcatgtcacccaggcaggagggcacctgtgggtattgcccagactgctactaccatccccacccctccagcttgaccttggacctggcctgcgtccatgcatgaatgatggacacgttccttccttcactcgctagctcatccttcatccagtgtctactgagcacccactcagctccaggggtgccgagtgcagggcccagggcagggccgagcagtgggagtttgaggcacactgccgctgcaagctgcccaatttttctagtagccatatatataatatataaatatttttatataatatgtattacatataaatacatatgttttatatatatatatatatatatattttttttttttctttttctggagactcgctctgtcacccaggctggagtgcagtggcacaatctcactgcaacctctgcctcccaagttcaagcaattctccctgactcagctcctgaataactgggactataggcatgcgccaccacacctggggtttcagcattttggccaggctggtcttgaactcctgacctcgtgatctgcccgccttgggctcccaaagtgctgggattacaggcgtgagccactgcacccggctgtagtagccatattaaaaaatagaaaaatgaaacaagtgacatgattttaataacatgttttaccgaaaccgatatatccaaaatattatcattcctcctataatcaatgtaaaaaaataattattaatgtttacattcttttttcttctgtgttgagtctgcaagacccagaatgtgctgcatgcaggcatgtctcgctagctggctggatttcaggtgctctgaatggccacccgtggcttgtggccacctgtgggcagcacaggccgggactgagctcttttgaggccgctttgggctcaagctctggaagagttgccccctcctaagcccccaaggggctcacaggagtttccattttgttctttctaagaggaatctctttccccgtccctttaaccagctggtagctcttgggatgcgtggcctggaggtgagccgtaatgagctctaatgatctgttttgaccccagacaccaggcagctcagtggctgggacagtagctgcttgttgacttgctgccagcgaggccgcaggacggggccctccctcggttcccacagcagcttgtggggccagggtgtccagtttcgaggtctttgtctgcagaggccaagcccaggcactgagatgggattggggcaggggccaagctgctccaggagctgggagtagggctgtggtcttcccatggctgctctgaggggctgaggaggtggcgggccccttccattgccctgcaccactgtcagctccacggcccagcagccaaatgacatctccacccccacacacacatgcccccgagtcctgctcagaggcaggggcctggtgagctccagggctgagtcgggggctctttttaccagctcaggccgaggggctcaaggggaatgagcttggtccctcagccaggctcagagtcttcccccacttctttcccttccacacccagagaagtgggtggggggcagcctatgcctctctgggcccccgaccacacgtggggccaggccagcagcggcagctctgtggactctccctgggtcacggcagtggccctgtggctgaaggtgctggcaaggaccatgaaccccgtctagttcaaactctcaggtctcatctggggagactgaggcccagggaacagggacccccttctcaccccaacacaccaccattctgccatggagtgcaggctccgtccagccagccccggtgagggagtctgtgtccttcccctccttcatggggctccctctcaccctcacaacagcatcctctctggggacatgctggagacccccatgggcccctcccaggagaggccagctctgcagcttacaggccaggggaagcccacagctcggccctcccggctctgaccccttgtcctatgtccaggtcattgctccctggaggatgcctgaattctacaaccggttcaagggccgcaatgacctgatggagtacgcaaaggtatggccgagtctccccaccacccccaacctttccctatagcccccttcccgggcacgtccctgctgggggctgtctgagccagtggcctaggccgggactgaccccatgtgatgggggattgaacttccaccccagctgcctacacacgtggcctctgtcccctgggctgaccccacagaggtgtggtcatctgccagcccgttgccagggcggagccgctctgaggccatttcccagtcccccgagccagaggacacagggctcactctctctcctgctccctgggaggcggagaccagagccctgcttgccacctccgcagtgtgtgtgtcttggtgtgtgtcacttggggggatggctgggggatgtgatggccggccggggggatgtgatcgggagctgttctcccaattccctggatactaattgcccctagcgctttccccgggaacaggtaggcgctccaagggacagtcgcagacaaagccttttatggcaccagccctttttgaagtacaagttgcaataaaacatattagaagttttgcatcaagatccttagccgctccccagggcacctttctttttagcgactcgatggcagcccttgacaaacagcctcaatcaatcaggccggggaaaagcaactcagcgcacacaccagaaaattgctcaggtttttaaatagcagtcgccaaggctggctgtgagctctcgctgcagccaaggtgccgcgtggtaggggaggcggcagggacgcagccctgcccccgccgccagcaacccattaagacctggagtgctgggagggaagaccttctccaccatctgttgttttattattaagaggggagtttacaagagcaagcccatatgttgccaaacaaattgtcaaatagcagagctattaagggagccgggttggtgaggtttctcccctggtctccttgatgatatagaatatgaagcgtgtttcatctttaagaataatgaattggagcccccacccagctctaccctcacgcctcgagtcctggatagagaggggcagggccgacccatacgttgccctttctttccgttaagtccccagacaaaagcagcttctggtttttctagcatagatgagtctcaggagcacactgctgtccttccttctcaggttttgaggagaaggtgctgagctcagcttccatcccaaataaccttttgagccggaaaagtttgccagggaaagatgagcatggccccctcggccacctaccctctcctggagatgggtttcatcagaaatgactgtggggaatctgagcacgttctagaaggaggcagaggcagtgtttctgcacccaggaaatgtcagaatgactgagcagtgatgaggcctcctccaaaattctgagccaggcaggatctgagatggatgacacaaaaatcaatggggctttcaaaaatctctgctttcaagacgcttcggtagccaaggcaaaaaggcgccagaggactcataaaaaacatgcatttgcttcgctggccatcctctcccaacccatcgtccaacggaaaaacactcagaaccaccccatccttgtcactgtcaccataatttaaaaaaaaattttttttagagacagtgtctcactctgtcacccaggttggagtgcagtggcacaatcctagctcattgcagcctcaacctcctgggctcatctgaccctcctacctcagcctcctgagtagctggaactacaaacgtgccctagtacatctggctaatttttgtttttcatatatttatttatttatttttttacagacagggtctcaccatgttgcccaggctggtcttgaactcctgaactcaagtaatccaccctccttggcctccccaaagtattgggattgcaggtgtgagccaccacacccagctttggctaatttttaaatttttttttgtagagacagggtcttgctatactgcccagcctggctataattattatttttaaagccagactacaaggtgggagctagaaacaggatggtctcacgttgtctacatgttggagatcgttttgttttttctcctcaattacaatgagagtgtgaggggaggcacctcgggaccgagagaggctgggaaacacaaatctctttggtcttgggagggtcattgtcattggcccctgttgctttcctccccgccctttagcctctccttgctcctggacggaggtccgctgagaagggaggcaaaggttctttcacgccaccgcccaaaaacagaggctccacggagcctggccggctgctcttcttagcacccagctgctgagctgagtgaggagcgaggacggagcccagcaggccaccaggacatctctgctggagagtccagtcttgccttgcacagggtccgggtacccatgcctggccaagggcacagggcgagtgtgtgggctgaagagtcttcaaattctagagtagatcgtgggctgtgttttgtttttttaaatttcagttttcacgtgtaatatggtaactgttgatgagataatctacacaaactaaggctcttaggggcccttagtgattttttctttctcttcttttttttttcttttttgagatagagtctcactctgtcacccaagctggggtgcaatggcactatctcagctcactgcagcctctgcctcccaagttcaagtgatgctcctacctcagtctcccaagtagctgggactacaggcgcctgccaccatgccaggctaatttttgttatctttagtagagataaggttttaccatgttggccagactggtcttgaactcctgacctcaagtgagccactgcacctggccttgtaggctgttttaaaatgagtctcctggctttctagaaaaccccgaaaccagagcatttagcctcattttaatgttaaggtggtgatggggaaacagctgctccctgcaggaggcctctagaatctcaccatcttgggaatgagcctgagtggggtcgatcccatcaggagagagatgggagggtgacccggtgggggctgcctgtggttcccacagggatccagtggggctgaggggctgaaggggctcagaggcagagcatccagtctcgctggctctgaggggctgggtggggccccttcagtgcaccctgtgccctataagcttggggccaggagagcagtgccaggtgtccgagtgcaggaggaggctggagtgcacgagctggattccagtcgggcgtcatcaagggtggtgcgggtccccagggcgacaagcctcatcttcttcctcctcttaaggctgagtcaggtgggccttccatgcgtgacctgcagccctcttagcctgggcctcctgggcagaggtgggtgtcctcctgtaacaacagactgggccatttaggaagcgaaacagagccagagccgagtgccttggagacgggatctgctgggtgttccccttctagggtctgcagagtgatgtgtgtggctgttgcgccaggcccagggaggggtgcccccagaaggtgtgggccatgagctaaaagctctccctgcatcctacctgtcctggggtccacaggaagcactgcctgggctctggtgccaggtgccccggtccacagtgcgagcgggttcacacaagccccagctcgtagggtggtggcggggctggttggctggtgccgggagacctggctgggcatggcacctgcgtgcttgctcagtgcttcaggggtccttgagatgtagactcaaagtcttctggaaggaacctccaaggtcagcattgcagacacacggtcctgcagtttctctggggcatgtccagcaatagggtccccccagggaggtgaccgtgaccaacactaggaggtagccagggtcttgtctgaatgggggccagagtttggggctctctgaaaaagcagggcccctgggacggacctcacgcgtccttccagccgccttacctccacctgtgctgtctctttcctgcagcaacacgggattcccatcccggtcactcccaagaacccgtggagcatggatgagaacctcatgcacatcaggtaaatcccaccctccacccatccttggtcctcccgggctcattccaaaggacggccacgcgctgccccaggacgtcctggtgacccccacaccagtggtccctgccctcggggagctgagaggcctcaggcaggacagaggtcgaagcgcccggctcatgcactgccctcattgcagttctgctgagtgttgttggggagatagatcatggggacccggcctcatcaggagtatcaaggagggcttcttagaggaggtggcattcaaggatggagaagaggcccagatgtggcacaggggaagagtgtttaaggcagaggcagaggcccccccaaccacgtgcagagccccggggcagtccccagaagacaggtaaaggccccagctctttcttacaacctgcagctccacgggtgactatggtgggcccagaatgtttcaggcaggttggcagcagatgctctggcagagagtaaaaggcagaccaggctcatgggcacaatggggtgtgtgtgttgggggatggggacatgccatgtccctccccagctgaccctgtctttcctttcccctccgcagctacgaggctggaatcctggagaaccccaaggtaatcccccaaaccccatctcctcccagctggccacctttggtggtagcagctccatgccgatgctgtctgatgtatttatagcctaatttgaaatttcacgggggccagccgtggggctggggccgagccctgcctgtgttccccgacccccgcactggcccccctctgcccaccgtctcctcgctgcatttgaagacctccccccgcccttcctcttctaattgcctctgggatgaacaggggaaggaaatatctcagggcagcatagagagagagtgtgattgtgagacaataaagaagtaattaggcagatgagacacttgggggagggcccagcctgtgcccaccagctcccaggctgtgctgctggagttttggttgtggggggtggggggaggcatggctgagagccctaggccccatttgtctggatccgtgttgcacacccgccaccaccggccaccctgatccggtcccaagcttcccgggcgggctggactgggccctcagctctgtttgaagtttcgggtttctctcccgggggtagggggcttctttgtgtctacccctgcccactgtgggaggtgggggaggcagggccaaatctatcatgggaagagaaaaatctctttgtccctgagggaatgtgtcttagttcccgggcccagccccacaccccggggaggctggtttggaggcgggaaaagtgtgctttttgaggggatgcagctgggcctgggggaatcaagaagaccagctggaggggagggtgcccggggaggtttggtgaaattggggagcgccagagccccgcccaggatcccccagggcccgggcgtctgtcactctcacgcccgcgtgccgccccctggtcggtgttggctgtaatatcacatggcagccaccatgtctggggagcgggccgggggtggcattgtcctggctcagttcctaggacactggctgggagcatcctcactttatggttgaggaaactgaggcccgggcaccggctgctcagggcgagggaacgggccctggggctggtgccctccagctctgtggctcccctactgcccacggcccctccctgtccaaacctgtcactcaggagagctgccacccttgccccctgggggctgatggcccctgtgtgtggctgctgcctgctggtcacaggtttttctagttcatgctctgctgaccccacaacactcaggccagccaccctaattagccagtcagtcagctccaagggaggcagggaggccgagcctgcagggtggcttccaggcagggcatcctctcaggcccgtgggccccaagcatgctgggcaaccactcccggccattctccaagcagcctatggcctctgcaagcagcctatgggggcagagaggaggcccccccagaatagaggacctcaggattgagaaagcagagcaaggccagagggaaatcaccccctcggaccgtgcaggagggcatccggggcctggagcaggttactgagctacggtgggcaggtcctgcgccctcccaggcctcctgtctcatgagggcattgggtggagaagtcagtactaaagagaatctggattaaggatcctgctacctcacccacacttgggtcccagagacaggaaacccgagtctaaatcccaacttttcttcttattgctgtgcaacctcgagcaagttacccaacctctctgagcctccagtactccttgcccaaagtgggaaaacacagcacctccctcctagggcatctaaagcgcttggcctgtctcagggcaagccctcagtcatgcagctgggggtcccatgctacctcttcatgggaggaagggtccaaggtcctctcagggacccctctcaagaaaggctgggctgggctaagctgggtgtgagtcaggggaaacatcgttcctgctgagaggcccggggcacccagagtcccacccaggcacccagagtcccacccaggcacccagagtccagtcactctggaaagaagtttgccccagccatgcagactccccaagggctttgtgctgagggtggggctcaacgtcaggacgcacccttgcatccctggacctggcagccctgtccccctcgggatgagctcaggggaacagagcctggggaacccgtgcccctccccctctccaaaagaagccaggagacctgcggaagggagggcttgaaggcagatggctgagccattttctgcctccgtgagggctgattgaagggcaatgaggcagctaatgcgaagaaagatagaaatttacttgctttaacttcatacggtccacagtgaaagagttcattcagtcgccggcccgccatagctgatggatgaataaaccatttgcggcatcgatcatgcctctacatcatggtttagttcatgggccatttgcttccaatttctccttctcggggcctgtttcatgctttctttcgccctctccccctagcccccaccccgactctctctctctctttttcttcactctcttccctcccccgcacccccccccccccacagatgacattggaagtgagccctcccgctgggagggataaatagatggcattgatacttggcaacaaactatttgtcattagaactgggcttttaggaaggagagtaaaaagaaggcaggcgctcgagccaccgcggaatgcaaagcaaatgtcattttatttctatttagttattttatttaatcggcgctgtcaggtgcctgcccgacagctgcctctgacttccgctgcggtctgcagaaactcgtcctccagtcttcccatcccctctccttccaaatgcacacactgtcagcctccacttcggtctggggctccctcaggaagtgtggcgggagagaaagtgacaagcaacgcattgaaaacagttgacagtcgggcccagcgcaggtggaggtgggagagagctgggcttgggtgggagtggggccctcgtaccggcaccctggttggaggcttgggggagtcccaggcagctggagatggggctgtggagttgtgtggtcaccccaagatccagtccagttcactttacctttttgctgaggatgagccttgggacccgtctgtgcccagggaatgctgcagttggcagggtgggccagccctgatgcctacctgtggctgtgatgctggctggctctggccacaggcctcaccctgtttctcagcccaggttactacagcagctgggaaccagcataaggtggcggaaagagtccctgtgtttagcttccaaagcatggtttggagaagccacctctcagccttggctttccctgtggtccatagaggcatcaggctgggggtccctcagggcccctcctacctcctggagtctgtcttcagggaaggttctgggttcttgttcctgccccacaaatgggcactgatgcagggatacagctggccctgagtcacatcgtaccttggaggtgggggtggaggatccaccacagtccctgtcttagaaggatcaattgtcctggtttgcccaggactaagaggtttcttgggacaaaggactttcagtgctaaaaccaggagaaatcagggcacttggtcactctaacacagagccacaggcaaatgaccacaggtgagcttccaaggcacttatgtagccccatcccatgcagaatgaggaggaggctgggccgagcatgtacccccagagtgaatttcagctgccctttccacctgcagagcatgttcccgtttgtaccaggccttccctgacattttcctgtgtgttttcatgtccaattaaaaaatatatatatactacttaaattgtaagatggccaagggcaggtatcattttccccattttacagatgaggaaactgaggctggaggaagtgaagcttccccaaggccccccagcctgagctcttgatcctggcacggggtaatgcccatcactctaaaatacaatgtgtatttggcgaggacctcgcggggctcctgtcctgagtgccagggaacaagtcccacgtggtctctgcctgcacagaactcacagttgtagctccagtccctcccgctcagcctcaatttcttcatctgttgatggggtaagagcgcttgaccttcttaccaaatggggctgctgagaactcagactgcagatgggaagcaatacgtgaatgtgtgcaaggtgttttttttttttttttttttggtgggggggtgggggacggaatcttgctctctcacccaggctggagtgcagtggtgcaatctcggctcactgcaacctccgcctcccaggttcaagcaattctcctgcctcagcctcctgagtagctgggactacaggcgcatgccgccatacccggataatttcttttgtattttagtagagatggggtttcaccgcgttgcccaggctggtgtcgaactcctgagctcaggcagtccacccacctcagcctcccaaagtgctaggattacaggtgtgagccactgtgcccagccgtctgcaaggtttttaaagcaaagatgagacagcagttcctggatgtcagcaggtgaacaaggaccccaggcacaggatgcccacaggagggacctgagcagtcaggcccaagaggccccagtccccacagtggcaaatgtccaagccacggcctgggggagctggggcctccgaaggtgggagggaatttcgagagtttcaggcaacacgcagcccctccaccactgcatcagacgagaggcccattttccaacacgcccaagaaaaaatatacataaaggttgatgtgttttcaaatgggtttttgctttgctcttctcttttctccctgtgagtattaaccttggggaccctggggacggctcggcttgccagagcacctgctggggtcacaggcagtcattagctttgcggtcagtgcagaataaaccccaatcccgagccggcgagagcgtgcgtgccgctcctgggaagccctcggaacgccgccttgctcctccaaagtcacactttttcctgcctgacttgttcctctccagctattctacctccagctgtgggggcgtcgaagaaaaagatgagatcaagttgaggggaaaaattgtctgatttctccagccctttgtttcccaggcctctggcaagcgaggctggtgctaggctgagggctggggaccgggggatctgccggaccccaccagctggtggggaaatggacagaggagaggggtgcagatccccgcgggaggtgggctgtagggtgtccagggactggtatgtcatctgcccaccactttctgtcttttttcagaaccaagcgcctccaggtctctacacgaagacccaggacccagccaaagcccccaacacccctgacattctcgagatcgagttcaaaaaaggtatgtgcccacctgttgggactcgaagggggttgacttttggggccctggctcctttcccctccctgcctgggaacctaggccctctttacccccgccctgcattcctggaagctagagttcaggcaggggcttcaaggtaacgcacagcccacctccctggacagtacaacccatggaccatggatgcctctaggcttgggaggaacatgccctcggctacccatcactcgggttcatgggcaccaggtctggaatgagagcgctctagtccctgaacagccactcaactttcctgggcctcagtttcctcagctgtatctgaggatgaaagagtgcctgctgttttcctggggtagaatgaggcctgcaagggagcgtccagccctgggccctgaccccggaaggtgctcagtaaacggtgagtgttggcgagctggcctcatggacccctgggaccccacatggaaagccttcgccagtcttcattgagccgctctgggcctcaccctgctgaccccacgttcaaagctgcggccactcttgctcccctcggcagtggaggctgtcctgatcgctccctccttctcactgctgtcaacaagaagcgtttgctgacctggcctgagtgcctgggtgcctgagcttgggagagggcatctcttggcctggaggaaggatggagaagcgaggcatgcccgcctgggctcagagggagggctcagagggcgggctcagagggcctgaaggggtaccttttcaggaggctggagtgatcagggaggcttcctggaggaggtggtgctgggcacaggggcacccaaggaccaggcggggggctggcccattcgtccacaaagtggctgcccacactggagctgggatgagagggagagaggctcgtggagaggcctggcccggctctggcgctcggctcttaccccggctaccacagaaaggaggatagggtggggaagcctcaggccggtggggaggcagagctgcagatccccctctcccccttgctggtgtgaccttgacagccagcttcaccatgctgggccttgggtgcactcatcaaaaaacggaccacaggcatgatgctcacaggtgcccggcatggtatgtggaatggggtgtcggaggctaagtgctttaataatctgcctcttctgggcctttcccaagagcttggccaagccagcgactgtcttccttgctccccttcatctgtcccaacctactggggggccaaagaggaccccaaaggcagccgggcccccaggcctgtttgcaggcacagagcctccctttaggatcatctctgagaagatggtgggagtggccccagcagcacctcctggctccctgcacagggctcccaggagcctggagagccgtgagggtgggaggcgggtggcaggctgcggagggtcctgggcaccaggctctggcagccctgcccgaggaccagggcagctccgcaggctgagctggagaagaaacgtgacctattgtcatgatttggggactgtctggaagaagaaaaaaagaccggaggaaccctcccctggctagtgcccattcactctctagttaatttatttgaagttttaatctaattattaactattttaaaggctaagaggctttctccagcagcagcaccaacaatgtcacctcttctcccgggcaggccccatctaaggccccagcgaaggccgataataggaccggggagggagagaaagggagagaggagaggcggggggtggtgagaggggcttaaggttcattattgggcagacttacatttaatagcaatttacaaccaagttataaaacccctggaaatgggggttaagaatggcgaggctgacagcgccttgagtgaagcccctccaagcggcgcctggctaataaagcctcgaaagccgctattgaggcctgattggcacccgatggctcgctccatggtaatgagccgggcagatgggtgggggattagccgccaactttgaacagcttttctttgtcactgtttcagctctcttgttagccccaatacatttattgctcatttcacaccgctcgagaaagtgccccttgctattcaaagtcaaccccgaacccacccactgcccccacccaaccccttccctcctgccaccccggacccagctcctcggattcagggacgctgccgacacctcgcctgctggagcgggcaccgtgtcacccccatcaatcagatggctgcgtgtgggtctggggtacagggtcggggcgcggggtccgcctgacagacgtggcagggggctgtgtgtgtgtgtgtgtgtgtgtgagcgagtatgtgtgtgcttgagcccagccacacctcggccaggcggcccccgggtgactggtgggacagaaggtgctcccggcgtaagacaatggtggagcgtgaaattcaattagttcagggcctggttccaatttcacagcccctaaatgcaaaaggggcaaagagaatgggagggtgggggagagcgtttttattgcattttctctttcattctggggggctttctcgccccttctctccctgcagcaggcctcaacctgcacagggcttttgaaggagtcatttggagtccatatctgtcacatccatttaaggcgtttcgggaggagggagagggtggggtggcgggtgcagactcctccgctgagccgggcccagaggcccactgccctctcttcccaccctaggggtccctgtgaaggtgaccaacgtcaaggatggcaccacccaccagacctccttggagctcttcatgtacctgaacgaagtcgcgtgagtgtctgcagccctgtccggcctcttgggaaccgccgtctcgggcgagcacgagcctggaccgttgcagctaatggttgtggctgaggctcaggggtgcggagcacaggccatgtcccttccccatagccacagagtttcccggaccagggggacccatttggcaggagaggctccgtggtccttagccttggaagataacaaccccaggaggtctcctgcctccaagggatcattaggccggggctctcaggcccttggctggatgggaggccaggatagaaggaaagggagcagtagttagctgtggcgctaggcagggccccaggacacagggaacggaaggaacaatgtgaactcacacctgggcaatccctgctctctctgggcctcagtttccccacctgtccagtgggcacctggactaggtgacccggctcagatgtcctcttgagtcttagatcctgaaatgctgcctaatgtgtggcctaagctgtgcccaccctgggacagcccagctgggtgggtgactctgagccttgcggtagcgcccgaacctaatggaccagttcttcccacaggggcaagcatggcgtgggccgtattgacatcgtggagaaccgcttcattggaatgaagtcccgaggtgagtctgctcagcctccctcagggcctgcctcgggacccagcaaacccagagatccctgagaccctgtcccctttggacgctactacccccatgctccgtgggcgaccttgggcacgtcctttcaccacaccccgtgagaccgcagtttccctcctgccaagtggggatcgtgggccctttgcccctgactttcagggtgttatgagaagagctgtccaagggctgggagaggcccaggagggcctggggagtctccgaggagcagggaggccagggccaggcctggaggtcaggctgtcttgtgtctggggtgggcaggccgggtgtggaggcagaccgtgcaggcccgatttcgtggtcattaaggccgcatggaggccgccggccaggcagggcgaaaatcctgccaggggtgggcgctgtggctgcacaggcactgggagccggccagggcctaaggacctgtcccagcatcaggcacggctcactggcccttttctccagggatggggctgtgccacagttggggctgtgccgcagttgaggctgagcttcagtgtgacatgcctgccacctcggctggcctctagcctgcctagcctcgtatccgcctgtggctgggcccaggagcagggcagttggtccccaagcaggtgcctctgtcttctcttagtagccaaagcccatgattccctttgtcagccaatcagcatttcatcttgaccacaaccctcctctccaggactcagtttccccattcatacaccaaggggatctcagctccctgagggtctgccagtgtgtgataaagccatgctgtgttctttcttgggggtcctaagagggaaagagcaaggtttcagcagttgcagcccctgaattgggcacctgaatttttatactggtggtggggtcagggcttcctgtttcggtaaatgttcaggtctctttgcttagggttgatttgaaaagataccacaaccaaatatcacctggccacggtatagtcacggccccatgtctctcaggctatttttactaagattctaaaatccaaagagagccgatcaccccatgtgggccagaagaaaagggtggtggtccggagggcaggatgcctgcttctggtctcaggtttgccctgccttgcccaacaaccttggacttgtcatctatcgctaggcctcagtttccccaagtgtaatgcggtaggcgctgggagttgcatcactctggctctgacctgtctgcgtttccctggaaaggcatggcagcatggaccggggcggggacgggcttgcctcgaaagacatgggagcgcggaaggggaggcaggctcgcctctttcttgtggctttagctccttgcttgctgttattcaggagaaacaacctaattgaagctctggggaggccttgagaacaatgttactaattagctgctcctttttatccgggcttacctttgtctcttacctatattaacatgtgattagatgcccctttgtcgcagcctgcccttgggagccagcgcggtgtgcaccctccagggagagctgggagggaccttgaggagccacagaccagcaccccatttacagatgcggaagccagggctggggaggggtgggatagagggcttgcttcaagtcccaggcactttagtggcaggaccaggactgccatctgggcccagagtggcatggagtggagggctaacagcttagactggagttggacagatctgggttcaaactcatgtatggtggcaggaactggtacactggaagtgctccataaatagccatcagtcccccgggcatgtggaatggggacagaagcagcccccatcctctgggagctgtcagtgtggcggggggtggggtgggttccagtattgcacctgtcttatcataataagggcctgccacaggcatgcccttgccatgcctgtggcaggcatcaccagtcaatgctggcattatcctgttgactccagaggtatctcagggctgcttgcaggcactaccaaatgatcaggattggcatacgtgatgaaagtgtattgccttccctattggaaagataaggactggcctgaagtcactgtgaaatggcatcctgtggggtggggcgagtcaagcagagttgagcaaaaatgaactgaaggaggtggttagtgatgaaaacctggaatgcactattctgaatgtggaatggtagctgacagcattccacggaggctggacctttttcccagaatgggggcctcatccccgtagaaggtcaaagccatgagatcaacagtctgttccaatccccgtggctccttaccacccacctggggaaagcttcctggagcccagccttcactctgccctggtactttgtgtgtgctgttggaggctctccccaaaagcacagaatttagtcagtgtcgtacagggaagaaaatcgggattctgacggcaagaacttgctgtgtgatcttaggcaagtttctccctctggaactccaattgtcaaggggccagatgaggaggtcgtatcatctccctctgaatgtcctcactcacctattttcttgctttgggttggggagagaagacaaagttgctaggtaattttagggtggtgtcttgtttttatttctctactccaaatatttcatgtgagaaggaaagaggagagacggtaaattagggcactgtggattcccccatgacaaggtttttattaagtgtacagtaatgagagaagctgttaatcgtcaattatattgagggcagaacagaaagatgctattgtccgtatctcggtgtacaaggggaacatgtcatttgtattgattttacaaagctcgtaattgaaattcgttaagggctgatttttttctctggggggcgggggcgggtagggagttgggcagcgccagtgccctgggtctggggtggcctagtcagcggcgctcagggtcagggacagggggctggggaagccgcggctggagtagctttctccgtattgtggctgttcacatgtcattatcacattatctttttaactctggaggggggctaattaagtgaagtaaatgaaatcagtggggaggagaaggggggcaaggcaggccggagggaagccgagggaggccgggaaggagccagcgcatgtccttgtgctcagcctctttctctgtctcctctctggccccagacttctcccgccgctctcccctctccgctctcctcccagccctgcccgtctcacctctgcctgcccccgccttgctcctcctccttgccttcctttcctcctccctctctccctttcctcctccctctctccctttcctcctccttcccctcttccctcccttgcccttccctctttgcacatcctcctccccattccccactctcccctcctgtctcccttcctccttactcctccactttctggcccagaaggaacaagggctgtcacccacttgcccaacgtgcccacccaccatctggaacattccagatggagaatggagggagacctgtgaagcaaaaaggttttcagccccagaggcccacccaggatggggcccgccaggcaccaggagcatagaggatggctagagtcccaccctgactggcctcccatcaccatggcaactgcttctcaccttggccctggtacctaagaggggagcccttgggctccagccaacccctatgccccacctcttccaaatcacttcttctactttcccaaaggaccagagcctttagtccaggtgccctcacctccagcccaggccccagctgagctggcggatcccactcaattctgcaaaattgctcattctgcctaacctggcagcctcagggacagatgagaagaatttgggccacagtagctgtttggttcccacctctttctgcttggtccactctccccccagccacccctggccacccctagatccttgcccgtctccccactccccgctgcacctttcttggcagtaattatggtgtgattgaagctgctccacagagaactgctgacacctctgtctttttcctgtaaacacggggagatgaaaatagacacttggagctgctgtgtgtgtcactccaaagatgtccgttgtctcttccacggcaacacagaggctcagctgtcatttcctccttctctctgcgcagtggtttgtatgccgactgtcaaaagccccaaattcatagtcttttagcatcaggtttctgtcactgttttttttttccagaagaaacacacagaaatcatctgtaccccctacccctgtggagaggagagggaagagctttaaacgcacacacacacacacacacacacacacacacgtgcgcgcgcgcgcgtcggcagcaacctaaaaacaagttttttgatccgtcacaattaacactttcgaagaaaaggagcaggaatattaattgcactggtgtgttttgtggctgcagcctttccccttgcccgtgagccctccggaggctgcctgggagggtggcagccaggaagccggtgctgggggctcaggaagaggagggttctgcctggcctctgcccaccagacattctctgctcccggtggcactggcctcattttcctggggacacctgtgatgggccagtagctggaggaccttggacaagtcacagctcttcctcgagccctgaaccccacctgcgccctcccctctctggactgatgggaggcgatgctgtggcctcgaatgttctcgagacaagactgtcagtaagtagggcacacctggaggacgctctgaacacttacctttgaggtaggtcccaaaggaagttggaatgtcagagcagcaggaacttgcagccttcttgttttccagatgggttgcctgggtctaagagagggggctgagaccggccaaagtcacacagcaaagccaagctgggcaccttctgtaaaggccaagctgggcactttctgtaaagcatggttgtaggactcctggtgcccagctccagccctgcaaatgtagtttggactgccctacagttggccgagctgaggacagaaaagcagggaggcgggcctgggtgtctaggagttgaaaatgaggagggctcctgctaccggcctacccaggatggcgccattacgactctgtggccagtgtaaggatgggctttgcaagtttctggaattttccaaaatgtacccaaactaatcactagaaggcctgtttccaacccgatatgtatccagttctagcatgtgccaggatggaggaccagcaggactttgtcagtgtcgtgctcttgggaaattgctttatttctggtaataaggtttctaggctgattgaaaatttgctcctcgaactttatcgttatatctgccattttggagacagagatttcctgtttctgcacacactggtctttctggacacactgctgaaccattcccctttctggtggcttttttggcactgtcatgtttgtgtgcggtcatcatgttttgttttgtttctctttcagacagggtcttgttctgtcaccgaggctgtagtgcagtggtacgatcatgactcactgcagcctcaacctcctgggctccagcaatcctcccacctagcatacaccaccacacccagctaatttaccatttttttgtagagacggggtctccctatattgcctgggttggtcttgaactcctgggctgaaacgatcctcccaccttggcgtagtagctaggaccacgggcacatgccaccacgcccagctaatttttttaattttttggtagagatggggtctcactatattgcccaggctggtcttggactcagctcaagcaatcctccctccttggcctcccaaagttctgggattacaggtgtgagcccccgcatacctggcctgtgctaagttctatgtccctgttctccaggctgtctataatgacttttctcagtcattcctctgtttctgctgccatcagcctttttaccccttcctggtttgtggctctgagctactctgcagaaaatgatgacggacccatttgaactgttttacaagagtcacggtgaggcctgaggaactcccgagggatttgagggcttggatctctgcataaacttggagagaggccatttcctaatcagaggtcacaactagattcagacggtggacatgccgaaggctgcagcccccaccaatgaagcgggatgggctctttcacagcacacgatactcatatttgcacctggttgctctgaggggctttcacaagcatgtcacctgacaccagtatatcaggggtttacagatgagagaaccaagcccccagagaggttcccttctgcccaggaacacggagccatggtgagaaccaagcttttcctccacagcaacagcctggacttgggctttttctctcacgctctggttagcagttgatcactttgccaaaggcccttcgaggccacctggagctgagatgggagaccccggggccgggcccattccccctccagttggctgggtggtattaggcaagccacccccctccccaggcctcaggttctcatttgtaaaactggtgtgtgggactagatttaaggtgagtccagagtttgcagaggggcctctgttcctcccagcacaacctctgccatctcttctatatgctgggcttctgccgcaggctgtttgaatattaggttggcagctaacagtcgggagaacacggtaccggattgatcctaatgcaagctctgacatttccgtgattctaagacttaaagatcaaagactggaggagttctccaaggaggaaacttctggttagtgcacgagggctcagcagactcagcctccccagatccccggtaggcttcagagtcaaaaccaatatccttcatggtttttttttttttttaatttaaaactgtggtaaaatacatgtaacataaaatgaaccattttaaaatgcgtaagcgtgccgctcaacggcattaggtcctttcccagggctgtgccactgtgactaccgtccacctccagaacattttctttttgcaaagctgagactctggccccatgaaactccccattttccctaccccggcccctggcagccaccatttctggctgtatgattttgatgactcgagggacctcgcatgagtggaacatacagtgtttgtttttgtgcctggcctttgtcacttagcgtcacggccttatgttgatgctgtggcatgtgtcaggatttccttccttttttttttttagacagagtcttgctttgtcacccaggctggagtgcagtggtgtgaaatcagctcactgcaacctctgcctcccaggctccagtgatcctcctgcctcagcctcccaagtagctggggctacaggcatgtaccaccatgcccggctaaatttttttgttatttttagtagagacggggtttcaccatgttggccaggctggtcttgaactcctgacctgaggtgatccacctgcctcggcctcccaaagtgctagaattattacagtcatgagccactgtgcccggcccccttccttcttaaggctgaataatattccatcgtatggatggactgcattttgcttcttcactcatccctcgatggacacctgggttgcttccgcctcttggctattgtgattaatgctgctatgaacatgagtgtacaaatcctttctgggtttttttcaagcagccactgtagaaagatgttagtaaattcccaggataactgagaacctgcccttttagtgatgtaacgtatggtggaagaaaggaagctctcggggtagaatccatggagatgggggagctatggcccctgctccacccagacagcagctgcagggcaggcttgcccaagggccagctctgaagttgatgcgagaggtcgcactcctggggcaagagggggcctgggctgtgtgctgtgggcggtcctgcctcttggtgccccactgtcctccaatgcagtaggaccttcccccagacccagctcagcccaagaccaggcatttctgtctcactcggagatcatctgttccaagcaggttgttttccaaatggagggactgggcctgaggtcacaagaggggacttgagcaatcccttctcccctgaccttccagggttgggcctccacggccaggtgacttacagggcagcagacagcactggtgagggactcgggggcctacattcagttcccagctccacctagagcaagtcccttctcctcttgagctcagtttccccatctgcacggtgcggtcagcctaggtgattgcccaagccctctgccaccccagtggcctctggagagacctggccgcaggggccccatgggctgaaggtggcatgtgtgtacacatgtgtacatgtatgtgcacagctgtccccctcccctggctccctggtggaagggaagaagggatatttggggctctgggctctaccgtagtcgctttaattacaggctttcaacctcgggccggtgggcacgcatggggagggaggggttgctgctccgaaaccctgtcattttctagcgtctgagggccccttcaaagggggcatctagacattttctccacaagccgcagagtggactgtcgtggccccagcatgaacataatgacagatgcattttgcagcaagctgggagtgaatgggtccggccggcttgtctcctgtcagacgactcattattattattatttttttttttgtcatttgctgacagtttgggtttcatgcgtttctctcttttttctccttttccccctgcctggaaaaatggctaggtatctacgagaccccagcaggcaccatcctttaccatgctcatttagacatcgaggccttcaccatggaccgggaagtgcgcaaaatcaaacaaggcctgggcttgaaatttgctgagctggtgtataccggtgcgtaagactctatggctgccccctctaaccgcctcacaagggatcccaaagtactatcaggctctcgggcctggccctcccctccgtatcagcaccttcctcccctgccgcccactgccatcctcatgtgagaccccaaaaggtgcaggccaaagggggttgagggaaagtgcagggcatgagggagcaaggggatgctagaacctgccttgccatggggtgtgtccagggagatgcaccggcttcccaaggtgtccggcagcttccaccccctacagtttgcatgactgcagcaatgccaggcactgggcactgtgcggcgacatgcatcaccccgcatggtcctcacaactttcccaggaggtctgcagctccttgtacacgaggaaactgaggctcagaaggaaagcataaaaccagaagtggcctagctgggtttgacccccaagtcaggctgtctccaggaagaacctggacctactccatgaacttgagggagaggctccctggaccaggaactcagccccagaccccagtaccgcaggagccagatcttgaccatgaaaccactggggtggccacagggcctgagccctgtcacacacccagcccatgtgtggaaggaccggtgggtgacagcacctgaggcgggggtgtccccgttttgcaggtgaggagcccgggtttccatgccttggaatccaggcctcctgactccaaaatccaaccctcatgtggtgtaacagaggtccccaaactacagtccctgggtcaaatccagcccgtcacctgtttttgttcagctcatgagctaagaatagtttttacatttttattttatttatttatttatttatttatttgggacggactttcgctcttgttgcccaggctggagtgcaatggtgcgatcttggctcactgcaacctccgcctccctggttcaagcgattctcctgcctgagcctgctgagtgactgggattacaggcatgcgccaccatgcctggctagtttttgtatttttagtagagatggggtttcaccatgttggccaggctggtctcgaactcctgatctcaggtgatccgcccgtcttggcctcccaaagtgctaggattacaggcatgagccactctgtctggccagtttttacatttttaaatggttgggaggaaaaaaaattttttaatgctatttcatgacaaattatataaaattcaagtgttgccgggcacggtggctcatgccaggtgaggtggctgtttctgcattgtctgtggctcccctggagcggcaaggggaggttgagccatttgagagagaccataggacccaaagagcctaaaatattgactctctggcccttcccacccacctccataacatacacatagccctgatttggggcgttacattaaacagctgccctgagctgtgggaggacaggctgctgcctgaggccgatcctcacatcttcgggggcctggacgtcaggggacctgtgcaaagttagtattagttaatcgaatagctacctgggctaagctctcctcccctcgcctctccccctccactcccagattttgtttccttttaagcctcctaatcactgtaactcatctcaggatttcgagagggctcgatggttattggctggcgttatttctccctgccattgttccttgcagctttgaagccaagtttctgcccccgttcccagggacagacaggtgcttaaataccattgtctcctgcaggctttccagcccggcgggattgcgaccccgaaaggaggattttagttacaaagtgagagagtcattaagacgtggcggaggagagagcacctggccgggctgctccggggcctccacggaggctgatcccaccgtggccgcggccacggctgccacttatcctgccatcttgctgctaggctctgagctgggcacctgatggggtattatctaatattagctgcgcagaggtgaggaaacggaggcccccaggtgaagacactcacccaggctctcctggctggtgatgggcagctttgagccggggacaggccagctgtagcggccaagttcccagttactccaacagattccaggatgctcgtgatcaaggggcacggcggcacagacaggggaaccctgggtgtagggcacagtttggctcctggctgcggtcacgatgcctctacactggactggctgggttgagtccctgctctgacagccagcgacaagccctctacatcccaaactgaggtacaatgattaggagacttaaaaggaaacaaaatctcagagtggaggcgagggagagtaggggcttcttctgggtagttatcactaatattaactttgccctggtccgctgacatgcagggccccacaaacatcaagatcggcctcgggcagcaggctgacccccacagctcagagggcctgtttgatgcgattttccccatgagggatacagacatggtatagaccagggctttgcctgatcatgttacttaacttccctaggcctcagttttcccatctgaagagtgggaataacagttctacctgtctggtgggtgaggactaaaagtatgagtatttgtaaagcacctggaacaatgtctggcagacgagtgcttattccagtgcgtgaaataactgcgagcgcccggcgtggtttcccagtgtggaggcgcggcacttggagtcttgcctctggctgggttaatggtcttgagcagggctgtctcttccttgagcctcagtttcccctcctgtcaaataaagggcaccaggctgagggcacgccagggtctcttcccagtcccgtctagctcctgggtggaaagcccaccattctgctgtaatgcttggcttcctcagagcccttgtggtctcggcacagatagggagactgaggcacagggaagccctcctgccccagcctcactcctagaggccctaggttctgtgaccactgccactctgcatctgtgtgtctgtgtgtggctggctggctccctctcctctcccaccattcccaaatttcctggtctggctgtgtgagcttcaggcagactgtctccaggagtggcaaccagggttagcctggcaggaccccagcttcaggaccctggcagggcccagaggagcatctcatctagggggtatagctcacttcttctcccctcacctccatttcttcagcaataaaatgggtataatgtgcaactcacacagaattgctccagttagaaaggatcgcatgtgtttggctgggcctagcagcacgggggaggggtccctctccagctcagccctaagccccacccacagtgatctgcaggtctggggggtgcagggtctcccccattgcagcttatgccaggctcactggcccccaacccaggctgggtccgctgggaaaagaaatctgagcagaagaaccctgtggggcagaggtagaaaattctgagataaagcccaggccagttgctcccacagagatctctgtcctatctctggctccatctcctgcctgtcttccggcctggaaacttaatgggctaattatcccagctccgtcagaaagatggccaagcccaggacaccagggcatggggggctgggagaacatcagtggccccctccacgagggtctcggggtgtgttggaaaaagccctgggccagagttaggagtgcttcatcagacctgggctcttccaaagtcttgctgtgtggccttggacaggctctttccctctctgggcctctctccctgtgtacagtgagggctggcacagagcatcatgttcaaactgcaaatgcaaaacgctttgcgctctgtgcattccctcactgcatccacacaacctctggttagcaatgttttctcactgtgcaaatgaggaaaccgaggcacagggaggttaatcacttgtccaggtgtggctgggatgcggactcacagggtgggacactggagagcaaggactcaacctctactctccgtgcttggccctcccccgcctctgcaagccccaggaccccatcccagaagcctgtcccctttcccacggaggacctctgcaggtgcccccaggggcctgggcctcccacaatagccgcagcccctgggctgacccagccctttatcagggcaggagatcatgcgccatctggccctgcagctgcccaggtgggctcaccttccaggctccatttcaggaaactctagccttgccctgtccctccccccgccatggcctgcctgcctgcctgcctgcctgccccttggtcccagcctccatcagcagaggctagagagaggccgggggcagactggggtctgagcgctacccctccctggcctttagggctctcggggagaggggagggagcatgtttctcaggcacctcctgcccccacctacacaccaagggatgttctggccatagagaaagctccaagtttatcataggaagcagagttgttacaacttgggccaacacaagtcaaatggaggctccccacttccggcctgtgtgatcctggagaagtttcttaacttctctgagcctcccttcctcacccagaaaggggagaggctaagagagtttctctcagagtgctgtctatgaggattcagggagctagcccagatcaaagcctgagcgcagtgctgcttatctatgcagaaatattctatctgcccaggaaaacagcagcaggtgcagaaaacagctcactgattccaaggggtgggctctggccaggactccagttcacagtagcccctaaggctggtgctgctcagtgctaggggctccacatgaaatattactgtgacatccccactcaacagatggggaaacagaggcacagagaggggaaggctatgcatggccatggtctgaaccaccacccagctgcctgcactggacacccatatcaccaagccccaggcagcatgtgcctctgagtcctgtctgaggtcttctgcctcccccggagattagagcctccattgggccagggatggggtccctttaccactgtgtccccagttgctggcctgtggcacttcctgaatgcctatggcatgaagcagtgggtcacttccctcctcctgacccttagggaaatgacctaggtggtcacctccttacccacaggccctttgcaaggttagagggcagggctatgaaagcatggtcctcaactcagccactggcaagcgcacattgtgccagtctcgcgggaggcagtcatggtctgcatggcggggtaaaccatggggcacccttcctgtgccccaggtctccctgtgtcctcgcggtgcaggaggcctccctagtggtatcctgttttcctccctgtaggtttctggcacagccctgagtgtgaatttgtccgccactgcatcgccaagtcccaggagcgagtggaagggaaagtgcaggtgtccgtcctcaagggccaggtgtacatcctcggccgggagtccccactgtctctctacaatgaggagctggtgaggtaggtgccccacacctcattctgacccccacttgggcacagagcctatcttttgactggatcctcaagacatctgtgcctgagcacatgtcaggcaccatgcagagcacagagtgatggtcacagaggatatagacaccactatgctcccgtggaacttacaggctagctgggagaaaggcatggatcaaaccattaccagaatgtagaattagacaaggtggcagcgggctgtgaggaatgcaggatagtctggctgggtataataactgggattggctaggaggggtggtgcatgcctgtaatttcagctactcaggaggccgaggtgggaagattgcttgagcccaggagttcaagaccagcctaggcaacatagaaagaccttgtctcaaaaaaatatatatacacacacacatacatatatatatatatatacacatacatatacacacacacacacacacacacacacacatatatatataaaataattggggttgtgaagaagctcctttgctattcaaacaatagcagaaggagttaacaggtgaatggggggaggggtggaagggcaaaagtggccagggggaaggagctgaagctagatcttaaagggaagggcaagatcagatctgtgcatttagagggtcctcctggctgctctggagaacggatttgagtaggtgggaggtggaagggcacctgtggaaatgcggtagcttggaccatgctgatgattcctggactagatagcagcaggcgaatgtgacacatatctaggaggagggattgaaatgacttggatgtggagggagatggagggtccagaatcaccctggtgtctggggtcgtgagcagctgggtgcagtccctgggttgaggaaatgctcttgaggaaggatcatgcatttggatttaggtgtcatgagtatgggtttcttttgagatagctgggaaaaactaactggaaggccgccggacacttgggtctagagttgaggagaacccaggctgaagaccctggagcatcataggcattttgatgttctctgaagcgctgggccaagagagactgcctaggggaaagcgtggagtgagacaagaagggaactagccaggcaagatggtgcacacctgtaatcccaactctttgggaggccaaggcaggaggatcgcttgaggccaggagttcaagaccagcctgggcaacatagtgagacctcatctctactaaaaataaaaaaattagctaagcgtggtggcatgtgctcgtggtcccaactacttgggaggctgaggtgggagcgtctcttgagtctgtgagatcaagggcgcattgagccatgatcatgccactgcactccagcctgggcaacacagcaaaaccctgtctcaaaaaataaatacataaagtattagccaggtgtggtggcatgcacctgtagtcccagctactcaggaggctgaggcaggaggatcacttgagcccaggagctggaggctgcagtgagccaggattgcaccgctgcactctaaccttagtaacaaagctaggcactgtctctttaaaaaaaaaaaaaaaaaaaaaaaaggaaacacaactggaaccatgagatttctcattgatggaccaggcagaaggtggccaaggaggagcccctggaggggcaggagggccctggtgagccagggcaaaggtggcaggtaacgattggccactcctgtgtccgccccgtggatgagagtgacctgcaccaagggacgaggtgtcacctccagaggtcacctggccaaactagagatggggcaggcccctgtgggacagacagcccccactagacgtgggtcccctaaggcccagcttagctcaggctaaggccagcccctccctcctggaggctggttgggaattaaagtacgagtcttgtttggcagtcaatattatttttttctttcccttctccttgccatgttgagtttctccccgcttcaatctttctaaacactttataagccataaatacaactgagtcagtttagatcagttggggtaaatgtcaaattatcttctctctttctctctctggctctttcttccctccccctccaaatcaacagcctctaataatctgtccaacccttcattaagccttacagtctcactcagggagattaaatgaataaagtaaaaagggaaaggggaaaaaagagagaaaagcaggagcatttattctcactgtgtctccgaccatttcccttttctttttgatttctacatcgctgacttgaaagcccttgagtgacagcgtcacagggaccagcgaggaagccgtgagaggtagcagagctggaaatgccgtggctcagtaggtagaaagtaacgtaattatagagcaggtcagagccactcgaatgagcaaaaataaaagcacagaggttttctgtagaccgtcaggggaggtaaaaaaaaaaaaagaaaaaaatcattgtaaactctttttccacctccccgctcacttcaaaccacaattttaaaaagaggttttttagttcctgagaaacccctcttggaactcccagcagcctcgtgggacaagtttgtccctggatgtgggccctctttgcaggggctgccagggcagctgggaagttcccaccttggggaacgggatggggagagtttgttgtgacttgtgagagatggaggtgaagggacagatggacacagaggtggggggattctgtgtcctacgttctccctgggctgagtataggggccagtggggctgaggctcggtttctaaaacaaggtctgttgaagggatctgaggaggttggtggtctagtttggtctagctcttcctaagcactgactgcacagaaaggggtggccagcaaaagtctggtatctcctcctcttccagggaatgcaagctcctagtggcttcagtgcctgagccctggaggggccgtggaggtgtggaggagggaggaagggacatcaaggaggtacaggagcatgggagtgactctgcagagagttccacgcacccaccggcttcaaggcctggtgaaggtcagggcccgggtcctgaacaaatcactggggccaggcagatgcagagacctcatttgttcttgtaaaaagtccactgtctacaaagaaccagtcagagggccagcctcagggtctcaaagcagcagatcctcctgcctcccaacaccgacccccgctacccctacctcgagaaccttgagtcagctttgtcccaaggctggaattctgcagacaagggtctgattcagagcaggacatgacaagggaccccatcctctcagaggctcagaggctggccttgtggagtaggaggcatctgagtccacgtgccctaagtgcttagcacaaccataattaatgaaggcaatgggtgattgattgcttcggtctggcccctccctgtggacaccactcttgctcttccttccttggcacctggcccagcatctggcaggcagcaagggcttaataaatgcctgaacaaatgaatgagtgaatgaatactgttagtactagtgggtgctcaccatgtgccaggcaccagctacattatttcatgtggggccaaatgtgacactgagagctaaccaccatcacgcatttcacaagtgcaaggctgaggctccgagtgcaggaatactggcctgggctctctggtggcgggtggcggaaacaggacgcaaaccccagtcagctggctggagtgactgccatggttaggaaggttgggaggagcagctaagggtggagagccccaaagcagaaggctggtgagtctgagaggtggaaactgtagagaggtaaaatctgctctgctgagtacagcagcagtcaacccagcattttccatgacacactggcagtgggtgcccaggtttcaggatggattaggtaaggtctaactggttggacacatgaggggaaaggtgacttggtgggcccatctcgctgtgaatgctggaggcctccctgcagcttgcgaaatgcccttgtgctattgcaattcacaccccaaggcctcctgagccttcaggtcactgcatgccatccacacagtcccaagggcacagctggcttggacgagttacccatttacagacagagtgctctggttggtggaattcatagggctagttctggggtggctgctcctagcctcctgccacattgtgtagcagggaagaggctgctgtgtgctccactagggctctccaacctttgggtgggtgcctggcccagaacagggttccctgagttgtacagaaattcaatggaaagccgacgtgcagggagggtttggacccacacaggggaaatgccctggcatctgggaggtggggctgcttctggccccagcagtcctcccttcaagcagaggccagggccaggctgagctgacaagcttctactctccttgcagcatgaacgtgcagggtgattatgagccaactgatgccaccgggttcatcaacatcaattccctcaggtgagaagctcagggccctgacgggccttcagagcctccaggtgtaaagggtaggctttgagagcccccaggtgtaaagggtaggctttgatgcgaccttgactgctgccctgccctgccctgccctgccctagacaaaccccactttcctgtccatctgcccatagcatcctcagaagcatgctttgatagccgacagtaacagagggtcctaggcattggggtcctaggttcctgtgtcccaccgggtgcctctgatacttgccctcccctcccgctaagccacagggactccactatgagctcctttgcagggcaggttaaacaaggaaatagcatagaggtggagagaagcctttgttttctgtcaccatacctgagctgtaggtctagctggaagccatcctagccacgtggatctccatggcccaggagggtggtgcacgtcatctgaagtcactcagacctttgatcctctgtgagtcaccagtaagagtgtcagctgtacctgcctcacagatgcagtgaaggttcaatatgagcctgtggaaatcaagcatgcggctcaggcttagaccctggcatgcaggaagagccaggggcagtgccagcagcaagcacactcagcccagggccggtgtgctcaagggcaaacagggtcgtttgtcaccagcagctaacatagactaagctgctctgggacactctcctaggatgtctcatttaattcttacacaaaatttgcaactccccgggaacaggctgagtggttaagtaactttccaagggtcacacagctaggaggtggtggagctgagtccggagggcctgtcctgctgtgggttctccatcaccagctcccttctcatggggattggagtctagaagaagatgcaagtcagtctcctcttgctaacaacatgccctgggcacagagccatcattttctcccagagccagtctcttgtccctggaggcacctcatgccccgagagatgttgaagcccgcccatctgcccagggtcctctcccttcccctccgtcacctccacctcccctgcctcctgcgccctctgtttgtattttatgactctataaacccttttaaatggcccagaacaaacagggcttacatagtggcctcttcatttctcctattgccagttaaacgctttgtcttcaacaatgacaaacaatgttttccccctaagataaattaattacattatcctgattggagggcaggaggggccagggcgggagagggaatagaaaaaaaggcaacttcacacacatcttaacaaacagctgccccagccaccccagctctgcctgaattaattgaacccagtgtgtgttgttattgttaatttacatttttctttgttttgaatctggtttacaggctgaaggaatatcatcgtctccagagcaaggtcactgccaaatagacccgtgtacaatgaggagctggggcctcctcaatttgcagatcccccaagtacaggcgctaattgttgtgataatttgtaattgtgacttgttctccccggctggcagcgtagtggggctgccaggccccagctttgttccctggtccccctgaagcctgcaaacgttgtcatcgaagggaagggtggggggcagctgcggtggggagctataaaaatgacaattaaaagagacactagtcttttatttcta

SEQ ID NO: 38 - DNA, 12457 bp, Homo sapiens
  source 1..12457: mol_type = genomic DNA
gtcccgtcccgtcccgtcctgtgcggccccgtcccgccgcccgcccgccagccatgagctccacgcagttcaacaagggcccctcgtacgggctgtcggccgaggtcaagaaccgggtgagtgaggggcgccccttgtccccccgacagcgcggccgtcgcacgctccgaccggtgcaggagcccccaggcgcccccggcacctcccgggcagggagcttggagacccggggcggacgggcccttgttctccctgacgcctggtggggggatgtctgcgggcaccccctgaggctcccgcgaatcttggggagcacccaggtctgagatctgggggacgagtgacccattcccccccccaacatctaggggtagttgggtctgacttcgtcccctcgccatggccccaggacccccacgtgtgaagcccctggcgcccactcaaccttcgagaaggtccgttcaaggtccgacaacgctctgggggtctgggggggaccccagcaaccccgtcatctcctggccacacttctgcttttggggcctcttagctttgggaggggaaggggcatggccgagtggtttttgagaagtgttacccccccacaaacaggaatttcctggcctctgggacaccttgggggtgtcttggggggaggggcggtagccgctttgcacggtctttgtctcccatctgactaatttaaacggataacaaagaggttctctgaaggtggccctgagatatgtggggttttgcagcctcgaaagaagagctggggcccggcagggcgcgggggctcacgcccgtaatcccagcactttggggggcggagctgggtggatggcttgagcccagcgagttcgagaccagtctgggcaacatggcgaaaccccatctctataattaaaaacaagccagggctaggggagacactttttaagagagcacttgtggttctagctcagagaggaccagacacttctgcagggtcacacagcagggtcctggacaggattcccagggaaagtggggggcgggggttgtgatgcgagacccacggacaggaccgggacctgaccctccaggaccttccagctggaggggggtgtcgtccccgcccaccccctcccccgacgcccactgggcacctgggaaggtgtccttacagctgacttctgcaggggaaactgcctctgcacgctctgagggcaccggccctgccagccccaacagccacctgcccggcggcactccagggccggcagactggagggagaattcctgcttccccgctgtgagcccctgcaagccttcagaccagctcttggccaaaaagggaggctgaggcttggggtggtcaaggcctgagccagggtccccagcccggggctcacgactcctccttcaaggggccatctgcaccctgcattcatagagccccccgtgcagtggggtgggcaccctgccgcaccctgcatacagccggctaagggcaccggtgtccacagggacccagagacgtcgttccagctgcccagggccacacagcccacaagtgacagggccaagaccggaacccagtacctgctgggcctgcggaagtgggagcgggcacaggagggtggggcggcttccggagacggggtggggtggggtgggggcaggttgatacctgccctggcgggggtgaggacagaggctggaagagccgcttagcaggctccccgcgcaaccctcagtctgtccgtttggagggtgggcgaggcgtcggccagcttgccagggtcacggaagggtcgcctcccaattagaaaccagcttccccctggcttcccgctcacacccgctttaccggctgcttgaaacagccagagacccgccccccgccccgcttccccgtggctcagttgactcccggctggacggcacggaggcagctcggatccacagtgtctgcggccttgcatcccggcttgggggtccggacccgctgggaacagctggttcagatttagccggggaggcagcgcgcattcctggcagtttgtggtgaacaggaatgtgctggaaggccggcggccgggcagcgggggggcgggggtgggggaggacggcagcggctgggggtggggccaggggacctgggcccctgagccggcagagacgcggcgcagctgggcaaggcagggctgtgtacccagcagccaccgttctcattcctcgggatcaaagttgccggcggggcggggctgcccccgggcgtggaaagccaagctgggtgggctgtgagctggtactggggggcctccccgcctttgcctcctctgggctacgagctgtttccaggcaggtgccaggtcaggggaccctaacccaaataatcccaggcaggtccaggtcaggggaccctatcccaaataatcccaggcaggtccagctcaggggaccctaacccaaatcatcccaggcaggtccagctcaggggaccctaacccaaatcatcccaggcaggtccagctcaggggaccctaacccaaatcatcccaggcaggtccagctcaggggaccctacccaaatcattccaggcagatctagctcaggggaccctaacccaaatcatcccaggcaggtccagctcaggggaccctaacccaaatcatcccaggcaggtccagctcaggggaccctaacccaaatcatcccaggcaggtccaggtcaggggaccctacccaaatcatcccaggcaggtctagctcaggggaccctaacccaaatcatcccaggcaggtccagctcaggggaccctaacccaaatcatcccaggcaggtccagctcaggggaccctaacccaaatcatcctaggcaggtccagctcaggggaccctaacccaaatcatcccaggcaggtccagctcaggggaccctaacccaaatcatcccaggcaggtccaggtcaggggaccctaacccaaataatcccaggaagagatgaggaagcggaggctgagtggggagctgtccgcgggaacctggggagatgggtgcagagcagggagagggatttgattttttttttccttctctcttttctttctttttttttttaagacagaggctcactctgttccaggctggagtgaagtggcccgatcttggctcactgcctcctctgcctcctgggttcaagcgattctcctgcctcagcctcccaagtagctgggactacaggtgcccaccaccacgcccagctcatttttgtattttagtacagacgggatttcaccatgtgggctaggccagtctcgaactcctgacctcagatgatccgcccgccttggcctcccaaagtgctgggattgtaggtgtgagccaccgcacccagcccaaaccctactttattctccctccagcgtttatctcccgctcccgctacacgacctgcccccatgcttatggccccctatacactttgccgtctgcctcagtgctgtctccgcggtcactagtggctggatagggacactcgaggtccccactggtgcacacccactgcccaggagcacacagcccattccccacggcggtgtctcagagcaccgaaggccaagaaagctggaatggccgggtgcagaaaggtggcagggaatcggtggcaaggagccaggtgcgtgactagaggcggtcagcctcgggggcagctccttcgggagttgctaagaagcaggatgggggccgggcgcggtggctcacacctgtaatcccagcactttggagggctgagacgggcagatcacgaggtcaggagatggagaccatcttggctaacacggtgaaaccccgtctctattaaaaatacaaaaaatgagctgggcctggtggcgggcgcctgcagtcccagctactcgggaggctgaggcaggagaatggcctgaaccggggaggcggagcttgcagtgagccgagatcgcaccactgcactccagcctgggcgacagagtgagactctgtctcaaaaaaaataaaaaagaaaaaagagctgatggttgcacaacattgcagacgtacgaaatgctgtgaaatggtgcggtttcaggtggttgaagtggtaaacgtcaggtgtgatatagcggggaggtgagaaggcagggcggggaggcagatccggccaggtttgtcctgcaccgggagtggattagagctgatgtttatcagtgagttctaagccggttgtcggcctgcttggagggcggtttatctgtgcccgcctgcagtggctggggcgcccccaatgatgggaaaagggagcatctgcgtgggtgtggtgaggggggacctccaggccgctctatctgctgttgccctggagtccccggccccaccctctgcagagcttctgtggggttcctgctgggggtgcccccagcccagctcagtctcgtgccctttgctccaccagctcctgtccaaatatgacccccagaaggaggcagagctccgcacctggatcgagggactcaccggcctctccatcggccccgacttccagaagggcctgaaggatggaactatcttatgcacgtgagtacacgcagggacacaggctgtctcacacttaacaaatcttggtttttctcactttttttcttaattaagaaatttttggggggccgggcatggcctggctcatgcctgtaatcccagcacttttggaggccgagggtggtggcggggggcggtggatctcgaggtcaggagttcgagaccagcctggccaacatggtgaaaccccgtctgtactaataatacaaaaaaattagccaggcacctgtaatcccagctactcaggaggctgaggaaggagaattgcttgaacccgggaggcggaggttgcagtgagccgagatcacaccattgcactccagccggggtgacacagcgagactccatctcaaaaaaaaaaaaaaaaaaaaaaaaaagttagctgggcgtggtggctaaataaataattttttttttttgaggtggagtctcactctgttgcccaagctggagtgcagtggcatgatctcggctcactgcaacctccacctcctgggttcaagtgattcccctgcctcagcctcccgagtagctgggattacaggcgactgccaccatgcccggctaattttttttgtatatttagtagagatggggttgctccatgttggccaggctggtcttgagcccttgacgtcacgtgatctgcctgcctcggccttccaaagtgctgggcttacaggcctgagccaccaaacccagccaaagattactttataagagtggaaacttgaggcctgggatggtggctcacgcttgtaatcccagcactttgggaggttgaggtggacggatcacgaggtcaggagatcgagaccagcctggacaacatggtgaaactccatctctactaaaaatgcaaaaattagccgggtgtggtggcaggcacctgtaatcccagctactcgggaggctcagggctgaggcaggagaatcacttgaacccgggaggtggaggtggcagtgagtctagatagtgccattgcactctagtctgggtgacagagctagacgccgtctcaaaaaaaaaaaaaaaaagagtggaaactgaggcccagagagaggccgtgagtttgcccaggaaggcgtgagcttggctgagatcagcatcgggtcttcacggttcctcgctgctcacagaggtttctgtttcccccgccccatgttgtgccctccagactcatgaacaagctacagccgggctccgtccccaagatcaaccgctccatgcagaactggcaccaggtgaggggctggtggagcggagcagggatggtgctgggggcccatctaacaggtggggagactgaggcccactcactgtccctctcctgcctcttcccagctagaaaacctgtccaacttcatcaaggccatggtcagctacggcatgaaccctgtggacctgttcgaggccaacgacctgtttgagagtgggaacatgacgcaggtgcaggtgtctcttctcgccctggcggggaaggtgaggcccagagaggggcagccacctgcccagagtcacacagcgaggtggatgtagctgctgcattcactcgtttgcaaatttctgtttgtttatttttgagtcggagtctcactctgtcactcaggctggagtgcaatggcgtgatctcagctcactgcaacctccaactcccaggttcaagcgattcttctgcctcagtctcccgagtagctgggattacaggcacctgccaccacgcctggctaatttttgtatttttagtggagactgggtttcaccatgctggccaggctggtcttgaactcttgacttcaggtgatccgcccgcctcggcctccccaagtgctgggattacaggcatgagcccctgtgcccggcctcgtttacaaatatttctgagcatccgtgaggtgccaggtacttcagattccttggtgaacaggaaggacatggtctaccccttatgcagttcagtctgatggcggaggcatgcaaaagtgaacacagcattgtattatgcattatatgtaagctctggccgggcgcagtggctcacacctgtaatcccagcactttgggaggccgaggttggagaattgcttgacaccaggagttcgagaccagcctggccaacatggtgaaaccccatctctactaagaaaacaaaaattacctgggcgtggtggtgcatgcctgtaatcccagctactcgggaggctgagcccaggagttaagaggttgcagtgagctatgaccacaccactgctctccagcctgggcaacagagcaagactctctcaaaaaataatcataacaaaagtaataaataagctctgaactgggagaaatgccttgaaggagaagaatcagacgaatgttgagtgtctagtgatcttcaaacccagaccgggagcgtgggtgggacagtggtgtagaccgggagcgtgggtgggacagtgtctggtgtagaccgggagcgtgggtgggacacggtgtctggtgtagaccgggagcgtgggtgggacacggtgtctggtgtagacggggagcgtgggtgggacggtgtctggtgtagaccgggagcgtgggtgggacacggtgtctggtgtagacggggagcgtgggtgggacggtgtctggtgtagaccggcagcgtgggtgggacacggtgtctggtgtagaccgggagcgtgggtgggacggtgtctggtgtagaccgggagcgtgggtgggacacggtgtctggtgtagacggggagcgtgggtgggacggtgtctggtgtagaccggcagcgtgggtgggacacggtgtctggtgtagacggggagcgtgggtgggacggtgtctggtgtagaccgggagcgtgggtgggacacggtgtctggtgtagaccgggagcgtgggtgggacggtgtctggtgtagaccgggagcgtgggtgggacacattgtctggtgtagaccgggagcgtgggtgggacggtgtctggtgtagaccgggagcgtgggtgggacacggtgtctggtgtagacggtaagcgtgggtgggacacggtgtctggtgtagaccgggagcgtgggtgggacggtgtctggtgtagaccgggagcgtgggtgggacacggtgtctggtgtagaccgggagcgtgggtgggacacggtgtctggtgtagaccgggagcgtgggtgggacggtgtctggtgtagaccgggagcgtgggtgggacacggtgtctggtgtagacggggagcgtgggtgggacggtgtctggtgtagaccggcagcgtgggtgggacacggtgtctggtgtagaccgggagcgtgggtgggacggtgtctggtgtagaccggcagcgtgggtgggacacggtgtctggtgtagacggggagcgtgggtgggacggtgtctggtgtagaccggcagcgtgggtgggacacggtgtctggtgtagacggggagcgtgggtgggacggtgtctggtgtagaccgggagcgtgggtgggacacggtgtctggtgtagaccgggagcgtgggtgggacggtgtctggtgtagaccgggagcgtgggtgggacacattgtctggtgtagaccgggagcgtgggtgggacggtgtctggtgtagaccgggagcatgggtgggacacggtgtctggtgtagacggtaagcgtgggtgggacacggtgtctggtgtagaccgggagcgtgggtgggacggtgtctggtgtagaccgggagcgtgggtgggacacggtgtctggtgtagaccgggagcgtgggtgggacggtgtctggtgtagaccgggagcgtgggtgggacacggtgtctggtgtagaccgggagcgtgggtgggacggtgtctggtgtataccgggagcgtgggtgggacacggtgtctggtgtagacggggagcgtgggtgggacacggtgtctggtgtagacggggagcgtgggtgggacggtgtctggtgtagacggggagcgtgggtgggacacggtgtctggtgtagaccgggagcgtgggtgggacacggtgtctggtgtagaatggaatgggagtgtgtgtttgtgacatggtgtctcacgtagaaggaacagcaaggtcttgacattggaattggctgggctgttagaggaagcgggagctggttttctcctggggtaactgctccaaatggtgttttcagatgccccctgtggctcccagtaacctcacgtggggaatggtggtcagggaggagccgggcgcagacatcccagtgaggggcagagccaatggcctggccatggtgcccggggattgggtcagaggaggtggtggaaggtgagagagaggaagcgaaaaccacgtccccatccccagaattcttggcctgagccctggaaagctgagctgttgcctaagacaaggcacgctgggatgaagcagccccatgggctgggcgcggtggctcacgcctgtaatcccagcacttttggaggttgaggcgggtggataacttgaggccaggagttcaagaccagcctggcaacatggtgaaaccccgtctctactaaaaatacaaaaattagcctggcgtggtggcacacgcctgtaatcctagctacttgggaggctgaggcaggagaattgcttgaacctgggaggagggggttgcagtgagcggagatcacaccactgcactccagcctgggtgacagagccagactccatctcaaaaataaaaataaaaaactgaaacagctgtatgatgggtgtgtggagtgtgtggagtcccagacacccgagagatgtgcctgtgggggctctgcgcggcaggcagaggtgacaggccgcggcctggtctctgtcccgcccccagggcctagatctagggtccctggctgccctctgctggtactcccggcccctttccctcacccaggccaagactaaggggctgcagagcggggtggacattggcgtcaagtactcggagaagcaggagcggaatttcgacgatgccaccatgaaggctggccagtgcgtcatcgggctgcaggtgggcgacagctcccccagccccagggaccacggcattgggggaccacggtgttgggggacagcagcattgggggacagcggcatggagccctgtggtccctcaatttcagggagggaccggaagcttgttgggtgcagtctgacctctcccacgaacctccctgcagatgggcaccaacaaatgcgccagccagtcgggcatgactgcctacggcacgagaaggcatctctatgaccccaagaaccatatcctgccccccatggaccactcgaccatcagcctccagatgggcacgaacaagtgtgccagccaggtggggctcgcccgggtgcccccgactcctctccctgcccctctacaccctgtggtctcggcccctccctggggccacctccagcttctctccccactctcagtctcagccccttccctagaccacctccggcttccctccccgctctctgtctccgccttggatttcagcctctgtcatttccacctggctgtgggtctctagggaagttactacctcaccctgtgtcattttcccttaaggactgcccaaaggtccacccaattctttttttttaatctttatttattttatttatgtatttattttgagataggatctcactctgttgtccaggctggagtgcagtggcacgatctcggctcactgcaacctctgcctcccgggttcaagagattctccttcctgcctcagcctcccgagtagctgggactacaggtgcatgctgccacacccggccaatttttgtatttttagtagacatggggtttcaccatgttgcccaggctggtctcgaactcctgagctcaggcaatccacccgccttgacctcccaaactgctagggttacaggtgtgagccaccgcacccggccacacccagctaatttttgtatttttagtagagacggggtttcactgtgttggtcaggctagtcttgaactcctgacctcaggtgatcctcccacctcagcctcccgagtagctgagactacaggcgcccgccaccacgcccggctaatttttgtatttttagtagatatggggtttcaccgtgttggccaggctggtcttgaacttctgacctcaggtgatcctcccacctcagcctcccgagtagctgggattacaggcatgtgccaccacgcccagctaattttgtatttttgggagagacagggtttcaccgtgttggccaggctggactggaactcctgacctcaggtgatcctcccaccttggcctcccaaagtgctgggattacaggcgtgagccagtgcacccagtgaaggtcccctcttctctccaccatgacctgctccacccctccttcctctccaggtgggcatgacggctcccgggacccggcggcacatctatgataccaagctgggaaccgacaagtgtgacaactcctccatgtccctgcagatgggctacacgcagggcgccaaccagagcggccaggtcttcggcctgggccggcagatatatgaccccaagtactgcccgcaaggcacagtggccgatggggctccctcgggcaccggcgactgcccggacccgggggaggtccctgaatatcccccttactaccaggaggaggccggctactgaggctcccagcacgctctctccccacatcgtctgcccatctgggtttttgggtttttctgtgttttcatcttttttttttttttcttaacccgttcagtgctgccagtcaaccaagggtctgtgagtgtcagcgtgggatcaggcagcagagcttttttcccctttgccttgatccttcgcaaggctgagccactgggctgtgggggaaggggtcaaggccatatcccaatacgtgtagggcgagggtccctgctggcacattcaggctgtgctgggaagaagagacctgggcttggaaggaaccggtccccgacggtttctgcttgcctcgcctcttcccccttttgtcagctgagcagtttgtggtttctatgcccgcaagtttcaggaagtattcacaaaagaaaaatacattttttcccccaggggtggggcaaggacagtggagagagtgctaggaaatgagtcccctgggaaaggggaccgggccgtgatgttaaatatctccggctcccaagtgactggatttgcctaggaccttcagaccaacagacttcagaccctcagacctgccccggggccaggtggagaaagtgagggccgtacaaggaagtgaaattctgagttgttggggctaagcctgaccccctctccatgctccccgccccaacccactctggcctcagtagatttttttttcagttgtggttgttgcccaggctggagtgcagtggcgccatcttggctcactgcacctccaccttccgggctcaagcgattctccagcctcagcctcctgagtagctaggactgcaggtgctccaccacgcccggctaatttttgtatttttagtagagatggggtttccccatgttggccaggctggtctcgaactcctggcctcaggtgtgatccgcccgcctccgcctccccaagcgctgagattacaggtgtgagccaccgtgcccagcccctcagtaggttttaaggagcccccagccctcctcccttctgggcccgaccagcttatactgctccatcttccccggccacatgccccgccaagtactgcacagggaccccccacccaggggacctgctccgtgagataatgtgaaatacgactgtggaccaaacgcaataaaacctctgtttgtacgaaga

SEQ ID NO: 39 - DNA, 12457 bp, Homo sapiens; identical to SEQ ID NO: 38
  source 1..12457: mol_type = genomic DNA

SEQ ID NO: 40 - DNA, 12457 bp, Homo sapiens; identical to SEQ ID NO: 38
  source 1..12457: mol_type = genomic DNA

SEQ ID NO: 41 - DNA, 12457 bp, Homo sapiens; identical to SEQ ID NO: 38
  source 1..12457: mol_type = genomic DNA

SEQ ID NO: 42 - DNA, 201422 bp, Homo sapiens
  source 1..201422: mol_type = genomic DNA
ttttaaaatagttgctttcttaggaaatgtagttgctttcttaacctcatcaaattcatgaagatttagccgaggcccatggtgagtcttaagctggatatctctcatgttttaaaagatgggtgtttgaaggagcaactcacaagagagaaaaggaaaacgagagacattttatcaattattttttctttaatgattaaaggctatccatttatcccactcacagtctttaagcaattaaatattactgttgttaagcaaggcaggatggtaattgtatattttcatagtatgcctctatcttattttactaatcctttcccctaatgatggacattgtttctaacttccatactacaaataatattcttggaacatgtgcttttatgaatctgtgtgagtatccctgagacatacacccagcagtcaattgctggatcatatgagattctgtacttaatttccccaatgttgttagattgctttccaaaactgctggactagtttatattccctctaacagtatctattgttcactccaagagtattcactccaacatatcaattgtttctgtcatttccatctcctctccaacacttggtattatctagtgttctaatgtttgccattctaatgaataatgtagaatctcactgatgtttaatcttttagtttttctgtggctaatggtgttgaactttccttcatatacctgttagacaattgggctttacctgttcctttatttatttttctattagtgattgcattgttttcctgttgatttgaaagagttttgtttctttttttcccgtgtttgtggggtatattctgtatattaatctcctttcactttagttattgtagatactttctttagtttgttcacattttctaggatatcctttattgaatcacaatctttcatttcgatgaagttaaacccatctaattgtgacactgtgatttgaggatttagcttcatattcaaaatgtctttgtctactcatagactgcaatgacttcccacattttattttattagctttttacctcttatatttaagtctttatctggagtttacttctgaagatgatgtgaagcatgcgtctaaacggaagggaagtagaattatttagaatttaaatataatcaaagcatgtgacttgtaaacacccaaagattttaattgctggaaataatatttccctccctccctccctcctcccccctccccccttcccccctcccttccctccctccctccctgctttccttctctttcttccttcctttttgtcagagaaccaacccagagaatccctccttggttctgatacaaaagaaaagtatttaacatttattgtttgtatttatctactcaggctgccacacaaagaaccatagcaagtggcctgaaacaacagaaatgtatttttccacagttgtgaaggatagaagtctgggattaagatgttagcaggactgattccatctgaggcctgtcttgttggcttgtagatgccgtcttctcctatcttcacatggttgtccctcagtctgtgttgtctgtgtcctaatttcctcttcttacgacaccatcatagtggattatgacttcattgaaccttatcattctttcttttttttttttttttttgagacggagtctcgctctgttgccaggctggagtgcagtggcacgatctcggctcactgcaacctctgactccctggttcaagcgattctcctgcctcagcctccagagtagctgggattacaggcacacaccaccacgcccagctaatttttgtattttcagtagagacggggtttcaccatgttggccaggctggtcttgaactcctgacctcaagtgatatgcctgacttggctaaccttacttttctttaaagacccttctccagcagccacatgctgagatagtgagagttaggacttcaacgtatgaatttggggggcaacaattttagccccaaatagtacctatgctttcacctgtggctatggtggctgaacacatttgtggctaacacaaatttgacagttataattttttatggatcattctacttttgataaatttaggatgattttttaaaaaaatgtaatgttccttcttttaatcactgtagctgtcttgtgtgaactttcaggaaataatcattgtattattgcctctaaaactgaatacttctggaaatctgggatgattgataacagagaaaacaactatattctgagggcattttagttccattctcagactttaatttcaaaatgttataatgtatattagggtgaaaactatgttagttacaaagaggcctcaaaacataatctccaaaatacatagaaatgtatttttcttagttcagattagatttgctccatgtggccattcaggatcacagattccttccatctctgttcccacctccctcagagtgtgatgctctcatcaagtccatgctggtcataggtgtgtcggtattgcagcttgtgagaaggtcaggcacacccagagaagtgcacagaccaggaagtgggatttgtcacttccctcgtgttctactggtgaggatttagtcacttggccacctctagctgcccaggaggctgtgaaatgaagttctctgctgaacagctatgtgttcagctacaatgaaagaaggggaagactgactttggtggacagttaatgtcctccaatacatgatggcagttttagtaactgatagcccctgtctgccagcaaaggcgcagcatgctatagtgtctgtggtgttccttttgcctctaacctcctagcaaccatgccttctctgtttcttcctacctattcccttgatccttgttagctggtgggtctttggggtaaaagagagatcttgagactccatatcctatattttttctagaaactccccacctgctttcaaacacacatatacgcacacagacagacacacacatacaaaatcaagcaaatggtttttacttttttcacttttctcctaagtaccacttgtctctttttttgttgttgacattaccttattttctttttagctcaaagaagtgtaaagcaagagcatctaagcttgagtctaatatcaccacactgctggtttaacacccagctgggactgtgtactactgaagcaattttctgtttcgttcatagtacagaattcatggattgacaggagcaattgccagtggaggaaacaagaacataaacagatgtacaccaagcgcactatggaacacttttaatttcctggagacagtatttcttatggcactggcagcctttcctccctgccttgtcaggatcttattaatgtgctgacagattcctttctctcaatgtacctgctgggtgagagctgctattatatggaacacaggtgtgctggggtttccttgggagattaaaaaagattgtgagtccagaaagttggtaaaagatgtacaaacatttaagctttttcctttctccacctaacacttgtgatgggctctttatcaagcagtgttagtatgtgtctttaacgagaaaaaagaaaaggagacttccccctttgctgttgaaaatatgtgtctatattgcattgttaaatttatgcaggtccccatttctctatatgattgaatttcataatgatgggaaggatggaaagtatccccttctggaggggtcttctcaggacgctgaattgttaatcaagtggattgtttttgcttccatcccatccaaccacacaaaactcagccatggaaagatgatatattaccaaagccctgcattgtcccattctgatgtgttcttttggcatatctgatagttgtacaccctggcaggggagagtagccaacagagagatactcaggcctttgcagtccttcttttaagatttggaattgccacacagcaggtgctcttcagtcatttgaaagagaaaacttaacattttcctacttgcctagtagccacgttatttgtgcttcatttttcctttctatttgccttgagggcaggtgtataggtgagtaactgtaagtagaatgtagttcataagaagtggagaagctgctacttcagggcaataggaatttagcagtggaatttatagacctagaaggacacttcaagaatccagctggttcatcctgtgattgccttgtgggatcatcttgaactgaccatgctactggtcagccagtggctatggcaacagccagggctgcagctgcagagaggagctggcttctttaactggcttcttatacatcatcacaacacctgggctgagcctcaaagcctgggcccaggactgtttttggaactagctgagaaagggaggatgaaattctcaggactaatttcctgcctcctgagggacaggacttggcattcaaggagttatataaaacttttttccctgggtaactccgagttcggaagcagcaattctcatacattgtatcaggagcttgtttaaaacacagattcccagacctcaggaggtttgggttgaatctgcattttaaaaatcttcatatgaaactcttgtagactacgttgaatccctttttttttttttcttttgagatggagtctcgctctgtctcccaggctggagtgcaatggtgcgatctcggctcactcagctcactctcgggttccagcaattctcccaccgcagccccctgagtagctgggattacagacccgtgccaccacgcctggctaattttttgtatttttagtagacacagggtttcaccatgtaccccaggctgatccgcctggccaagtgatccgcccgcctcagcttcccaaagtactggaattacagatgtgagccactgctcccacctgaatcttaatcttaatgtgattcttttgcagactatagactagagtttgacatatgctggtgagagagagagagagagaaagagagagagagagagagagcacaattctgaatataaaagccatggttctaaaggttaacagactgaaattccttgagttatcgtgcccatcaatttacatttgttatatcatagtccctaaagtatttcctaatatttaaaaagaaaaaagaaatatcttttcactgcagcctaacccaatgtgtacttataggtggttatttcacttagatactttcagagaaagagcattcataacttcttttggcagtcaattagggttcttaatgccctcatgttttttccttagatctagactaaatattgatcaaccagaaacttaaacatattttgcgcagaataaagaacaactagtcaagataagtctttttaagttataaaagtttaatttgatcttcttcaggtggaataattcaattttataccctttcatcttggggcctaagtactttaataaagatctatacctttaagccaggggtaagcaaagtaacgctgagggtaccaggaggcatgctgtcgctctgtgtgtaaagactcataaaccttccagagcaattagtggtgttggtaggaacacataaaggccaagaaggggaggttaatccacatccccttcctaataacagcatctactgttttcaagactttactgtaggataggtactttactcgaactatttcctttcatctttggaaagtagtctcatgagtaatactactactcatccctcttacatgtgaggaaacagagacttacatagttatctcactgttccaaggtcaccatcacgtgagtggtgaccccagaccttctgacttgagagccaatatgcttaaccatctactgtcctcctccttctgcccaggtagctccagccaccagcatttcctcgcccttttctccctgctggacatcagggctcttttatgctgccttgactatatgggtcctctcgtaactcccactctccattataaattcctaatttactctctctgcaccaagtctgtatttccctcactctgaatatttaggaacacagttcaaataaactggcatagctatatatgttgccagacaaaccttttacatctgtctgcaaaaatcacattatacctgtttccatgtatcttgtttattcacaaggttggccttacctggatatgtcaggattgggcctctaaaatgtccctgaattatattttctgatttatttgttggttcttttgctcattcattgatccatttacttattcttcagatgggtgttgcaaagtgtctatggagtgcatattgtattctaggtttgaggagtggcttctgaactgaaatatctcacaaataagaaactgaataagcaaacaaatgactacaatgtgcataaatgttatgtcttaagatactaaggaaaccatgagaactcatggtgggagagtcaccttacctgacctgaggcagtcagggaggtttcatagaaggtgacatctgagttgagtttggaaggaagcatagcgatgagccaagtgaaggtgatccaggggaacatcccagatggaagggtcaacctgtgcaaagatgagtcaggcaaagtcacagcactttcacataaatgccaggagcccagctggagcacagagaggggtcaaggcccagaaagaaaagaggttgcagagagacagtggtcttagaacttcttataagacatgacaaggagcttacactttatcctaaagacaatagagagccatggaatgattttgaaactggccaattgtcccatagaactgatgtttatgatttcttttgaataaacatagaaattgaccctcctggttttaaaacttgagacatttacatttgtcttatctgagttcctttctcaggaaaccaaccatcaggcctcccagatagtatcaagggactgtaacttaccagatcaccacatctggacgatgagatgccagaaccacctatcatgactacctaactgactacctgctttctgttgactaactgctcttccttacccctccctaaattctgtattctcatatatgattgcatttctttcctgctataaacccccctaattttagtaggtgtaggagatagacttcagactgatttcccatctctttggcacctgattgaagccttcttccctggaaaaactgattgtctcagtgattggttttctgtgtggcatgcagcagaatctagactgcatccctagtgtttcagtaacagtttttaaaaatagatcttggccaggcatggtggctcacgcctgtaatcccagcactttgggaggctgaggtgggcagatcatgaggtcaggagatcgagaccatcctggctaacatggtgaaaccccgtctctactaaaaatacaaaaaaaaattagccgggcatggtggcaggcacctgtagtcccaactactcgggaggctgaggcaggagaatggtgtgaacccgggaggcgtgagcttgcagtgagccaagatggtgccacggcactccagcctgggtgacagagcaagactacatctcaaaaaaaaaaaaaataaaataaaaataaaaatagatcttatgagacataatggacataagtaaacggtatctaaagtataccatttcataagttttgacttaggtatatacccataaatcatcaccaaaattgagataatgatcattatttctcacccccagattccctcataccatttataattcctccttcctgttttccactgacaatctctgtttcctagccatggacaatcactgatctgctgtctgaaaatatataatttctgcattttctagaattttgaataagtagaattttatagtatgtaattctgatttttttcactcagtataattatttttagatttatctatattgcaggtattaatagtcaatttctttctatttgtcagttttattccattgtatgaatttgcttctcaagatgtatttctccattcatctgttgatgaatggttgaattctatccagccattggctattacaaataaagctacaagtaacatgttcatactttgtatggatacagtctttcatttctcttgtgtagatatctaggagtataatggctgggtagtatgttaaatgtactttaagaaactaataaattgtttcccaaaatgattgtaccatttcacattcccaccagcagtttatgagatttctagttcctccacgtacttacttgtcaatacttggtatattctgcccttctaattttagcattctggtggatttgtagtagtatcgcattgtgattttaactttcatgtccctaattactaatgctgttacattttttaatgcttatttgccagccaaatatatatatatgtatatatatgtgtatatatatacatatatatatacacacacacatacacacacacacacacacacacacacacacacacacacacacaccctgtatatatatatatggtaatgtgtttgttcaaatctttagtcccttcccccattcccagcttttaaattgggatgtttatttacttaatattattcataatagctttgagagatctttatatataagtcatttatgagatatatgtaaaaacatttgttgatgttttctctttggcttcagcttgtcttttcattctcttaaatgtctttgaagagcatctaatgactggtcactcacagaagtacacgtgcccaacacccttgcttcaatctaggaccatcttatgtccttatatcatcttatcatcttacgttttatatccagagctgcccataggatgggctgaagcctcttttctttttttgagatggagtttcactcctgttgcccaggctggagtgcaatggtgcgatcgcggcttaccgcaacctccgcctcctgggttcaagcgattctcctgcctcagcctcctaagtaactgggattacaggcatgcaccaccacatgcagctaattttgtatttccattagagacagggtttctccatgttggtcaggctggtctcgaactcttgacctcaggtgatccgctcgccttggcttcccaaagtgccaggattataagtgtgagccactgcgcccagctagctcttttcaaatgcattgtaggtcaacttctcctttgctcaatctgccttcctcacactctggcttttcacagctcttattccagagggcactccaccataacctcttacatgccaatttctaccttgagtttgtttccaggaaccaagcctaaaaacaggacccatgccttttatttatttatttatttattttttgcttgctttgaattcttactctgtaaatgaattgtgctgtctacacacacaaaaatatacattgaagcatgtctttgtttattcctagttacattttttggaaatgaagtataactcaagaatattcttaacctacattctcatttccttaaataagctattcttaactttctcagaaggacctactgaacaacatgtcactcttttgtcttttcgtgtggcttcagccggagtgctcaccccaccctgcttcttccctgttggcttactgtcacttctctctgccctctgacctcagccatttagatattcagttggaggacttgctctctgttgtcttacatctagctagtacaaatgatagatggaccttgatatacaacagattcaatatgagccacctgaggtttgtggcagctccataatttgtaaaagaagtggcttaggcggctgtcttgtgggttggaacacacagtgggcttgtctaagcctgcatttgcaaaacactttacataaaatagaaaagcatcagttgtacatattaaggaatgaggggtgaggactttggtggaaattacacagatcttcctccaagccatgacttgacattggtattcttccgatgacttgatgtccttatgtttaagattattttaggagttgtttagaacattgtgatgcttttttttttaaagcgaaatctgattcttattttttagaattcttttccccacagtttggcttttctcattcaagtgttcggatagtaaatttacctttgcacatgtttgtgctcccagctgtacatatcaattcgtaaaaagccaaatggagaacagtttagcatcagtgaaatgtcaggaaaatgcccagaaggcaccaacacaatactagagtttcaaattttgagaatggaattaggccacaaaatcagttttcttgcctgtgtcatggaccatggggatgtgtcctagttcttttaaaaaaagggcatctaaacctctctcagtacaacttacaggtctgtgctggggacctgtgagaaacctctggatttgagactaattgaatctgcgttgaaatggccttttcctttctttattaaaaaactgatttgctctaccacctttttctttggcttgcttgcattatccttttttttttaaactgcagaaatcatatattcttcaaggttagaagaaaaaaaaagaagagaaaaaatcagaaccgaatcatactttttgttagatcatgtgtataatattcccttttgtggtggtggaaagaactcacctactctggtttagagggaagaagagtcagttgtcaatgcaaagttctattacaacatctccaaagccatagtttttatttgaaaagcgaggaagtgtgacaacatatgactgggcctgtgattatcattcagacccatacagtgaaaactctgcctgaatttgttcatgaccacatttcttttccaggtttgacagattgtagttttccaactgtctccttattaacatgctgcctgtttcctctatctacttttgctgcacctgctgtgatagtgattgttttgtgtatataggtaccattgccttcagagattaagggcgcacattgtgagcagaaataaaccaatggatttatcagtgactgtacaaattccacctatcttttggacaataactgaaagatctctcttgggaaagtaatgtttttctttgggaattgtgggttaaaaaactatgtttacagctatgcctatctcctcttcctcattccttcattccttctactttttgatttataattgtattccatagccagaaaaatgctaaagaggttaattttttatattataaagtaaaaaaaaaatcctaagtaagtttactgagatttttctagcaaaactagaagtcttagtgggcttcagattcatactcatgaatattcttttaattcttacttttatacaaatcttggaaattagaggtacaatagattattaagaattatgaaaatttattcattggagagcttagcaagaaaattgcttatgttaacatttgaaaaactatttggtctacctgcactgcaaacttatagatgatgggaaagcttatctttaaggcctggatcagtgcaaacagccctgaaaaaggaaatctcgagtttaatttacctttcagaactaaagaatatatattgcagaatttaaagagaaaaggatcttctctcctatctcctaatggatactctttgtacctagggtcagtctgacttggtgggtgcggtatttaactgctgctgaccttgctttgaatttctggctacagagcatttcagaggacagagcaaatcttctgttgggtgtcacataggtagatgcatgctggtgctggttcattcactggcacatcccaggaatgaatattttcttccttgcacattgaccttactctgatagactgacccagaaacagagctggtctagttttatatgtaagtaggaaggaaagttttcttccctggcacatacacctgctagcactctgacacttctaatttggaggtcacaggagcaagtaaataaatactatttaaggagcattaaaagaagaaaatttggtttaaaccaaaaaaatcataaagtggggaggcagagctacaaacaagctgtgggacttcaatcatacttgctttcttccatactattataagaataaaataaaaaaggaaggaagggagaggccgaggcaggcagatcacgaggtcaggagatcgagaccatcctggctaacatggtgaaaccccgtctctactgaaaatacaaaaaattagccgggcgtggtggcggacgcctgtagtcccagctacttgggaggctgaggcaggagaatggcgtgaacccgggaggcggagcttgcagtgagccgagatcctgccactgcactccagcctgggtgacagagcgagactctgtctcaaaaaaaaaaaaaaaaaaggaaggaaggaaagcaggcaggcaggaagaaaggaagaaaggatggaaggaagaaggaaggaaggatgaagaaagaaataaacatatttcactttatacacagccttgcttcagttggagagtgattcaactactctcagctttctctgtaaccactcaggaataccatttagaaaaacgttcttgtagagctagagcctattgctaatagtaatattctggaaaattatggggagatatatatgcttataggcttacctctgacctacaaattgtctctaatagagactgtaattgtgcacaatcccttttttcctcttctgcatagccatgggaagattttctatgtaggcttatgtgaccttcctaggttgtctgaaataatcttgcatctagtacatgaatattacttaataaatccataagtatgtaccaagtgatttggctgcagaatcaaaatttttaaaatgatccatattaactacatctgaatttatccttgagctcctcttctcgttgtaaagtgcattgcacctataaagagaggagtgcagaatacttgtagaagtttgtggggggacagtgaaggacatttattggtctagttaatggtaataggatatatccaaagtggaaataaaagagaggctgtcttaattcaatggtgagccagggctataagtaacaaaaggtggatttcttgggaaatgaatcaattcattttttgtaccatcaaactgggatctaaaatatgaaccccatgatacacatgtacacaatgaaactgttggtctgttattgtaattcttgaaaatctcagtttatagtttttgtgtgtaagataatattatccacagaatcctaggttgggagtctagttctgtttctgcttcagaagactcttgtctcagagaagacccttgaaactctgtggtccctaggatccctcatctgtaagatatagaatgttctaggggcaaagttggaaaatccccttgaggactatgatgttccagactaggacactttataatgcttccaggatgctaatttctggaggcaattagtaggtttgtaaacaaattcttttgaagtgaaggtttgaattgtgtattggcaggaattatttggataattgacttgaatgagtttaattggctataagagtttcatttttgttttgtttcttaggatgatgtaattactgcctgtgttgagttcctgcaggaatgatttaactgttggatattttgaaatgttctggttgtaaaagcatgtatttggtatctgtgtttttttttttttttttttttttttttttttgagacggagtcttgttctgttgccaggctggaatggtgcgatcttggctcactgcaacctccacctcccggttcaagtgattctcctgtctcagcctcccaagtagctgggactacaggcacgtgccaccatgcccagctaattttttgtatttttagtagagatggggtttcactatgttagccaggatggtctctatctcctgacctcgcgatccgcctgccttggactcccaaagtgctgggattagaggcatgagccaccgcacctggacatgtttgtttttttcctggtgttctgagtgtcctgtggcaatgggaagttaccatctcacctccactgttaaggcaccaagtttctacctcttggcccctaagaaatgtgggatcaccttgaacagatctgtcagccctggtgagtttcagatacctgtctcctaagaggaatcttctgctaggttaggggagggggtcctataacagctggaacataggccttcccttcattctgttaacctgaggaatagtcatatcattctgctctctcagttcttgtttcttaacttagcagggaattcagtggagatttaagggtggtagcaataaagcttgtgagagtgcttatgagccactgacagcaaccaacactattgtaagggagttgctagataaccaggaacctggtggctgggcagaagccgacaaagttgactgctatgaatttagattgtggcctaccaatatatgaatagacaagagttagacttcactatccctccagaattctttttctgtgcaataccatgttatcattatataacattcatcatttggaaatctcaaaataagttataagatatagcagcatttgctggctggaaaacctttagacatagttacatagcttaatgacccaaaactttctgctttatgtacatatgaaagtagaggttccaaaatgttaagttaattgctatcgtcctctagcaagtctctacagaagtcagaaataggacagctactgtgaataggtactggataatttttcttttttaagaaatgcaagtaaaagcatttactacgtttactatcactgaagtttgatcatctgcagaaaataacttttaatgtgttctttagaatgaagtatacataggtagtatctgccttctttatttcaccatgaagcctagagggcaactggtagcacagaatttagaagatacttttttttttttgcctatcttgcttttattaattttagaatctgtaagttctttgagaaaggttacatactcaggatatgtagtaagagtgcacaaaaattgaattattaataactaaaatgagaaaagaagtttatattgcaggggttcttaaaacttttttggtgtcttgactgctttggctatctagtgaagcctattaacccctcttggagtactgttttaacaaacaatataaaatacaaaggattcaaagaaaacatatcacattgaaatacagttatacaataacttaaaacattgtgatagagtaatgtgtatgcttcttatttacacattataaacagaatatagcggctgggctaataataataaattcaaagtactgacacatagattttcaagacgtctgcaacaactgcaataataaataaaagtatctataagttctatctgtgataaagtcacaggttctgctaataataccgtgttttggtgcctgcatttatatttgaacagaaaactaaatttcagttatatattagtgaaaataaatgatggaattttgcttttcaattcaagtttatggatcctttgaattttctccctggactcctctctgtgggttcaaagtgaagaagtcttctgttgggttctcagctcatcttttcatcacttgcttctcttagataatgttcaaatactggttacaaataggagaataaatgatgagttcattggacgagaattgaggggagttagcagaagatttctgtaagaacacagtctgggtgtcccaaagcaagttataaagtaatacaatttttcttcgatcccacttaccatcctttctgcatcatcttcctccaagtcaggtgctcagtgtttctgagtgagatgaacaattcaatcagatgtaattgttagtcacaatgttttagtcttcccatggatgtattaagtatatatatttacatatattctacaggaagtggcactatttaatcaaggaaatccaatgccaataatggattttggggatctacccaggatagataggtaaagggatatttttggccgttactgacgcctttcagtcacctaatgattggctatttgtcttgcctatttataagtcagttgtaagtttcattgggcaaacaaaggaagttgttgtttttcagtctgctgttggttttacctttcctggcagtaacgtttccctaggggcaagcaaatactccaagttgaacatctcatttacagcactgtcatttggggtgatagttatttgtagtttgtagaggaattatttcattcatatgagtgaacagatgggttaataaagctgtctgaagttgcaaactggtacacagactatttcagggacatccatcatggtgtcatgttgctgaatgctgaactaccaatagactattagattacaagcaccttgaaaaccagaattaaacctaatctaaacccaagccatagcaacagagtatcgaggtaggctttacttctagtcttcaagaagtgaaggtagcttggcatctgctgctatcatgcaggcattagaacatttaaagaaaacatgtaagctgtgacaatgttaatttcataagaaaaaaatgggtttgtataattttattctgaaatgtgtttcctttattttctaactataaaatggttttgacatcttcaaaaacatcatcgcatagatgcaaacatattttttaaagaactaacactttatagactttaggtgaagggattctgcaaggactgtgacatccaatgggagggtgcttatgtgtggtgtgtatagagacctaataagaactacttcaaagttttacagaacttgtcagaagtcttataactcgtaccaaggggaagataacagcaatcaaagttgtaaataaactagatgttgctggctagcaagatttctctacatagaccctaaacggccctattgtcaagatttgtgtgggagatgcaaaggcaaacacctatcctgtgtgagcactttcagcttcaaatatcatttcaataaatgaatgcaaaaaatagtaaaaaaaatacagcaggatcatggctgggctaggtctaaaataacaaaattatttgttattttaattgtgtgcacaagctgtctcctttttgtagtgagctctgttttgtcttacacttcactgaagtatgcactgcatactgagatttgattgaagccacataagaaggaaagatttggaaggcagtgagggagtctgccatggttgctggttctctatgaggctcaattgttggggtgcacatggcatgcaacactgatgcttgacaatataaggcaatggctttcagctatggctgcacattataataacctagcaagcttctaaaacataccaattaaattagagccttttggggtggggttctgtctttggtatacactaaaaacactccaggtgattctaatatgcagccagggttgaaaatcattggtaaaatggatgcaaatatcagtccataaactcaaatgtgcaagaagcagaacttaattttttattcccagcctcaattttgctactaacttcattcttttttatggtttacttaaccctgtagttcagagttcttatgcagcgcaaaattttggggagcagaggaacctcttatttgtaggtcatctgtccactaaagttaccattggatgtcccatcaccccatcaacatgacacttttggtccagtggtgcggcatgcttcgagaactggcatctttctgtgatgtgcctccactcaagaactaggtctgagcctaagggatgccacaaaactcagtagtcacacaagtcatattttaatgtataattactgatgtctaaattaatgcaaaaaatccacaatgaacaaaatatcggaagtttaaataaaaacagtgtcagtacccactctgtccccagcttttcttcttgtggtaggaaatactgcctctctagcaatgtgcagactgcagttttttcctgcttgttcattccagttgaggaaaatgtcatttaatcccggaaaaatatttttccttttgtgtttctgtcttgcatatttaatctactctggagaatattcttttgtacacctgtttccaaattaggtgtaaagttttggaaaagagtatatgaagaaaagtactcagtaggcaacttgcaatgtttgctttgccatttctctcttatttgtcaccgagcatagaattcactacctgcttgaggtatatgtgactgtgtatgtgtgtgtgggtgagtgtgtgtgtgtgcatgaagggatagagtgccataagggtctccttacctccctcttttctttttttcctccctctctcactccctccttccttaccttcctcccctctttccctccctgtgttcttccttccttgctgcaaaataaaggcaaattggtaggcaacttaagatattttttattatttatcaaatattcagatactatttttgccaacatgccctgtagtccatacagggaatttcttggacttgcacctcaccaaaaacttccacctagcaggggcactagaagcttctgtggcatctgtccctgggttctgtgatttgcacaagagaatgctcaacttttccactccacattttactatgtaaggaatgaaaccaaaactgtgtatgtctctctgtctccagagcctttggtggaaacaagtccttctgcctttgttctcctatctctcagatggtggttgataacccccatcttgttatcagcatttcctgcctctattccttgggtgtctttgaataaataatttccttttcttctagacacaaataagagctaacataggaattaacttaagcaaattgagtcttcttgaggagctcctgtgcaaagatgtctggatgtcagcagatcatgtttcttggcaagagagaaggacaatgaattcatggaggctagatcatctagggccctatttgcaaggaatttggctgtttctcagcatgagatgagaaggcatcagaggatactgaatagagaagtgacataacctacatagaacttaaccttagttgcactactctcttgctagcttcctgctcttcctccaacatgcaggcacacttcctcctcagggctttggtacttgctcttctatttgcttgagacgtttgtcccacagatagctgcacggctcagtgcctcaccttctcagcaacatccttcctggtcaccctatttaatacttaaacttcttatactttttcttcgctactttattttccttcattgcatttatctaatactatgtgttaactgtctatgtcatttattttctgtcaaagaaaaataattatattctggacagctggtctgttttttatcaaatagggaatggaaatcttttaactgattatatctttccttcttttatttttggaattagctctaataagctcagcaaactttgtgtaagatctaattaaggggtatcttcttgtatgctaactcttccagatttcatcttactatttggtcatcattacatttgacccagatttaaatttttaaaaaatgtattactgttttatatctacttttgtttcaaataatctttaagcaaggcatgtcataaagaagaatttatccttatatctcctatacccagtgaagtttgtgcatatagaacatgttaataagctgaatatgatatgtaaaatgtaataaaatgttaaaaatattcatatcctatttacctcgggaggtttatactttatttttatttaatttttttataatttcaaattttatgttagatttgggggtaatgagcaggtttgttacataggtatattgtgtgatgccgaggtttgggatacaaatgatcccatctcccagatactaagcatagtacccaacagtttttcaacccttgtccccatacctctctccccactccaacagtcttcagtttctattgttgccatttttgtgtccatgagtactcagtgtttaggtcccacttataggcaagaacatgcagtatttggtgttttgttcctgcattaattcgcttaggataatagccccagctgcatccacgttgctggaaagaacataatttcattcttttttgtggctgtttagtatcccatggtgtatatgtagcacattttctgtatccaatctaccattaaaggcacctaggttgattccacgtctttgctattctgaagagtgctgcaataaatatgtgcatgcatgtgtctttttggtagaacaatatatacatacatatatatatatatatatatatatatctccagtaatgcagtcatggggttgctgggctgaatggtagttctgctttgagttctttgagaaatctctaaactgctttccacagtggctgagctaattaacattcccatcaacagtgtataagcattcccttttcttcacagcctcgccagcatcggttgttttttgactttttaataacggccattcttactggtatgagattgtatcttattttggttttgacttgtgtttctctgatgattagttatgtggagcattttttcatgtttgctgacgtatgaagatgacatatgttgtatgtcttcttgttagaagtgtctgtccatgtcttttgcccattttttaatggggtttgagcatagaatatttttccactggtttgtgtcatctattatttctttgagcagtgttttgtagtagttctccttgtagaaatctttcacctccttggttaaatatatttctaggtattttattttatttttttctgtggctattgtaaatgggattgcattcttgatttggttctcagcttgagtgttattggtgtatggaaatgctagtgagttttgacactgattttgtattgtgaatctttacaaagttatttatcagttccaggagccttttggtgggtctttagggttttctaggcgtagaatcatatcagtgaagagagacagtttgacatcttctttacttatttggatgccttttatttccctctcttgccttcaaaccagagatctatctaggcatggagctgggaaacctttctggccccaagttctctgcatggggatggaaggcagcctaaattcttattccagtagagtgggtgctctagatgcttggagatctgcctgggtgtggagtgtagagggccttgctggaccacaatctctgcacagatagggcgggagagctcaggctggcaagccaggataacaggtactcttactgcttggagatatgcctgtgcatggagtaaagagggctgtgcttcaccatggtgtctgaacaggatgggtgggctggctcaggctgttgattcaggtgagtggatgctccaaatgcctggatatctgccagagggtggagcagagagggcctgggcttcaccacagtctccacacaggaatggttgggtggcttggtatgctgatctgggtgaatggtagctgcaactgctaggagatctgcctgggcatgaagcagagagggccctgctgtaccatgatctctgcacaggcagggtggggtatcttaggttgctagtcaatgtcaccaggtgtttcaaatacctggatttctgcctgggagtggagtggagagggacccactgcaccgtgatcccagagaaggaggttgggccacccagaaatgatacacataaacctgttctatgtctccaagctggtcctggctgcaagtctcctcatccaggagaaactggatgagcagctttcctccagctccaggcctgtgacaggggagagcacaattccagtgcctactgatgaggcactttctgtaattctggctgtagagacctctacaccactccagagcaagcgctccaatctctggcccaagacaaaaatgcctgtgcagccacggtgccagattgccaaagaatggctgactttgtatgcactcgggttaaaaacggcatcctgctttcagtcctgggtctgagaaaatgcctgcagcttttccctgtgtcttttcctctcagcacttccaagcctctctccaagttagctccaggacttgggagaaaaaagtgctctccctcagcctaggttgctgggatccccagtggaaaggtgagtagtagagggaggctctcctcccctctcacgtactggggcttcacacattgtcagccagatgccatcatgagggctgtttgcccacgttcttctccttgggagctggagtatctttcacaatatcaggggattcgtgttgtattagtttgttctcacactgtatgaagaaattcccaagactggataatttataaggaaaaaaggtttaattgactcacagttatccacggtttttaggggaggcctcaggaagcttacaattatggtggaaggcacatcttcacagggtggcaggagagagaatgagtgccaagcaaagggggaagccccttataaaaccatcagatctcatgagaactcatccactatcatgaaaacagcatgggggaaccgcccccatgattcaattatctccacctgatcccgcccttgacacctggggattatcatttcaagattacaattcaagatgagatttgggtggggacacagccatgtgatatcatcccaccactggctcctcccaaatctcatgtcctcaaatttcaaaacacaatcatgccctcccaacagtcccccaaagtcttaattcattccagcattaacccaaaagtcaaagtccaaagtttcatctgagataaggcaagtctcttctgcctatagggctataaaatccaaagcaagttagttccttcctagatacagtggaggtacaggccttgggtaaatacacctattccaaatgggagaaattggccaaaacaaagggtctacagtccccatgcaagtccgacattcaatagggcagtcattaaaacttaaagctccaaaatgatctcctttgactcttatgtctcatatccaggtcacactgatgcaagaggaaggctcccacatccttggcagctctgcccctgtggctttgcagggtgcaggctcctcccagctgttttcacgactggcactgagtgtttgcagttttccaggcgtactgtgaaagctggtgatggatctaccattctggggtctggaggatggtggccctcttctcacagctccactaggcagtgccccagtggggactttgtgtgggggctccaaccccatctttcccttccacactgccctagcagagggttctccatgagggctctaaccctacagcaaatttctgcttggacatctaggtgtttccatatatcctctgaaatctaggtggaggtccccaaacttcaattcttgacttctctgcacccacaggctcaacaccatgtggaaactgccaggcttggggcttgtgccctctgaagccatggccagagctgtaccttgggcatttttagccatggctagagtggctgggaaacagagcaccaagtctctaggctgcacacatcggggggccctggacctggtcccaggaaaccatattttcctcccaggcctctgggcctataatgggaggggctgccatgaaggtcactgacataccctggggacattttcccattgtcttggtgattaacattctgctccttgttacttagcaaattgctgtgataggcttgaatttctcctcaggaaatgggtttttcttttctattgcatcatcaggctgcaaattttccaaacttttatgctctgcttcccttttaaacataagttgcaatcccaaaccatatctttgtgaatacgtaaaactgaatgcttttaacagcacccaagtcacttcttgaatgctttgctgcttagaaatttcttccaccagataccctaaatcatctctctcaagttcaaagttctacagatctctagggcaggggcaaaataccaccagtccctttgctaaagcatagcaatactcacctttattctaattcccaacaagttcctcatctctatctgagaccatctcagcctggacttcattgtccatatctctgtcagcattttagtcaaaaccattagacaagtctctaggaagttccaaactttctcacatcttcctgtcttcttctgagccctccaaactgttccaacctctgcctgttacccacttctaaagtcatctccacattttcagctatctttacagcagcctcccattacccagtaccaagttactgtattagtctgttttcaggctgtgatgaaaaaattcctgaaactgtgtaatttataagggaaaaaggtttaattgactcacagttccacatggctggagagccctcaagaaacttgcaattatggcaggaggcacctcctcacagggtggcaggagagaaaatgagtgccgagaagtggggaaagccctttatatagccatcagatcttgtgagaacccactcaccatcatgagaacagcatgggggaaactgcccccatgattcaattatttccacctggtcccacccttgacacgtggagattatcacaactcaaggtgagatttgagtggggacacaaagccaaaccatattaccaattttccttctcgaattaatgctcacagagttgatctttgtgcaatatcttgctatttccaagtggtcgaggcacactgaaagcttctaatccaccatcttgggaaaaaataatctctctctctctatatatatatatttttttatatatatgtatattttatatatatataatatatatataaaagagagatatagagatatctatgagatacatatagatatatatatttatatataaaagagatataaatatagagatatattttttatatatatatacacacatatatacatataatgttaaaaagcatcttttcaaataaatgctgcttgcatatgttaatttagtttgaacaattttggagtggatttcaggacaggagagagaaaaaagcaaagagcaaaacaactccactctaaagggaagtcatagttcctgggtctgagtggtgcttcttgcctccatcctgccctgacccttcatagtctcgtgactttcacattgctctaataagatatcaaaatttgagtgaggggttcagttcctatctctgttctcccagtaatgcaacaaaaagggtaacttgtccctcctctttacattttaaaataaggaagggttgaattagctcagtgtttctcaaggcttgattcaccttaattgactgaagagctttttaaaaatcccaatttctttggcccttgtcatagacattctgattccttttatttggcagaagacccaggcactgacctaatttttaaaagttctgtatatggttctcttgtgcaggcagaattgagatcattggctttgctaaggtatctccagcactgacatcctgtgactaggtggataatttaactcttcctaactctacagaaaaagtgagaagctctagagattccactggtaacctcttcaaggttatgtcacatgctgccactagatggcgcaggcaattcttgggacggaggagattctggttatttgggattttcattttccctgtgcaatatacttgagacactcagcttaagaagcttcgtgggggaatgacattttagctcctttcccaaagctcgaggcccagaaggtagagctgttttgcttgacaagttgatagagagagactcattaaataaacgttctatcgtctgaagggagaaagtaaaacccccggcataaatattagttcacatttttcttattatttccagcaggtgtgtgttctccccttctctgtgtctttctctctcttactctttgttggtggcctctttttacctttatcttttcccttttcttggtttctgtctgtaaccactgtttgtaaactggttatgatgaatttacaggtggattaaatcttagtttgccacctttgtcgtagataaaaattttaggaatccaaaaacgatacctacacaatattcttagaagggtgaacacattcaggttacaatggaaaaattcttattcaggagacttcctctgcaatgttgtttgttcatagcagctgtggtagcacccgccaaatccaggaagaaagaattttatgccgtatcagggaaaaacagtcaaaatcctttcctctttacagcacaattcgggtgacggccaaagctcttagtgtacatacaagtaggggtttttgcacaataatagggtgtgcttctctgatgcttttcactggaagaccacatagcacattgctgctttattccataaagctgcctctttcccctgggctgtcagaataggaagatgtgttgtgattttttttttcaaagagattgcattccttccctggctttgtcccagcccagctgcttgttgttcagggagatgctgcgcttttggtgccaggatataccactgtgctttctttttccctgagtgacatatactgatgggtcactgcctgaaacagtggaacaaggcatggtgtgtgtccacccgtgaagatccattgtttattcttccctagtttccatctagcagcatcaggttcccatcttcattaagaaacaaaacaaccgaccaaacaaataaaaccccacaaacaatgcaaaataaaccaccacaaatgcaagaaaaaagtcttttttaaattttacattaatagctaacgttgagtgcaaactatattctggatattgttttaatcacttgtcatatgttgtgtcattaatcctcacatcagtgtcatgagctaggtcctattattatccccattttacagatgaagaaattgagtaaaagtagggttaagtaagttgctcaatgtcatgcagctgataagttgctgagccaagctctgattccaggcaatctgacacagtacaccttaactctgtatctagattccaaagggttgtgtattggagtaacaagcaagtaaaggatagattctccaattggatagttgttagaaaagggtgtatttcctgttaatgtagctatatttcttttggtataagattcaacagatgctccaaacccagttctaccccatgctggaggacctaagtacattgtggcatacccacttcttactggcagaaaaattaaaaggcgggaaacttccttctcagttgtgactgggatcatttagtgtgtctgcacaatcctaaataaatttggaaagtgaacaattgggaggacgacctactttttttttctgactcacttctacactacttaaaagtaaataggaataggggctgatatataaggcatttgggagctttttctcgttggtcatacattaacctctttaggtcaacagaagtctggaagaaggaggccaccacacactctgcctaagagtgtgtttttagtgtaattcatgctgtattgggcatgaagaaagcagacagctttctgaaatgagctatttccaagggagtacaatcatattgcaaagaaagcacctagaaggaagaaattcatcctataattagggctctgaaatattttcaatcaacatataggttggtgcaaaagtaattgcagtttttgccattgaaagtagtggccaaaactgcaattactttagcaccaacctaatatcatgaagaaagaaaagaagcacagtccttgctagaaaacagtgataatctcaatagaagaatctaagagctagaagactcagttggaaacagcagaatcgggccaaataggaacagctccagtctactgctcccggcgtgagcgacacagaagacgaatgatttctgcatttccaactgaggtactgggttcatctcactggggagtatcagacagtgggtgcaggacagtgggtgcagtgcactgagcatgagccgaagcagggcgagcatcgcctcacccgggaagcacaaggggtcagggaattccctttcttagccagggaaaggggtgacagagggcacctggaaaattgggtcactcccaccctaacactttgcttttccaaccgtcttagcaaacggcacaccaggagattgtatcccacacctggcacgaagggtcctatgcccacggagacttgctcattgctaatacagcagtctgagatcaaactgcaaggtggcagcgaggctgggggaggggcacctgccattgctgaggcttgagtatgtaaaaaaagcacagggaagctcgaactgggtggagcccaccgcagctcaaggaggcatggctgcctctgtagactccacctctgggggcaggcatagccaaacaaaaggcagcagaaacctctgcagacttaaatgtccctgtctgacagttttgaagagagtagtggttctcccagcatgcagctggagatctggaatggacagactgcctcctcaagtgggtgctgacccccgaatagcctaactgggaggcactccacagtaggggcagactgacacctcacatggccgggtactcctctgagacaaaacttccagaggaacgatcgggcagcaacatttgctgttcgccaatatccgctgttctgcagcctccgcttctgatacccaggcaaacagggtcaggagtggacctccagcaaactccaacagacctgcagctgagggtcctgactgttagaaggaaaactaacaagcagaaaagacatccacaccaaaaccccatctgtatgtcaccatcatcaaagaccaaaggtagataaaaccacaaagatggggaaaaaacagagcagaaaaactgaaaattctaaaatcagagcgcctcttctactctactccaaaggaacgcagctcctcaccagcaatgaaacatggagaatgactctgacgagctgagagaaggcttcagacaatcaaactactccaagctaaaggaggaagttcgaacccatggcaaagaagttaaaaaccttgaaaaaagattagacaaatggctaactagaataaccaatgcaaagaagtccttaaaggacctgatggagctgaaaaccaaggcacgagaactacgtgacgaatgcacaagcctcagtagccaattcgatcaactggaagaaagggtatcagtgatggaagatcaaacgaatgaaatgaagtgagaagagaagtttagagaaaaaagaataaaaagaaatgaacaaagcctccaagaaatatgggactttgtgaaaagaccaaatctatgtctgattggtgtacctgaaagtgacagggagaatgggaccaagttggaaaacactctgcaggatattatccaggagaacttccctaatctagcaaggcaggccaacattcagattcaggaaatacagagaacgccacaaagatactcctcaagaagagcaactccaagacacagaattgtcagattcaccaaagttgaaatgcaggaaaaaatgttaagggcagccagagagaaaggtcgggttacccataaagggaagcctatcagactaacaatggatctctcggcagaaactctagaaggcagaagagagtgggggccaatattcaacattcttaaagaaaagaattttcaacccagaatttcttatccagtgaaactaagcttcataagtgaaggagaaataaaatactttatagataagcaaatgctgagagattttctcaccaccaggcctgccctaaaagagctcctgaaggaagcactaaacatggaaaggaacaactggtaccacccactgcaaaaacatgccaaattgtaaagaccagcgaggctaggaagaaagtgcatcaactaacgagcaaaataaccagctaacatcataatgacaggatcaaattcacacataacaatattaaccttaaatgtaaatgggctaaatgctccaattaaaagacacagactggcaaattggataaagagtcaagacccatcagtgtgctgtattcaggaaacccatctcacatgcagagacacacataggctcaaaataaagggatggaggaagatctaccaagcaaatggaaaacaaaaaaaggcaggggttgcaatcctagtctctgataaaacagactttaaaccaacaaagatcaaaagtgacaaagaaggccattacatgatggtaaagggatcaatgcaacaagaagagctaactatcctaaatatatatgcacccaatacaggagcacccagattcataaagcaagtccttagagacctacaaagagacttagactcccacacaataataatgggagactttaacaccccactgtcaacattagacagatcaacgagacagaaagttaacaaggatatccagaaattgaattcagttctgcaccaagcagacctaatagacatctacagaactctccaccccaaatcaacagaatagacattcttttcagcaccacaccacacctattccaaaattgaccacatagttggaagtaaagcactcctcagcaaatgtaaaagaacagaaattataacaaactgtctctcagaccacagtgcaatcaaactagaactcaggattaagaaactcactcaaaaccactcaactacacggaaactgaacaacctgctcctgagtgactactgggtacataatgaaatgaaggcagaaataaagatgttctttgaaaccaatgagaacaaagacacaacataccagaatctctgggacacattcaaagcagtgtgtagagggaaatttatagcactaaatgcccacaagagaaagcaggaaagatctaaaattgacaccctaacatcacaattaaaagaactagagaagcaagagcaaacacatttaaaagctagcagaaggcaagaaataactaagatcagagcagaactgaaggaaatagagacacaaaaaacccttcaaaaaatcaatgaatccaggagctggttttgtgaaaagatcaacaaaattgatagaccactagcaagactaataaagaagaaaacagagaagaatcaaatagatgcaattaaaaaatgataaaggggatatcaccactgatcctacagaaatacaaactaccatcagagaatagtataaacacctctacgcaaataaactagaaaatctagaagaaatggataaattccttgacacatacaccctcccaagactaaaccaggaagaagttgaatctctgaatagaccgataacaggctctgaaattgaggcaataattaatagcttaccaaccaaaaaaagtccgggaccagacagattcacagctgaattctaccagaggtacaaggaggagctggtaccattccttctgaaactattccaatcaatagaaaaagagggaatcctccctaactcattttatgaggccagcatcatcctgataccaaagcctggcagagacacaacaaaaaaagagaattttagaccaagatccctgatgaacatcaatgcaaaaatcctcaatataatactggcaaaccgaatccagcagcacatcaaaaagcttatccaccatgatcaagtgggcttcatccctgggatgcaaggctggttcaacatatgcaaatcattaaacataatccagtatataaacagaaccaatgacaaaaaccacatgattatctcaatagatgcagaaaaggcctttgacaaaattcaacagcacttcatgctaaaaactctcaataaattaggtattgatgggacatatctcaaaataataagagctatctatgacaaacccacagccaatatcatactgaatgggcaaaaactggaagcattccctttgaaaactggcacatgatagggatgccctctctcaccactcctattcaacatagtgttggaagttctggccagggcaatcaggcaggagaaggaaataaagggtattcagttaggaaaagaggaaatcaaattgttcctgtttgcagatgatgtgatagtatatctagaaaacccatcgtctcagcccaaaatctccttaagctgataggcaacttcagcaaagtctcaggatacaaaatcaatgtgcaaaaatcacaagcattcttataccattagcagacaaacagagagccaaatcatgagtgaactcccattcacaattgcttcagagaataaaatacctaggatccaacttacaagggatgtgaaggacctctttaaggagaactacaaaccactgctcaatgaaaataaaagaggatacaaacaaatggaagaacattccatgctcatgggtaggaacaatcaatatcgtgaaaatggccatactgcccaaggtaatttatagattcaatgccatccccatcaagctaccaatgactttcttcacagaattggagaaaactactttaaagttcatatggaaccaaaaaagagcccgcatcgccaagtcaatcctaagccaaaagaacaaagctggaggcatcacactacctgacttcaaactatactacaaggcaacagtaacccaaacagcatggtactggtaccaaaacagagatctagaccaatggaacagaacagagccctcagaaataatgccacgttatctacaactatctgatctttgacaaacctgacaaaaacaagcaatggggaaaggattccctatttaataaatggtgctgggaaaactggctagccatatgtagaaagctgaaactggatcccttccttacaccttatacaaaaattaattcaagatggattaaagatttaaatgttagacctaaaaccataaaaaccctagaagaaaacctaggcaataccattcaggacataggcatgggcaagggcaaggacttcatgtctaaaacacccaaagcaatggcaacaaaagccaaaactgacaaatgggaactaattaaactaaagagcttctgcacagcaaaagaaactatcatcagagtgaataggcaacctacagaatgggacaaaatttttgcaatctgctcatctgacaaagggctaatatccagaatctacaaagaactcaaacaaatttacaagaaaaaaacaaccccatcaacaagtgggcgaaggatatgaacagacgcttctcaaaagaagacatttatgcagccaaaagacacatgaaaaaatgctcatcatcactggccatcagagaaatgcaaatcaaaaccacaatgagataccatctcacaccagttagaatggcgatcattaagaagtcaggaaacaacaggtgctgaagaggatgtggagaaataggaacaattttacactgttggtgggactgtaaactagttcaacaattgtggaagtcagtgtggcgattcctcagggatctagaactagaaatatcgtttgacccagccatcccattactggatgtatatccaaaggactataaatcatgctgctataaagacacatgcacacgtatgtttattgtggcactattcacaatagcaaagacttggaaccaacccaaatgtccaacaatgatagactggattaagaaaatgtggcacatatacaccatggaatactatgcagccttaaaaaatgatgagttcatgtcctttgtagggacatggatgaagctggaaaccatcattctcagcaaaccatcgcaaggagaaaaaaccaaacaccgcatgttcttactcataggtgggaaatgaacaatgagaacacatggacacaggaaggggaacatcacacacttggggcctgttgtggggtgggggtagcgggtagggagagcattaggagatatacctaatgctaaatgacgagttaatgggtgcagcacaccaacatggcacatgtatacatatgtaacaaacctgcacattgtgcacatgtaccctcaaacttaaattataataataaacaaaaagaaaacagcagaatcacagggcaaatgtccatgggagctgatgaagagagactcagtattcaaagacttttacaacttcataagcaaagcttaagactcagtgataggctcacgtgatactcccggtcaaacctaatgagacaaggacggtaatggggtttgcctagaacaacatagaaaggagctattaccagatccacctggttgagggtaaatacaattcctgaatgagggaggactatagactaaactcaaaactgactgaaatattttacaattgcaggcatatataccttgtgtatttttcttatttacacattgtggtttcaataatcttcaataaatttattcacatcaacatcattctctagttaaagaatttctcttaagtcttattctacatgagtcattgaaccccaaattgagccaaatttcagattcaccaattaattgcctcctgatatttccttaccacccacaggcagctcaagttggacatcattaaaagtgaacttaccatttttccctagccctcttcattttcctagagaccacatttcagagaatgacaaaaccagctgcattgtttctaaagcccgaaacatggatggtgacttttatgtgtgcaaatatttacttatgtttttcttttattattattttttcaacttttattttggattcagacgttacatgtgcaggtttgttacatgggtatattgtgtgatgccaaggtttgggatacaaatgataccatcacccagatagtgggcatagtacccaacaattttccaatccttgtccccatgcctccttccccactccagtattccccagtttctcttgttgccatctttatgttcatgagtacccaatgtttagctcccacttaaaagtaagaacatgcagtatttggttttttgttcctgcattaattcatttaggataatggcctccagctacatccacattgcagcaaaggacatgattttattctttttttatggctgtgtaatattctatggtatatatgcagcatgttttctttgttcaatctaccattaatgggcacctaggttgattccatatctttgctattctgaagagtgctgcaatgaacatgtgtatgcatgtgtctttttggtagaacaatttattttcttttggatacatacatatcctccagtagttttatatatatatatatatatatatatatatatatatatatatatatatatggagagagagatatatatatatggagagagagagatatatatatggagatatacatatatggagatatatatatatagatatatatatatagagatatatatatggagatatatatatatggagatatatatatggagatatatatatatggagagatatatatatggagatatatatatggagatatatatatatggagagatatatatatggagatatatatatatctatatatctatatatttatatatatatggagatatatatatatggagatatatatgtggagatatatatatggagatacatatatatggggatatatatatggagatatatatatatggagatatatatatggggagatatatatatatgtatggatatatatatatatctctctctctccataatgggattgctgggtcaaatggtagttctgctttgagttctttgagaaatctctaaactgctttctacagtagctgagctaatttacattcccttcaacagtgtataagcattcccttttctccacagcctcaccagcatctgtgttttttgactttttaataacagccattcctactggtgtgagatggaatctcactgtggttttgacttgcatttctctgacagttatgtggagcattatttcatatgtttgctgacatatgagaagacatacgttgtatgtcttcttgtgagaaatgtctgtccatgtctgttgcctgttttttaatggggttaagttggtttttgcctgttgaattgttgaagttgcttatagattccagatagtagacctttgttggatgcatagtttgcaaatattttctcccattctgtaggttgtctgtgtactctgttgatagtttcttctgctgtgcagctctttagtttaattaggtcccacttgtgaatttttgtttctgttgcaagtgcttttgaggacttagtcataaattctttcccaaggccaatgtccagaatggtgtttcttaggctttcttctaggattcttatagtttgaggtcttacattaaatctttaatccatcttcagtggctttttgtgtatggtgaaaggtaggagtccagtgtcatttttctgcatatggctagtcagatatcccaggacaatttattgaataggaagttctttccccattgcttgtttttgttgagtttgtcaaagatcagatggctgtacgtggcactgtttctgggctctctattctgtttcattggtctatatgcctgtttttgtagcagtagcatgctgtttttgttactgtagctttatagtatagttttaagttgggtgatgttatgtttccagctttgttctttttgcttagtattcctttggcttctcaagctcttttttggttccatatgaattgtagaatagtttcttctagttctgtaaaaaatgacattggttgtttgataggaatagtgttgaatctgtagcttgctttgggaagtgtggccattttaataatattgattcttcctatccatgaacataaaatgtttttccatttgtttgtgtcatctatgattcctttgaggagtgttttgtatttctccttgtagagatctctcacctccttaggtagatgtattcctaggtatttttttttgtagctattgtaaatgagactgcattcttgattaggctctcagcttgaacattattggtatatggaaatgctctggatttttgtacattgattttatattgtgaaactttactgaaagtgtttatctgttccagaagctttggcagggtctttagggttttctaggcatagaatcatataatcagtgaagagagatagttagacttcttctttacctatttggatgccttttatttccttatcttgcttgattggtctgcttggtacttctagtactatgttgaattggttgaattggagtggtaagaataggcatccttgtcttgttccagttctcaatgggaatgcttctttttttttttttggtctgtttagtgtgatgctggttgtgcatttgtcatagatgactcttcttattttcaggtacattgcttcagtgcctagtttgttgagtttttttttttaatcattaagcgatgttggattttatctaaagctttttctacctcttttacaatgatcatatgttttgttgttaattctctttatgtggtaaatcgaatttattgatatgtgtatgttgcatgaactttacaccctaggaatgaaggctacatcatcatggtgaattaacttttcaatatgctgttgaatttgatttgctagtatcttgttgaagatttttgtgtctatgttgatcaggaatattggcctgcattttgtttttttttctttgtgtcttttccaggttttggtatcaggtgaatgctggcttcatagaatgagttaggaaggagtccttcctctttctgtttttggagtaatttctgtagaattgaaacaagctcttctttgtatgtctggtagaattttgctgtgaatctatttgctgtagagctttttttggttggtaggtttttttttattactgattcaattttggaacttgatattggtctgttaaaggtttcaatatttctttctgattaaatgttagtagattgtgtgtttctaggaatttatgtgtttcctctagattttgtattttgtgtgtgtagatgtgttcatagtcgtctctgagaatcttttgtatttctgtgggattggtgctaatgtcacttttgttgtttctgattgtgcttattttgatctctctctttttgttgttaatctaggtagtggtctcttgatcttgtttattctttcaaagaacccacttttagttttgttgatgttttttgtatagatttttgtgtctcatttcattcagttccactctgttagttatttctttccttttgctagctgcggggttagtttatttacctttttctagttcctgtaggtgtgatgttagatcgttaatttgagatctttctagctttttgaggtgggtatttagtgctataatcttttgtcataacattgcttttgctgcatcacagagattttgctatgttgtatctctgttttcatttatttcaaggaaattaaaaaattttcttccttaatttcattgtttacccaaaagtcatttaggaggagcagggtgttattaatttcatgtaattctgtggttttgagagatcttcttgatattgctttctgtttcattccactgcggtgtgagagtatttctatgtttttgaatttattgaaattcaataaatttgaatggctgagcatgtggttgacctttgagtatgttctgtgtgtagatgtgaaagatgtacattctatggttgctgggtggagtatttttaggtgtctattaggtaccatttgtcaagtgtcatatttaagtccagaattttttgttagttttctgcctcaatgatctgtctaatgctgtcagtggggtttaagttcggttgatgacttcttatacttctctctttcttattctttctctctcaccacctcatccaattgattcacaatgcctacaccttctattttctaacaaactcttgaatttaattgcgccttttcctctttcccagtgtctttaagttcacaatcctttcacttctaacctatgttattgtctttctgtctcctctgaccacattcctatgtgctcttctctttgctttggtgatttttctaacacgcatatctgatcatattacttctctgtttaaactccttcagtagttctgtagagcctttaggacgaaactaaactctgccttactgaattaagcacatgatgatttgaactctggttatctctacctcatacccccacctcatcttttgcatgcagtgctccacatgggctactggatcaggtcttgctatctttatatatgctgttctctctatcatcccttacttgtccttcacaactcagctcatgctatcttctgcagaaagcttttaaatgatagaccccagctatatagttaagacttcactttttctttgattcttcaatatttttccaattcatctctttaccacatctatgatatcaggcttttcttattccatatcagttatttattaaaatattagcttgctttttctaatgtccttttcctgtctctattctttgtctttatgcatatattaatatatgtctattggtgctgagttttggcttagtcttttctatatccctattttatttctctacatattttccatatgatgttttataaacgaggaaatatttcataaaggaccttataattccactttattaataacactaacctaaggaaagtccaagacaaacacattgaactttttcactaaattcttttaagttagtcttgctgtaatcatactgttctcagcagttaaacgtttagttgtatcaaagactaatatactttattggtgcataatcttcaaagagtcttaaggtctccaaaccagagagctagcacaggcataggtcagaagtccacggcgtgctcatgacttattgtaaagtaaaggtttctatttgtcgatgataagacaagtagactaagatcagcccaattcataaatttggtctgggtcagatgcaattcacagatatcaaccaatagatgtgtgaattgcaattgttagtggccttgaactgccccaccttgaatcgagggaaatcaatgtggctttgttcagcagtgactgcctgaaaggaccataaatcaggagcctccacagaacccttttattgtcaaggtaatggcaaagaaaaatgatagcagttattccatttacagagtttagccttttttcttcttcctgattgttgtttcttccagttttctttttgtatctgaataatcacagcatgtagcttttgaatttttttcctagaggaatgtgtgatataaaacaccataaagttcgcagttagaaggatgtcttaaataattttgtcaaaactcttatggctatgctgtagtttgaactggccaaccaaacggtcatccaaaattagagttttatacctttggtaactgttagccaccgtttctaatttcatatcgtaattatatgtcagacccaggccattatacatgctatctatgtgactgaaatttgttcattttcccctataaaaactgattagtagcagtagattgctgttggtaatgctatgatagtttaagtgccatatagtttaagaaccatatatggttctctatagtcatgatgccctgacatttttgtatgttgtggtctgttgtgtctttccagagatttgtcactaatatttctcaaggtaccaactattgtgagtttctaattttataaattagactagatttgcagtgatctctatgatgatgctgttactgccacttaatttctttagtgggagagatagtattgctggggccatttgtcccaggtatattagccaaatgctaattattgctcaatatctgttctcttccttttccttagtaaaagaagaccagatttttcaagtaggtagatgcgtggttagaataaagactatatttcccaaccattcttgtagatagatgtggccatttactgtgttctggccaatggaatgaaggtggaagtaatgtccagcttactgaaagtgtctccaaagggaatggcttgctactttttcttctttcttttttctatatgactggaatacagatatgatggctgaggcaccagcagccatgttggaccttgggaaaggaagtcacgtaagaaaaggaacagggtctcattctgtgtagcctcatagctgcccaactgctgtatttaacagatgtgggagagaactaagtttctaacttattaagcttcggctatttttttttctgaactaaattctctttattacaaaatacaaacaaaataaagattgagaactgacactgacaattacgtgtttcctaaattcccgaccaacatttctgaatgctgaacctttccaggtgggtgacctgcaggccctttaaatctaaatttaccaaattcagctcattatcttaacctcaaaattttctcctcttgtgttttttaaggtttttattaattccaaatgaaagccttaaaaacatctttagttcctacccttctctcaccaattatgtgagtgaaaccagcagagttaagattttcttctgaaatggtcttacaaaatcagaatacaatcttaagtttcttgatgagtttctgtagaaaattagatgtgtttattaacttgtgccaagttgttccttgctctttgtataactgtcccatctttacacattaattattaattttgccttatcagagttgctatttaatactttaattcaacttctggagaactgattgcattttgcccaaggtgtaatcccactttctgaaactacagataagttatatgaaaattctttaaaaatgaatagactatgtgcatctaaagtattcctaatatatttcatattcttttgatgccattctgaaagtgaaactataattcatcactttagtatcagtaataaacattaaaaaggtgttgcatctgaagtttgaaatactgtagtgtacaaaattttctttcctagaaagtgatgcttaaagaaatgttagtagtttggcataggtctaattctgaataattattgtcattgacaactatcattatttgcagctacccattatcttctaaatggccttcagaaatgatggagaaactgacacgttatgagtatttcctgccctacatggattttgaacttgaattcccagcctcgcttgcatctagacacaggcacgtgacccaagccccaccagtcagacaaacccaattgaaactttagttcaaaagcatccagtatgagggagcagtgaagtttgcattttcctgatgaaaatgttggaagaggtatttggctttgttggcggggagggcaatgatttatgcaaaagttcctaatgaaaaaatggctttgttctgggttgtagtgatataatcagagatgcgttccagcatacagtgctcagaggcagctgtggtagctgtggttttctcatcagcctgtctctgtcatgttcctggaaacacatctatatgcttattgttatattcctcagataagttctgagaaatacaaatcgtcattgtttatttacttatatttttaaatcaaatttctgatttattcatgtattccagttcatcctaagatggtgatgtatgcctcggtattgattttgctaaatttatataactttgataaatataaaacacatatattttagaaagtttattaatgtataattgacatccaataaattttactcataaagtatttaattttatgcacttttgcatatgtatacatctgtgaaactattaccagagtcaagatagttaatctagccatcacacccaatgtttctttattttattttactttaagttctgagatacatgtgcagaacatgcaggtttgttacataggtatatatgtgccatggtggtttgctgcacctatcaacccgccatctaggttttaagccccacatgcattagtattggtcctagtgctctccctccccttgtcctccacctcacgatgggccccagtgtgtgatgttcccctccctgtgtccatgtgttctcattgttcaactcccatttataagtgagaacatgcacactcaatatttcttaatgccttttcattatctctcctttttgcctactctgtctgtctctagttgactcttgatctatttctgtcactatacattagtttgaattctaaaattttatacaaatggaatcatacagtatggattattttttgtctagcttctttcaccaaacattattattttgaggttcctccatattgttgtgtttggcaatcaatggttcatttcttttcattgctgagtattccatggtatgaatgtactacaatgttttttactcactcacctgtatgaatatcagaatatttgggtttgtttttagctactacaaaataaagctgctaagagcattcatgtgcaaaagttttatgggcatatgttgtcatttctcttgggggaaaaaggggatccaatagtggatcatgcggtgagtgtatgttaggcttttcatgaagcttcaaaattgtttatcaaagtggttgcaacattttatattcccaccagcagtgtataggagtttcaattctttgaggacctcaccaacatttgccaaggctagtctttcaaattgtagccattcttataagcaggtagtatcatctcatggtaactacaacttgcatttctctaatggctaattttttgaaagatttccttgttacagaatcctagattgacagatttttttctagtagtttaaatatgtttatccttaatccttaatcatcctttcatcctcatcttttttctttctacatgtttcctttttttctcaattttcaagatttttctctttattaatggttttgggcaattttattataatattccttggtgtagttttcttcatgtttcttgtgcttgaggatcattgagcttgcttctactattggtttatagtttttatcaaatttagaagattttaaccactgattttcacatagttttctgttaaaaaattatttttcttttcatgtttcattttacagagtttccattgctatgtgtttgagttcactgctcttttcttctgcaatatatactttggagttaatcccatccagcagatttttaatatcagacattgtagtttttatctccataagtttaatgcttgtttttaaaaatatctctcatgactcaactgcttgaacttatgaaataactactttaatttccttgtcaattctaaaatttgagtcagttccaggttagttttgattgacttatttttctccacattatcaattatatttcctgcttctttgcatgcctggtaatttttattggatgtcagacactgtgatttatttgatgctagagatttttggtttattataaatatccttaagcattgttctaggtcacagctaattacttggtaacagtttgagccttttggatcttgctcttatgacttcttaggtggaatcagacccacatatagactatggctaattatttcccactattgaagcaaggctcttctgactctaatactctgtgaattaggaggtcttttagtttttctgttccctctgatctttccaggtggttcttttcctagccttgggtaacttcttcacatgcgagtgttgaatacttcagggagaccatctgcagatcaccaaagttcttgatatattctggatacatgtctttaccagtaatatgatttacaaatattttctgccagtcagtgttttatgttttcatgttcttaacaatgcctttgaagtcaaatttttaagttttgataaagtccaatttatcattcttgtattttaaggatcaagctttggtgtagttaagtgttatttttaagaattttttttaaactttagctagagtagattttgttgtttgcaagtcagaaatctgactgatatgataattaaagaaaaaggccaagagaattgcattttcattccataaattttgaatctaaaatgtgagtgagatactctggaatcataacaatttattctggactcatagtttctgttgcttgtctttgcttctgtcaaccagatggtgctattggattggctaccaaggaacatccttatctgaatggttgaggttgtattgatctaaaaaatctccagagataatagtggacagttgctatcacttcttgggttcatggacctcatcaccatcttatataattagaaagagcataccaccatcttggtgagacctcaaatataaaaaagagcaccctctaattaaaataccttatgataaatccgtgatttggtcttgggttcttatgagcaggtaaaagtactctgttgtattggaaatcatttgattgtgaaaaatgttctgacagagatcaataattaaattaagtgaaaaaatatattaatccataattaaggcagttaatccattatttattgtaaacaacttaaagctaccatggaattccaacatctgagcaaactctggtgaaataagaaaagaactgaattagaaaatgggagatccagggtaaagtcctggccctaacactaactagctgtgagatactgggcaactctcttttcttatctaagcctctgttttgtcatctgtaaaataagcatgggctatgtaatgtgaagttctttatgttttttctggacctcactgtctgtagagagaaccaactggaaataacttctttgctgccttaaaccagcagactttattttaggacagagtgagtagtttgttgctaacaactttgggggatactggagaaggaataacccgaaaaggtaagttggttgtggcatttgcacactttattaatttttttgtataatgtattttgtattaatttttttgcgtaatggtgcaatatatccatgggtttagtgtaaccattacatacataatgtacaatgtacctgctaaacaatttctcctctctcacctccttcctaccctcccacctttccgagtctccagtgtcttttattctacactctgtgtccacgtggacgcattatttagctcccatttgtcaatgaggacatgaggtctttgattttctgtgtctgagttgtttcacttaagataatggtcttcattcccatccatgttgctgcaaaagacatgatttcattctttttatggctaaatattattccatggtacattttctttatccaataatccaaagaatgaatgttcatgcaggcacatataaagtgcttggcattatttcctgcagtgggtgtgcctgaaggtgaggcagagatggactggaaaagattgacgtttctttgaccagcaatgctgaccctttgctctttactagaggcagtggcttcactgtgcaaaacaaatgtgtgcttagtggagggtacctgaggtcaagggctagccatatagatgactatgagggaaatgcagtccgcattctatgatagtcattactttttgtatattccgcaaagttttggtataccatattaataaaacagcatatgcaaaagcacctaccagaacagctgtcagaacgcaggcactcaatgaacataacttcccttctcccagcttccccatgccttccttctaacatgtactatgctctttatctttataaacctctggagccctcttatgggtctctgaccattcagggttctcagtttgaatctgccccaggctttgatttttttctatagttttacttttataaacatttaatgactgtatatatttttctttcttgaacctacatgatatctagctagtgtaaccaaagggcaatttatttagaaacaaggtattaaattaacttaactaatatttattgaatgcgtactgtatgctagttaatattatagtgatgagaatatagtaggaaataagattagtcaaagttcctgtctccatggagcttataccgaaataatgcaaagtaggactataattaagtagtggatatattatttttgtcatcccaaatgtatttatctgtttccttattttatggtttctataccccagtatttctatggggaacttgtcatccttatttgattggagtcttagtgggactgtacctaaaaatactccaatctcccttagctaattcatggatatagtaaaccatgctggaccaatcagattctctgttaggttgagtaacaagaaaataattggagtgaattcagctcaaagatggcactcagacaaggtcattgactcctgtttcctagaacctcagagctttactagttcttgttggttccaaggctttattttttggctgttctttctgtgcaaaacctccttcagtgtttcttgtttaagttgctgaatgtacttttgtgttgcttggaatccagtagtcctaacttataccaaatctggtaaagtaagaagtattagtttttacaatctctattaattccaattcaattctcaggtttcatccactgaacagacaggaaattaaatctaatttttattggaaggggatcctcctttcccgtagtaataagaactaaggagtctcttgtcatcatcagtcatttttctacttgggtcattattgaaatacctattatcccagcttctgtgccacaccaaggacaaggaaatctttggtatggctgggtatccctgagttaggcttcagcttctacaggcacaccatgtaaaacttagtatatataagcatatataatttctctgaaactttgtactttccagctaattattctgatgcaaaacctccctcagacaattaacttatctgagagactatgctgtcttttaagaacagggcaaactatcatgttcattctgtcttgttcactcacctgtcctctgtaaattactctggatttgtgtactgaactcaagggaacaattaatttattcattcatttagcacgcatttattaaatttttcatgtcttccaggtcctgcatgaggctttgaaattataaagaacttacagcttctgcttgatgatgactcaacagttagagtggggaaggtaaaagtttagtgagctggtggctaaataatcaaataattttggcagtgataagggacacaatagaggtctaaaagtaggcataatgggagcacagaggaagctcttgagtcgtttggagatgtcataccagtgatggcttgcaggagaggatagctgggctgagccttaggaaacaagtagaaatttgcttaatatacaggtggagtaggagtagtacattccaagcaaagtaaaatggagagagagagagagagagagggagagagaaagagaggaggaaggagaagaaggagcagcagtaggagaaagacaaggacaaggacaaggttgggaaaaggagactgggtgagagaaaagaatggcacgtgcaagaaaatgcaagcagtcccacatgactggtatgactgcaatgaagagtccactggggaactaatgggagatgagcatggaaagggaggcagaggacaaagtgtggtgggtaaagaatcagggatgagtttatgtcctttgcagggacatggatgaagctgaaaaccataattctcaacaaactaacacacgaacagaaaaccaaacaccacatgttctcactcataagtgggagttgaactatgagaacccatggacacagggaggggaacatctcacaatggggcttgtcgtgggttggaggggtaggggagggatagcattaggagaaatacctaatgtagatgatgggttgatgggtgcagcaaaccaccatggcacatgtatacctatgtaacaaacctgcacattctgtacatgtatcccagaccttaaaatatattaaaaaaaaaaaagaatgagttttataaataggctgtcctgggcgaaaattccagctttatttctttggtgccatggactcaaggaagttacttaactcagttttcttatctgtaaaagagagaaggtggtaatatgtccgttttaacatattgaaaggactaaatggatttatgaatgaaaagcacctagcatggggcctgccgcatagtagacttcaaagacatttttctttcctcacttccctgccacccctaccccacacaccctgaaatctatcacaagagccataaaactagaggttactgttaaaaagtgcttggtggatacatttgggaagcagtaggaaactgaagagagagaatgaagctgaattaaggagagcctttgaatgggtagcacagattgtacttaaaaatcacaaagatttaaacattactcaattgcaagcatagtattgaaatgaaaacagataccaatgatacaaattgctataatcttgtcactaatcaatcaatactgtaatttatctatgacatttctatttggtaaatgccaaaatctctattttcagtttttacagatttgcagaaatattacgttggtgcaaaaataattgtttttggcattaaaagtaatggcaaaaccacaattagatggcatatgtacctttgaatttttattaaaattaagccttgatatttttaagttattcaatagcctttttttctcttctttatttctttcctttcctttaataatactttgctgtatttctccacatatttctctatgttcataagatactatataaacaaaaacacctatactaagttgatcattttcctagaaatgtaggccagtcacatacatttctttgcaatttacttttcttacatacaaaaatataagggacctccagctaactgcaggactcccataagatggaacattatgcacatattgaaaactaaacatgagatctttagatctacaagggatctaagagatcacctagtctagtggttcctgatgtcacctcagtttaattattttcttagtgggtagagattttgaatgtgagagaagtgttgaaagttctattaaatattaaactggcaatgacagaaaaatagatttggaaggagtaacctggggccatctttcaggtccaactttaatgcaatttcctcaggaagtgtttcctgatatccctgaccaggataagtccctttctgagtgccttaatagaaccttctatttgttctttgttatgtttactagcataatattaataaattatttgttattgtccatcttatggacacgttcaatgtccatacttacccatgaagtatcgtggtaagtatgaacatgatacttcattacctaatatattcttgacagattaaaaaaggctgaaaaataaatgaataaacagagaattttttgtgggggagaggcagtcatacagctttaaaatttgatgcagtggagtgggagaaggttgcatcaggggctcagagactgatattttccttgtgaattcatgacacttaatgttaaattccctagcatttgaggaacataagcttgcatttattggtgttcttaggaatgatcagactctctgtatgaggttcgcagtaaccgaatatatagggatattgttaatttaaaatagaagctgtctctttaaagtgcttacatcctcaacacaagtcaccctgtttgtggagacttgaagtagtactcaattgcttgtttagtgggcatataattagaacaaatggaaggtgatgatcttgaggcacattttatctaggttgccttgtgatcagataaaacatatttaccccaccgcagaaaacagaaacttttttagtgatccaattgcagtctctctgatgtacccagaactactttagatccctataaaaattgtttttacacttatacattatttctttgtgtcaacagcacaattaagctttctggtaatattttaagtaaaatattgtacatttgagagactatctcctctcattatgtattgatttaattcatgtaatgctcaatcttatttctttttgtattggttaaggttcttctggttaaaagtaatggaaatcaataagtcaaagaaaaggtaatttattggaaatacaccaaggtagctcaaagaagggctggattaaccaaacaatagtgccttaggaaaagcagaaacagtgccaagtctggggatctcagtggtgaaccttgtgaactaggatgccattccaatggcatctactacgttgttattcatttagctcctagttcatgagtgtgggggaggcagatctctattttcctaattacttctgactataatagaaaaagatcaagaggatttgaaatagagtacagttagtactaggaatcaagacaactttttttttttttttttttttgagtagcttcctcggaaaatttgacaggacattgtggctagctgactatgagacaagaaacaaaaggatgaataaaaaacgttaacttttacagcatgagttattgagaaaatagtagtgtcgtgagtaagtttggaatgtggagtgctttttagggggaggagattattatatgtttggctttatgcatatttgaatgcaagatggtgagatgtccccgttaagatttttaaagggagttatagtgaaaatagaactgggaatataaagctagtgttaggataatcatgagaaagaaataactctctctggagctaattttgtatgtatttcactcttctcatttctttgaacataggaaccaagccttaatcatttttcaatctcctaaggcttagcacttagtaggtggaactaaaacatcatttagacattaaattgagtgactcagagagaaaagaccagagaaccaagaataatttccactttctcttgggacttgttcaaaatgttgtcttcctttttaaggctctgccagaataaacctattttagagtctacctcttttgataaccagagagtcaacctgcaccatttgttttctccagttaggtttatgcaatttgggaaaggttttttcatttaccttctcttggttgttggactctttgcattacagttgcttaagccataacattagcatcttgagagaaaacaatgagggattcatttcagtctgcattttcctttgaatctgacaaaaagaagaacaagtctggaaagatagcatcccagaatatttttgcttactcttcactatttaatcaatacttccaccagaagtaagacagaatgtcttacttcacattagaagtagaaaccaggttagacatcctgataataagtgaccttattgtggagatggatgaggatggataaaatatggattctatttggtttcatcttaactgcatttattctatccccattttattgcccattcattgctccatgtcagttcaattctattctatttcggcttgagatatacccacaatataatgctagacatttttagtcaaaagcattttcaaatcttgtcaccagattagtcttctcttcttatgcatttcacgtttcctgtagtaaattatagtgaatttaaacttgtaatggttttcaacttgtagaccttaaacattttattaaaagtgtaatataatatcttggtaagggttaccactttataattatttccattgataggaaagttgattctgaaggcaacttagtgacttgcataaaggcatggagtgatttagctaaaagttggacaaagtgataaaatccatgtacaaatggcttgttctattgttaagtaatacagtttttgatgagtggagttactgaacttttcaaatagattagactcttctgatttggaaacgtatttgtggaaaatgccaacaatttctaaatgattttttaaaaattccattgatttttaatactttatactttttcttccaacctcaactataaaaataaaattattcactattttctatcaaatttcctttcttatgttgcaataatagccaaactactgagcattgtgtagaattctgctaaccactttacaagagagagatttacataagattcttttggttctggcttgacgtgagggattaagtgttttcaacactgtaaactcatccataaaacaatgttgaggtgggtataattattttcattccttagatgaagaagctgaggctgaggaggttattcagtttaacctaaggtggtagtcgtgagtggcagtgataaaggcagctgttaaactgagtttaagaaacttactgcagcatcgtaaatactgcctctctttgtgccccaacttccattcacactctatttctgttatgcatgtagctaaccaccacctacttcaggatcaactggaggacttgttaaaaataaaagatgcccacctctaactgtagcaatttagatctggcagatctagtgtggcccaagaatatgcatttctaataatcattccttgcagttaattatgcacagtaagcttggacaacaattgccttagttaatatcagaaaaatgttcatgagaaagaaaactttaaaaaatctttattcttaagtattgtttaaatactttgacaaataactggtaatattgccctaaaaactcttgccatgtcatcagttgaataaaactacaaagtttgaaaactctccaggacgtgacttaacatttctgatctctaatatagaaaaaatgatgacagaaggcacaacttgtcggcaggttgagagatcatggccttggggctgaaaaccctggggaatcaattttagccatagagggcaaagacgggggaaaaaagtacgagctctggagaacagataattctctgccagtttgtaattttgaacagtactcttctgccagccttggctcctgtggtttctatttagcatcgtgtaatggtctctcaattgtcaagtgatttactagttattttaggatttctgtttctttggtacttattattccatgcctactgaaaaactgaacaataaaagtaatcaattgggaacattttaatgaggcaatccaacccaaagctttgcattcaagtgtttgttcaaatttgagggggttatgcctaccagctctgttttacttggcctactcaatgagaaaagacaaaaaagaagagagaatttctggtaactttgagctgcagaagtaaaggtcgtttatcgggaggagttaatagtagaatgctctttggacagatgatgtgcttagattatttacaatccaccaccaaaaaagatttggaaacaagattataatttgccattgataggaggtgaaactttagctagatggtaggatctcctggatgttaaagtttaagtacacatggatagtcaaaacgctattttttatgtttctttgtgtggtacatggttttctagactgcattattcttgtgaggtgaacaccttgaatacagtttttttctattatttgttgggaaaatgtatacttccatgttaagttagcagctcaagtttcccaggtcagcgagagtaagattttctgattggcttacatgatgctttcttccaaggatgtggagtactgttaactctgaaaatcacacaattctttggtattcttttaaagttaggtctctgattaacactacatttctgcatcatggtttttttatttaggggccctggggtgaaagcttaagcatttcattagtcttgaccagatcacaaagaactatgaggcattttagagagcatttaaataattttggagggttattagagagttcaaaacgttaaagtgaagcaacaaggtctgtatcgttgccaaatttcaagagaaaaggctaattagtctttgaccttggagctatttggaaggggaatgtgttgcttggaatgtattagattaaaaattattctgaagaatgaagagagcacctgataaactactatatgaatggctttatacttagcagttctaaattccaaattactcttgtttttaaatagttatacataaatctgaagtaactgcagatttttctgtttctctactgtatcctcttaggactagggtaatgactagaaagggaataagtatagcaatagctaactatgtctttttttttaattaaagtttttttaggtcaagaaagataaccaaatgctttaaattttcctgtagtggtatatgtcccaatgctcaaagttttgaattgctctattaaattaaattactcactagtttcgaaaacattggtttagaaaataactatttctaaataaacatatgtgtttaccagtgagtttaatgccaataaaacagttcctattcagggtgccttatatctggtaagcagaactaccaactgggcagagggccaacccacagtccaaatgggaaatattttttaaagttttgataggacacagtactcagttttaaagatcatactctgattatgattgaccgggtctcctaggttaaacaggtcttcaagaaggtgatcctgcaagaactaatctcagttattatcaagctaatgtgggtagtggacaacaccgtgaaaacaaggggccaattaacttgggaaatgtggggaagagcaacggtgagcggggagggaagtcgctttacaggtgtaagattttcttggagagtagtgtgaccatgaaggacagggaattgccacctggtgaggtctatctctgtctttcccatactacttcctatggatgagtcgtctggactcaaagaagaccttaatccatggaaatggtctctggttttctgaagggttaaatgtagatacagtaagggatttggagaattgaaatcccatgaatagagtcttgagattgcaaaaataacaacaataacagcaaacagtagctaatagttctctgacactatatgctagacaccattgcatgcactctgcctagaaatcacccatttaatcttcactacaatgctatgacacagataatatcattattctaattatacagatggaaaactgaggtacaaagagggtaattaggcaattttcccaagttcactcatttagcaagtggtagagccagaatatgaaccaggaagtcaggctctcgagtctgtgttctccggtacaagcttcacaaaggagggcatttcctaagacatatttgtaccagttgaagctgtgcatatcaagattcattgggctgtaaacagtgataacatgctttttatctgactctgtaaaactataaaaactcatattttctggaaactagtcactttaagtaattcctagttttgcagtttagaggcttcttggatgatccctacagctgtttctggaaggaacctgagggatcatgcaccagacagtggcctaccagggggcattaatcaaatgatcattcataaacactgtgggagcaagttcatttcagagtaatcagaaattatcttttgttcctccatctcttcaaaggaaagccactgggaaacagggcaaccaatcactagaactctctccacttggtttaatgagacagtgaatcgttgaattaagccagtgtccttaagctgcccttagttggttgctccttgattagtcaaagtgtaatttgagtgatacagccatgttggatgttcctgccacatattctgatgagttagcactctgttgctgctgtcacacagcttcttaaaagaagtgtcaggataccctgtggggaaataagcagtgtttcgatggcaaagagactgctcgcgaggggctactcatggatacacatgttgcttaggcgtccagccagccctgcagtgattgatggatgttctgctcccttctggtgtatcttcacttgtgctgggaaagggatgaagggcacctttgaaagaggaggaaccacagtaatcacttcatctctcttctgcttaatgcaaacttactctggaaagataaatgactatccactcctgtaacaactcctcaaaatcattactatatattgctgtgggccagatttgtgcatttctaggattgtcccactgtggcagttatcggctgcagtatgtagcattgattgcatgtttttgttaacttgaaagtatcttagaaggaataagcagtaaattttgaagaggtctcagtgaatctacttgacatggaaatatataattgatgagacattgtaatgggtttaaaatttacagtcataactcaggtatacagaaatgaaacattttatttttctgttactgaacttaggtcaagtccccatttgttcagttggctgaaaacagttacttttgctgtttcaatttaatttagtcacatacagtttattcagtcaaattctacgttctcttcctggtcccttctttgattatccttatagatgatctaagttactgggtggcttataggtcatcctggcatgaggggaggagtgtcctattccttgggtcttctttggtccttgcagacttttgctgagacatagcagttctcttctagcttggggacctcatgtatagcatctggtgtactgggtctgcatgggcctgcctaggcctctggactacatgctcaggctctacacctcatgccctaactctggctctctttcggcaacaggcccactgagcacttccctgtctttcctcaggggatgctcaagaactcatggctactttctgtgcagaaaatagactctgaaactctaggaggcttcttaagctcatctgcctgaaacataccccagcttttgtggtggtccttctgccatgcctgccatgctgctttggtgccatgctgagtgaggggttttcccaagggcttgtagtgttttctggctatgctttgagagcaggttaggcacctacccctgtcagaatgattcaataggctcaatctctcttaccccgttcccctcccaatccctccacatattaaaagctttctatctacctttttgcatttaaaaacctcatgacctcatgtttcatcccttctttaagttttatactataaatgctatgctgaatcatttgagctctggctcattggaacccacaaatcccccttttcacaataataccagaaagcctagcattccaggtttgtctcagctactgactttaaaaaagccagatttgaagatcaaagctgatgaatgacaatgtgattctctgatgtatttaccatctcctctggaaataaggaatgctggtgtttgtttcaatgggtaaggtaggaaacacaaggactcctggggaagaaaatacatctgctaatatttcaaaaacattatcccagctatagcactttctcttttttactacatgtacttaaaaaaagtttagtcccttctccctttttccttgttttttttttttttttttttgataatgacattgaaacttcctcattattgggtaaagttctacgcagcataactcctgcttttccaagtcagattgctgcccacctacagaccatctaaagtaggtgccaactgtgagggaggtgctattatgatcttcatttctcagatgagaaaacttatttggagagattacatccagatgcactcagctcataagtgacaaagttgggattcatggtcaggtctgttgacattatcctgccatttccaatgcaagtctatttcagacttatcatacatgtattaagttaaatccatcctgaatagactacatggagattaagttcctgcaaaatgactttatgtatacacaatttttaaaaactgcatacaagttttaacttggggagaaatcagttctctagttactaataacctcaatttttttttctggatagttttaaatatatgtattttgatttaaatagtgtttaggtacttttttttttttttttttgagatggagtctggctctgtcgcccaggatggagtgcagtggcgtgatctcggctcactgcaagctccgcctcccgggttcacgccattctcctgcctcagcctcccgagtagctgggactacaggcgcccgccaccatgtccggctaatttatttttgtatttttagtagagacgacagggtttcaccgtgttagccaggatggctacgatctcctaacctcgtgatccgcccgcctcggcctcccaaagtgctgggattacaggcgtgagccactgcgcctggccgtatttaggtacttctttagatataagccccatggattggcaatccaaattgagctagtagatcttcaaagaacactggaactacaaataccaactgtggatatttactgtcataaataacacttttgtagagaacactttaatttgcctgatcttatatccattaagagagaaatgagagtaagagagaaagagcgtaagaataaatcattggctggaaaccttaaaaaatttagattacttcttagattaaagttaaatagtaccagataaataaacatgaaaagaaagaagcctatgtggtgatttcactgtttcacatggtagaaacataatcagttgaaagtcactcatgaatttatatcatattcatgaacacaccagaaaaccaaaaagatataaagtccaccattcacttccttaatgataccagatgcatttaaataggaatttcttaaacttttgtactttgacatgctgataagctccagaatgatattatatattagctaaagatgaattatgggttttgggtttccatttccttaaatcaacagcatgttcagttacagcacattgctaagggttaattttcaaaccaatgagtggtgagaagggctagtgaaaataaaaggggaaaaacccaactataactggtaaaactctttctatgtgaataatattttttcttttgcatttgctgtgtcttctggaggaatgacagttgtgtaattcagtctggttggagagacaggcatagggttaataaaggatttgtgtatgggatggtgtactctagcatgaactgccatcctcctccagtggtgtgtctgccacacataagtagcataaataacatctgccaaaacagccctctgaagtattaagcactgacatacccgaatgctttctaggtgttacaggtgtactgttcaagtgctgtttaattgcagtcttaatcaaatatgatagcctgattccaaggtgaatgtcttataccattgatttgtagtaagtcgccacatttctttgaacagtgtgccattttatatgagaattataaaacagcaatgattattttaggatcagagatgttgtgattcatcaggtactgttgatggatgatgcatttgtgcttagtctggccttgcgcagaggctcgagtaatttgttatcctacaagacatgtgctgtttcctcttccatactactccccagtgctactaatattttaaggctaaagaacaacactgtattagatagaactacaggctatatgtaatgttaaatatatgtatttgtatatatgtgtatatcctctgctatacagatcaggtatcatgctaaaaccatataactcttaactgcatttttctggtaattagcaatggattatcttcccaaaaaatatgggttcttcaatcctcctggtcttggggagcacagaatgattcattatctcttctacattagccactttgtttgtggcaggatttgaaataggaatataggttgtataattacttaatgaaattcaaaattaataagatgccattttcagagttttttatgttgttctaatatgttcttcaagttttaaaagccattataaactttataaattcctatatttcctattataataaagtctgtatccttatttctttcaatatttatgcagatacatacataattatagtgccacatttgaaatatcctacttttgtatattacagattgcatgaaatagcccagaatggaggttcagttgatctttaagagaactcaggagaactgaattttgtattagctaaacttatttaatatattaaaatgatatacttatacattttaattttaatcctttacttcattttcttttttaaatagaaattatcttgtctacaatagcaatttctgtattggtgttttctcaggtaatgacattgatccctatttaattactattgcataattaaaaatcagccctttgacatcagtggggatggtagggctacagtgtacaacttattaactttcaaattatccaaaacatttgcttgcattttgttataatttctgtatgataagcatattggagataaagtagaaaataaatattatatattatcatacttttagatgaccaattttagcttcatatattttatcgagtttcagtaacatgagcagtgtattgctttgttcatcatgtgaaaaaattgaaacattacaaataagtttaagatcttcctatgggaaaaaataatttcctctatcagaggaaaaatttattactattatgataataccccttcagacctttttctagtcacttacaggtaaaaattgtagtactggttggtacatagtgtattttattaatgttttactgcgtatattgttgtataaattgctttccgcactcattggcatgccttagaattctttttatttaggcttcatgactaatttgtagtggaacctcaagaagatcacttatgtgcttcactttccacatatgtaaaatgggaataacaacagaatctgcctcatagtactgctgaagggtgacatggggaacacctgtgaggcattcagaacagagcctgtcatacaataaatgccatgtcagtgtttgctcttattctcagtatacagagatctgctttgatcttttcatcttctgcaaaatattccacaaattggcatattgtgttttgtaataatctctattgattattttcaagcaagatttggaattatccgcagtagtttcaaatgtacaaaaaagtaccttattttatttattttttaaataactgatctgatctacgagtctaatctggtaagttttgtcttgagtccagtaatgcagtccaatactccatttaggtaaccctgtccttgcttggtcaatttgttccacttttccaagtttgacctgcttaccctattcctcttcaagagggcatctggttgtttagtttacatgatttagtggtgcagaaggaaagggtaatcagattgatgtatcctctgagtcctccttgatatctgcagagcagctgagctggtctgctctctgtgctgttgacatctgctctttggggcgttagggggtctggtcatttgtcccttgtctgttatgatctacctgcagtggttttctaccttgtccccaggcttcttaattcttcctgtactctcagaacctctgtgttgtcacaaccagacttgggttattttgggtccccagtttccaggccctgaatgccatgggctctgtctcaggaataggtatctgctggcctgctgctgtcatttctactacattgctcctttactgccttaaagagtggtcctggatcaggggttgaaagtggaagtggaaataaaggacgctgatgtgacgtctgtgtttccattcttcttcctaccacttcaccagatgtgaaaaattcatataatctgaatcctctagtttgagttatgataagttaaagcagtttaagaatttaacgaactcccctctccctgattaaatctacttgttagcactgtgttcttactgcaaatcccgttgccttgccagaagataaatattaactttttctttctctttgccttcctgttgtaataattccaaaccacccaaaagaaataggtgagtttgtggagaaggtcagtaaaataatttcaaaagggaaaagaacattcatgcatttaaatattattcccactggttcatttatgctgcaatgaatatctatatatctatgtatgtatctatcattttgtgcacatgttttagtatttttctgagtttcatcctgaaaaaatgtaattgctgtaaggtatgcacattttacatttcactgtataatgacaaatcatgctacaaagtgactagaccaatttatactcttgctatgagtcactgagagaattctttactaacaccagatattttgcgtaacttattctgtttaaattctatcagcaaacctccatagtaggtgtattcccattttgtatatgaagaaactgaggttcggagttaaagcaacttgttcaaggtcacacaaatggtaagtgggtaatttcggaaccttttaaaataaaacatagaagcctactatcttattgttccattctagaaatatgtctgtgtttataatatcgactactttgtattattttaaactttataatattgactactattattttcttcacatcctagttaagaatctaggataaaatggaaaacgatatcacgaaatggaaaaacaatgttattccttagttagcttagtttaaacacctatttaatggtcaaaggcaagtagttgacctcccatctttttgactcacagtcattagttacacaagaaaagcagaacaaaacccagctggatggaggggtggatatgcaagtagctttcacactaggaattgtgaagcctgaggcatagccccaagactcagatcatcgggagtgcactcagtccagagggacaaatgttcagagtctgcatcacctaatattacaagcatctttattgagactgatagaagtgaatttctcaggtcagaaaacagaagagctcttttagctgagttgtgatatttaaaagtctctcattttgaatttcttgcctggccaatcaaactgtcctcccagaacaaattgttggataatgaaatgcatataatgtagcttgagagcgctgtcccatttgcagcactggcttcagcctgaggcacatctctggctgctcctttctatctataagttaaagcaatggcctcagcaagcagtacactctgtacagcagctgcaactcgttatcggctttgtccagaataacaaacagaacaaacacattttgcaagggcttttacccctcttatgtagagaaggaggaattaagcaatcagtgaaatgctgattgatcagttgtgctgactaagagaagtccaaggccacattagtactattaagccctaaaaaacaaagcaaaaagaaaatgttcttagaactttatttaaaccagtatttctgtgatgtgaagtacatttcccccaaagggaaaaatgggaaaatatttgcatttcacttagtacactttactcatccagactgctttgtaatgtaatgatggttaagtatttttacaaagataattcatgttttttggcagattttggttgatcatggagtatcagggttgtgtgaaccaaaggtgtgatgcagagcagctttagtaaaccatcccattcctatgccacccgtttgatttcagtaccaactgctgtggccacatctagaccactctttaccagaaactgtgccaccttcaaaattccagcatccttttcccctcctcccttattttttgatctcatatactcaagtattcttagtgtaacaattctttgagcattctttcttatctagcttaaaatctagggtctaccattataatcattcctttcaagataaccttaacttccacaccccaatttctaactggcctggcaaaactcagacctttggtgcaaaatcctccatctctatgcctgagcccttgtgtttgagaatggctgaagaaaaccatgtgcatggacattctgatgtcactataaattcatggtcacggatctcaaatgggagcccaagactactggctttcctgctgtggttgtctaatgacagcatgatcttactcttcacagatattagtttaaactctccaaccttcaattgaaaagtctacatcttactttattagaaagtagaaacaatcaagggttatgctcccattttcacactaccaagtaaacaaaccttcagtaagagaagatatatttcctatatctcctcctaccctcctgttaaaagggtgcaaacgtcccccctcctaacaaaaaccaatccttcttcatgctctttagatgccgtgttgtctctctttctcaaagtcttcattttttggttatactctttctctcatgcaaatttttctctctttttcaagtagagcaggctcagcagcctacaaacgtgtcttgggcacctttcatcaaaaaataaaaaacataaaaacaacaaacgaaacccttcttggctccacattctcatccagtttctattctttcacttagctgcttttcttctcatgttttgtctattttttaacatcctagtcactctctgatctacttcagtttgacttctacctccatcacttgagtaaattcaatacatggtttcaagtatattctagccctagcctgatccacagggaaggttctggaccacaagcaacatggcagagttgttcactcttgaggtaaaggagtttggcacctcatgcccctataatggattaaagaaacactccttaatcggggttagtccctgggaaaggttttaggtgtgagcaattagcaaccatcacccacagtggctgggagaggggggcactagcccaataaagaggatctaagtagtgcacccaagcaggtctaccacagttagcttcctatgtgggctcacgttgcatgcagtgcatctctatacagcaattaatctatttcataatattaataaaataatttcactttccatgttaaaatccttcaatgacttcctattgcactataaatggcaaatcaatatgttaacatgccctgccaacacctacagggtctggggtctgattgcctttcagatctctcctgataatctcccctgcttggttcaatatccttctgtttcaccaggaagatatcatcaatttccagctcaaagccttcacatatgatgttccttctggctggggtgcttttcctcccacatgacccatttaattaatatgtatcattcacatctcagtttcctcggactgttttaagcatccaatctaaattttgttctccactattattttctagcaaaacagcctactttattcctgcagagtttgtaatcatatattgtaataaaatttgtaattatatattgtgagattgattactaagctgtcttaatatactgaaagctccaattcatttatatttctttagcatctcccatgaggtatcatgaggtttgggaccatgtcatttcatttcaccattgcctaatggggtatctggtatgtaataaaagatactcaacttgttgaatgaataaataaatgcataaatgatgaataaattagatacacaaaattaggacgtcaagaaagaatcacttccccccctcccgcaagttattccttaacaattctcctagggctatcagcactgggacatgagaggtttaatcaaatttgtgttcctttggtgctctcttctgggatcatagggcttgatggatattctctcattaactcgtacacatccctgccatttttgtgacactgatttgcgcagtttttagagaaactgggaaataggaagattaatagacttggctgaggatagaatgaggttatgacagaaccagggatagagtgtgcttctacttattgactagcttagcatgctgcacacttgttagcagttaaagaaaacacattgggaatcagtccatgtcagtaggtacgtaatcctggaaacttccttctgaaatgtattactataaatattctttctctgcacacagctcatttgatgaggtacatctttaggccaagagctcttcttgatgattaatcctactcaattttcttatgagaaaatgatgcacacaaaggttaaataactcagccactgtaatagaatgaattcatgtcaaacctcagctctgaggcttctagttgacctgtacaaacatgtagctgttttccatcttcatttcaagaatgttttatatatttaatattaaaactcctaattctgcttgttgctgagcttaactctatgtaacatttatatatgtaaatattacttgaaatagttttaaagccacaaattattttcaactggatttaattagaattttcctcgtactagtttgagagggtagctattccttgacaatctttttcttcaggctgaaatataaatgcagataaaatttggagcagaattctgccagttaatttaaactggggtatggcattctgaagtataatataataggtatgtaaaaatggttgttatatttagtcttaaagtttaagatatttagggaatgtatttactgaggaaatacgttgactttgagaatttctttatggagttgaagtgcctagtacattttttttttctcctcatactaattctaagtcaggtggtccaacaaggcctctcatcctattggtattacagtatgacctgtctcctgaactttgaagccatttctttccttcagaggagataagaaaatgtgtcttatcttaagtctggaagaaacacggagcccagtatcaagggagtggagtagttcttttcccagacgtagcacagggtttttcaagcctgaagaaaaagattaatctccttaaaacaaggctttgttgacttgggtctggtcatggcaatcctgtttccagccatcctgtgtataagctctaacggtcagaagtttgtttgctttgattttgatgtggctcatcttttcttagctgctcatattcaagatttggaaaagaaggaacggtggtgagctgagcaattaattggattctgataaggagttctggagaaattttattattcctgagttttaaacccgtgtaactttaatataactttggtatgagcctttacattttttctctgtgtttttgtaattatattgtggcattcttattgggtgtggtagtagcaataaattataaatgtatgaatttatacattatggatttataatttcataagtttttgagattttaagacttactattttttacacgatgccttatgtatttatagcatttaatattaatctaaattcattttgagatatattttatcatgcttttatcttttatatgttattagaaagcacttggtattttaaaaatatatattaatgtgagatttcacaatttataccttgtctttgtagtcacatgcgtagaggatatttacaattttactcaagttaatttgctcagtgttgatcatcagaccttttagccagtattggctgggaaaaaaagtgtaattctttttgttctcttgagaattttttggatctaaagtgattcctagggtgtgggtcaacttctatgatatgaaagatgacatggaggttttttattttgtgaagtgcattaataggtgatcacatttcatcctgggagagctgctggagaggaatattgatttagcctgttatggttgagtctttggggtcttgagcttcttagatttttagttctttttgttattctttattgttcaatcttgagagtagaaaatacacatttttgtccacttctaagaataaaactgaaaggcttctcaagagggagcttttgagggacaagtctgtgttccagacttatttttattctcggatctagcaccatgcttggcatgtaaaagggctttaataagtatttatagaaggaattgaagaattaattattacttatggactatgagaggtcatggttgttactctttctaatttgtcgatattaaacagagacagtgaagatactaatttagatcacacaacgtgaatgaagcaaacaaaagcctaaagctttagaaaaatgaatatattatatttttaacttcgcactgtagttaagcagtgtggagctatttaatgatttcaaccaggaagatattaatgtgtgaaataagagtacgtggacagtatattaattgtatgatacaaacaagatatacatacataaagttcattaaaagagtatgatttcatatggctttgaaggattgataggatatagacaaattgataaaattgatctaaccaatatttaactttaggtttcttcatcagataaaatattgcatcattttatgttggctaagtgatttgcagtctatttcaattaattattctttatagtttttctctgtcaatgccatttaataaagagaaaacttcagcagacagaagttatatgatctttggcactattggctgtgtgttaagccacagtaaggttcagttacgtattttattgttttataatcacacatttctcctttgattcatttcttatctacaccccttctttcacatcctaaatattttctttggataaatgtgtagggcaagatgaagaaaagaagagaaaaaagtagtcagagcttgggagtactgaaacgctttggactccagccagctgccatcactgaggtggtgaaagaacaccgtagtataactggatggccctggtccctgccaggagtcaggatggactttcagtgttgaagagccatcttggcctgttactagcgctgccccacaccattgtgtttgcctaagagctgagccaaagaatttacatatgtatgagccaaggtctgaaaatagaagttaaaaaaatggtgctaaattgacatatttgctattttatttttttggtcagttaatatgataaacttttatttaaatgtaaacattattttaaaaagcactttgttttaaataactgattttcattgaaattaattctggcctctaagcagagttagctacaaagacaatttgtaaaaatgcagaaaattcagagtttaacttggagttgtttaaagtttattttcatatttgagtctgatatttcagttcactgtaatatttcaatttatttaaaatattatcaagacaaatattgggttaccttcacaatatttttttcatttttcttaccccatatattaaaaatgaacaaaaatgaaagaattatatagtctagtggatggcaattctcttggtacagtactcacaggatgtcagaagtgctttgatttgcatgcaaatagaaactgcattcctaaaagacccttaattgaagatattaataattttcattaggttttaagtcttttaaccttatcatatggatagaaaagtaaaagatgtgtttaataaaatgtcttttacttatttttatttgtcatttatttaaaggtttattagtgaatctgtttacctggaaaatgtgcaattctatttgcaaatttggagcactacatatatttaagagaatccttagtttctgttgggagtggcaatattttataactgggccttcatattcctatgttacagccctggtccctgaaagtcctacagctatctttgtttcaagtgtgtatgtgttataataagataagtgttaattagttaatcaagtactaattaacctttttaatttatagaaaaacagacatttatggacaagtaaatttttggggtcaaagtctttaataatttgaagaatgcagttatttttagcacaaatattctaatgtgaaaagaatttctttttctgagttatatatttttatgccattcagagtcactaatatagtactaataatactttttctattgtgtacctttgtttctctcatttgtcttacattttatgtctaatcatcatttcacaaaatttctatcattactgcttgacctcgacttctaacatggcaattaatttttatacacaaatttttgaaatcttgacagagtttttaacttcctcataccgagttctttgcttttttagtttacaagatgttcaagaatgctcttttgaaataatcaattacctaatgcaagataaattagcaacaacattacatatttttcttactatcaactgagaatgatcttgataggggcaagtataggttaaaaataaatgacatcaaaaaacaataccagaataaaacatttaattcttcaacactcaaaggcatgtcaggtattgaaatccaagtaggcacttttgactaattgttagtagtttgtagaattcaaggattagggttggcttccttttgtctttctttctcttcttcctccccttcttcatctccttcttgttcttcttttttttcccctctccagatcactaatcttctccaacaaatttttagcctatataaaataaaaaaaggtactcctgccctatgactcaacttacaaatctacaaacctggaggaagaaatagctctgtgatccattcctggggaattgcaataaagttttagggaagatggaacttaatgtttgtgaaagcacgggtcctatttccgatttccaggagggtggaatgtatcttcctgaatcacattccgctgaaaataggaggccatggaagaaatcaggttcagtataacaaattttctacaaaagggggtggagtaggaatgtgcgtaggtgacctgttctctacgtcattccagtgtaaactactgccccttacacttcacgaagtcggtaacttcaagacatgttgcaccacatgcttctctgtgatcctcaaatatgtttaatttaaagagggtccagtagtgtcctggcacatgatctggattgccatagataaccatctacctcacagctagggttgctctttagaatcttgcaaaatcatttgtttactcttgacaaaagttaagaaaacaagcccatcagagttgtttgttctgtcagcatgttagaagatggttttgttgcaatgataatcgttgtgcaaagaagactgatgatgatttttttttacattttcttaacagtatttgctatttagaatgaatgttgtctaattatttagccattttattttgtaaaatttatgttgtaggcatatttagaccaagttataagaaaatgcttcagccaaaattaagtgttgagtttgatttgtgtaattgttagtttctttactagttgttccatcatttacacaattatttctatttgaaatgcagtaattgttcagaacttatatttctatactgatgtctactaacagctttagatcaaatattaaataactcaagaataatgagatgatcttggcttacttagatatttggtttttatatctatagaacaaaggaattagaaaataattttgaagatttcatccagctatgtaaaactatctagggaatacatttactaggttttcaattttctacaaaacatctttcagcagaaagcaatcctgtttcctgatatacaatgtctgatacatagaaactactcagtacataattcctgaattgattattcttttggaaatcctagatttgatttctgaacaatcataaacatttaatggcatgaaattacccagattccatggttctggaatacataacttcaagcaataagatgcaagatagaaacatataagacattctttgctattttaggtaagtccagctgaatcagttaatcagctagaaacgtggctcacagatgaattagttttattattaggtggattactgaaaaattaatagctttatttccgtattaccttatcatttatttaatataaaacataataaaccagagaagttgtggttactttcttctgtctcattgttcagtttttactgaagttatgttttactgattttcacgaaatgcaaatatttctgagcatcagaaatccagcttttgctacctcccactcatgtattcttcccatcaaattgaatcttaaccaggtcactctttcctgttcattccatgctgttgcccctgttttctccagatataattgacatgctccaagaggatgaacattgcctaagacttgatttctggtcttggctttgcaacttactagctgtgtgaccttgaacaagctacttaattctctgagactcatcattattgtttataaaatagggatagcattagcttatttcaagaattgtttttaaaattagcaaggaaggcataccaatgcctagctcaggggatcaacaagtggcaagtacctcaactttcaggcaagatcatacttatcatcagtggagccaatagaacagatttatttaaataccctattttcacttactggcataacagcaagtggtgtacatatttatatatctctctatatagatgcagataatatactaatatattgtggttatatcttccaatgttttagtttctattgaggggtctttcttatttattacacaagaataataattattatttttttactttcaggaagattgaaagactttgcttaggactcctatgtgacatgattttaaatttaatagttagctcatggtcaaactccatttttagaattttaatttattcaatatttagctttttatgtgaacattgagtttcttttcttaaattccactctaagttctgctttctatattgggatttttaaattacagcttaacatgattaactttgggcctcttgctatgttttataattgctatatatgctttttggctcatttccatataaatcaatcctctacaacttttatttatttacagcttgtttttctttctctttttggactaacttacacgtgacctccctttgggtgcactttgtgtttggctatgtcttcaattttccaaagtcactgaattctgaatcaactttctaaggcatttcccactgttcttctcatttcacaaatacacaagaaacttcgtgaattcactggataatccactctgtccttttacattggcaataactcatttatatacattctttagcaaatgtgtatgcacataacattggcctagaatatatactccatgctgttgaattaacatctaacatgtctacttggtctgggagtagtgtcttttttaagcagaaattagcatgacaagatttactgtttataaatacatgctccttgtactgactaacttgttctccttaaggtgtttgcaaatggggtcttatgaatgatagctttttttttgttattctagaataaatcacatgtgccctgagctttaatatgtgaaaccaattttacaaggtctcttttccagcttcatttttcaccttcttttgtatcactccaaactttatgttatcaaatgttagattgataagcatattcatcataatttgatcctcactttctattcctcaaaatgccaattggatcttaatgaataggttttacttgattggatttccaaggatatctggttagtttgaaccctcatcatctaacaacatgatatctgtctgtcattttcaatccttgacatattgggaaggttttcaaacaactttaagtcttcttcctggccaaactttgaggaatcctcctaccagcttgtcctagtttctgtgataggagaaaatgtgtgccttttacatgggtacaatccacaccactttccctcagagatgccttcttcatccatatctttaattgtgaccgtgttccttgttatgatactaaggctaataaaaatcatagaactgaacccaattacttctaccttttatattctattttcacacatttctggtcaaacacaaaacagtagaactttcttcagggagttattgcacctccttttactctgaatttgtttgctctccagtcataccttactccttgctttaatgtatctcttcaaaaatagactttatagaattattgattgccaggttttttttttcatgactcctaagcatccttatttcctctcatgcttaactgatgtaattttatttgttcctgcttaaataatcatcactgatcaggcaggaattaagcacacagcaatccattcattcagtcatttttccagaagcatctcttgcatgcttgctatgttagagactttttgatagatgcaccaacttcttagagttgtttctgattcattacttaggaacatttcaagagggcagttggaagtctctgtaccttcaaaggaattactaacacccttattttctcttcattccaaaacctaagacctttattctctaagacatcctgttctcattttttttttcaatctgtagcaggtcttcccttgcttatgtcagtggactgtttaaatgaagagtggactgtttgagaagtggactgtttaaatcagtatagacacaggctgtcagtgtttctttatgtttcctttaaagacattttcgtaatgattaatataaatgagttaatggaaacaaaaatgtaaacagtagttgataaaagaatagtatcaattaaaaacatactgtgaagtattcaacttcaccagtgatttaaaatagaaatgaaagcaaaataatattttctacagcggagcaaataaaatgaaagataatacataatgttggtgaggacatttttaaagggacacccatatattgcactggtatgtaggtgagtacactctctttggagagaaatttgtaaatagtaatcaaatatggcaatattgacatgcattgtagcagcaatgaaaatggaatattttgtaatcatttaaagtaatgttttaaaagaactttgtaataacatcaaaatacatttaacataatattgcctccaaaaagcattatgcaagtcaatggcaattttcaaaactatgttctgagcattgacataaatgctagaagataatactttagtgttaacagagattatgtttgtgtggtgggttattatctattattctgtatttccacatttctttaaatatcaaatgaaagtgaatacaacctagtacttgacattttaacattttcaataccagatatgtcaataaggaattcataaaataaagtgccctgagggatttcacaggctaaatgcttctattttttaaaatgtattaatagaaaagaagactaaatctaaaaaaaaaaattcattttatcagagagtgactcataagtttagaaaacctttgatgacctggctcacaaagaatgtacttccaagtacacagggtccccagcctgatgtgtgtgcctgcattcatgcctgtcactctgctcagctgcgtgcagacagcttatatgaaggaggactgtgtacatgtggtcagagaagaaaaaaatgcttattttttaaaatgttttgaaaaataatctgtcctaaaagtgtaacatttccactaaattttttcatgtctgactttaacattccctaccaaccaactcttatagcctcaactcctttgatctatcctaatgtaaactccctcactaatgtgtaatatatttttttccagtttggttatagatttcagtctagcctgaacactcaagtatgaaactagccactattttatttattggctgttccaacctccattgtggaattataattgatggattttccaagtctctaattcagaatatttaatcaaattttccaaaatttctgccttctcctccttcattctgatgactaaagacatggaccataaaatatatatacatatatacatacatatgtatatgtatgtatatacacatatatatatgtatgtatatatacatacatatatatatgtatatatacacacacatatacatatgtatgtatatatacacacacacatatatatatgtatgtatatatatacacacacatatatatatgtatgtatatatatacacacacatatatatatgtatgtatatatatacacacacacaccgtagtttgcaagtctgcatctgggaccctttactgataaaaatgaaagcccattaaaactctcatgcccacatttctctctagactttagagtaggagaattctatcctagaattgttgattgttgacatttctatggaaaaacatgtttaattcatcatgctttgtagtcaactgctataaatggtgatgaagtcttttccttggtcaagctctggactcctcagtacttccactgtcatatttgattaaaacataagtgatgaagggaggaaatatattatagtattcattgcatgggtaccttagggtaatgggactatgactgatttaaatttattttgcatcctaaaaagtttccattagtgggtgcagcacaccagcatggcacatgtatacatatgtaactaacctgcacaatgtgcacatgtaccctaaaacttaaagtataataataaaagaaaaaaaaacttaaaaagaaaagtttccataatgaggattgagtttatatcgttttcttaattaaggaaagacaaccctcactacacacacacacacacacacacacacacacataaaaagacaagaggtgagatcaaggcgtaaactagtattggactaagccagtaagtactgcttctcagtcctcagttctctaggttgggagttttccttttgctattttcattctcctccaattcatttttcaatgatcttcaacacaaatttcgcctttatttcttgttcaaaatacttccatgactattatgaatactatttatggatgaaggctgaacattttaaggcatactaagtctcccatgatatggtaccttttcattttcccattctataccctgcatctaggcttttaaaaaatataccacatgacttcatgcctctaggctattgctcatgccacggcatcccttctgggttttttcccctctttatctacttggtgaatttgcatccttcagtataacacagctcaacataattctatgcttaaactttactgaaaatgcacaaggaacttgatctttctttcttattttccccattttatttattttcccattgcatttgggcaactttcatggcaccagttattttattaattatttgtataaactagtatgagcctattttgtttagctttctatcaccaggagccatgaagcactttgaaatcaaatactgtttgtacttgaatatattaagtaagcgtgaggacttaaattaaactttgttcctctttaaaaaaatccttaccccaactctagcactgattctatgttattgaagcttacaatctttatgtcattttctgtcatcttttctgttatgagaagacctaggtatgagtctattgcctttattccttggccttctttgcaagggtatcaaagaacactgctgcagtacttcctgttctacatagtcatgtgacttaagcaagagcatctgccagccagtgaggccccttgagagcctggttaaacatgggactgaagggttaagtgaatcactttttattcatgttgaaatatgaatgctgaagtttggaaaattttatatataacattttaataactaaaaaaacttgacttaggaatagtgcttatattaaaatcagtgtttgtcattgtttcatgaagtttttacaaatctaagaggcttaagagggatataatagtccactttgctttagttgtgttttacttgatattactgattgctttaactttgaaacacagaacaatgctatagtaagaatgtagtatactactctattaacccaaaacataatatagataggtttattgtatatttgtggagaaaagtttattctaacgttctttttacaaatagtaaaaatgctatttgtaggatgctctgatttttactttttgtaaaaagaacattgtctttttaccccaacagaaaatggcaagcgttcagctttctttgggaatccaaaatctcttatgaggcatattaggtatcacatgtgacataagcaaaagcctgtgatccttagcatgttggaaagttgctactctttaggataaggttgtccatgatgtctaggtcattccattcagctgcataaacaattcctttgatggatggctggttttctacaaccccagcattattttagcaggagaaggtagtatttgatgtgttgcaatttgtgttacatgcccatggaacatctctggacattacctcaggaggaggggttaagagaaggaggagctgtggctgaagacatttaatggcagaatgaatggaaattcaaagatcgctgtgcagtcagccttaaacactgactgcacccctcccagatttcttttacattaactaaaaagtcttatcacacaatctcataaaatttatgtaatttcatttaattttagccacaaatcatcaaaatgacgaggattttgacagctttcaaagtggtgaggacactgaagactggttttggctttaccaatgtgactgcacaccaaaaatggaaattttcaagacctggcatcaggctcctttctgtcaaggtaatacccatattgattgtttctgataaaatactatggggtatagtttagcagtgaagcaaaggtgtcccttacaaggcaaatacagttttgaatgtagctctgaagtactaatgtattaatgtttcctttactgtggaacctactgacttagcaaatgctaatttttatcttatctgagtaacatgacagtaatttttacccaacataaagaatgatgacaattcttgtgaacatgtaaaatgtaagtacactgcttgaaaaagaaacatcttttctttcatagatagctttctgtgactagatactattgcttacagtttggatttaaaaaatggagctgcttatatgtgtgtgagccacattatggtacacagtgtgttaaggtctgttctataaatagggcttactgaaaagttctcttttgaaatatcatttaaacattttaaaaacataattagaaaatatgtgtttttgagatttgcaggtcatcatgtagacactgctttagctttttccttttccttctggctgtttttttgggcaggctaaacttattattttcattttgtagagtaatacatagaggcagatagcagctgataattctgtccctccacaggtatctataattgagagggcaagcccaggaaagaaacattaattgcccttcttcctgccccccagcattgaattatgaaattcctgtaggaacctctgctccttcctgcaactttatgaagacgttcattatcagagaagcctgaagttactccataggaactttgccaatgaaaataatctttagtgactataagtttaagtaattatattagctttagatatattgcttctttagcagcaaaagctgtaaaatttgaaatagaaaaaacaaaagaaaacctctgtctgttgatgtgaaaatgggaactcacagtttggagtgttctgcttatactttgcatgctcattgagttgactaagcttctattgtttcagttgctcaagtcaggattcagtggggttttggtcctgacacctgcaaggccaaggaatattcatagattcctgtggctgccagggatagggatgggaaaggaatgggagtaaaagaaaaggaagagagatggagacagggggaggggaaggggagaagtgtgagggatgggagggagagagagagagaaagagagagaaactagctcaagatcccaggagaaaagaggaaatacatatagtagccttagtggtgtgttaacaacttcagcctttaacattgagaagattctaacaagagtataggaaattaccattttaaattaagaaaaccagaaaggaaaatgtcttttatgttgttacatattccaatgtatccaattttactctttttaaatggacatcatgttttaaagatagttaaaatcattaggatgtagttacataatggccataaagggcactgggagcagtcactaaaggttagtggcattatgtctagttatatatattttcttgaatttagcttaattatagcaaaagaatgggaaaggagaatattctaaactaacatcaaagacattgtaactagatgtaaactatgagaatttattgttagtaatacctcaaggtactcatgtatcagttcagagaaaatcaatagtaatgaaagttatcccctatgattatatgtgccatctaatacttcaaagttgggtgacttggaatatcttcttctcactctgtgagaaggtaggtatgtaggtaaggataggtgcatcttcatcagaccccagaaaccgcgaaattgagtacttacttaaaatggcacagatatgattgaaattagaatccaattctccaagatcacaataagtgctccatacaaccaccaccacaatcacaaccacgacaaaatggtctaattatgtggatggattactgtgaaagcagttctagctcatggtgacagatctgtttcaagggtctgtcacagtgcacagctaagaatgacaaatttgtaggagcactaagccatcatttcatggtgtaaaagccattactcacactcaatcattactggccagagttttggaggaatgccaagcacaaaaaatagaagttcttgaacttcacaatagtgaattaaaattccatagaacagcccaaggggacttgtgttattattcagttattgtgaaatagtcctctatctacttttcttcctgccttcactttaaaaactcaactgtcttagaaaaatatatccaaatttactatttttagatggacatcatattttaaagatagttaaaatcattaggatgtagttacataatggtcagtgaagggcactgagaacagtcactttaaaggttagtagcattatgtccagttatagatggtaaatggattgggaaagacaccctgtagtcacatctataatcattgccctgtaaattgggttgctttttcgacatatttagaggtttgcttttcctctctctttgatgacagagacggtgggtttgacgacagcaatgacgcacttataattttatgtggcccttccctgggtatttgtcagcggctaatatttatagagtgctttgccaatcggcacagttgtattttacttacaggaaagaggaaagaatttcaaggtgctctatattttaaagaaagttgatatcaagggtataaatgatcaacaaccataaaatactaaatactaaaaagttttagataccataatctttttccattagtactgaaaatgttcagcactcattattacattcagcaggctgtaacagtgtaatagtgggatatactctggattgggcacaaaaagatctggaatctaacccctgttatgcatttcctaatgccctgttcttggacaagtcacatattctctgaacctaagttttgtcatctgtatagtgcaaatgatgactgatttacttgacaaattatgtgattgtcacacatgaacaattctcaaaaatctttaaagttttaaatttaaaccattaaactgaacattttaaagcaaaaactggatatttaaaaaaaaattccattctatacattttagtagaaggacttagtagagggttagatcaaagagtccttatgttttttatggactacaagttgttgcaatgacaaggtatttgataagaattctcaaatatttataataatgatttgttcacctttgccttaatattaaacatctctaagaagatatttcttataataaatcagactcaaggaaaatgaagcaaataatctttttttttcagtatggcaaatttaattccaaaaggcagaatagacaccataataacctatttcattcattcattcatttattctttaataaacacggaacctctaccatgggagtatacaggaagaatgataaatagaaataagtggatcataagagtatagtctctgatttcaagaaacttacagacttcagaattctgagttcacaagtctgggaaagtcatcaaagctaaatagttttatttttacttgcaaatgaatttggaaatcaaaagtattaaattgtaaagcttaagttccctatgaatagaaaagtgttcaataagtactccttctaacattaatccactcattttttaacaatggtgacctgtgttataattaagctaggaacctaacaatccaagtgtcctctctgatacttcagctacgaatgagcactggtagtcattatttcttttgaaaggcattcatttttaagattttatattctgattttcacatagaagtatctatttagttccgtcttgaggagctattgtcatttgattagaaattggcaactataaaaactcctacaattagaataatttacttacattgtagtagctttaaagatagtcacaggaaatataactcattatcatattggagcctctgtacacgttagatgtaagagtggggatggggttatcacacacttttaagaataactattttattggacttttactacatatagacacattttaggacggatttcatctatggcaaactacatttttgaaatattaattgtgttcagtcccaaatgagctgttgcagaattagtttgcctgatggacaactttacatacttttggcatgcaatacttctctaattgggagatggcctttcttttgaacattttaattttttccattttttatatccccaattttctaaaatatagattcatttattagtcaccaacaacgccttgacattatgagcttcttgacataaaactcttgaaaaaactatagtttaaatgtcctagactaggttaagtgagtgaggtacctgagatgcaaaatttaaggaggctgtcactgttagtgtcatggtgtatctctttgagagttaggccctaagcacatcactcagtaccctagtcccagctttgggtcagaagctaagcattctggctgtagaactgcccaagggactagtactaatcttgacctgtgctttcctctccctcattccaatttgctcatgtctagccagactttctgacgatctagaggtgacattaggtcttattgctatggaaatggagactattcctctgcctttacatctgtattagactttcttcatatttccaacctgttccaaaaattgaggggtgctgtagaaagttttcagtatctcttaggcaatgggcatgctagaattcacttcaagccttcaggaggagtttggtatgctacgctgactgcccttgatgggatttgtatttcctggggcatttgcaatgacggaggcccgaaaaaagctgcgcgggccaaggtcaaagtttgtgttaggctccttagccctagggatctttagcttccatttgattttcttcatgtgatctaaatgagttgaacttataaaaatattttcaaggctactctgtttgctttttatttttttcaacttgttaaatgctatacattgatcttttaaatttcatagggaggtaactgactaatttgaagttctcataaatgaatcaatagggttgctacattatgaaagaattttactaagtttcttctataatgcagactgaaatataagaccattttaatttatcaccaccatacagtaaaaattagcttatgatatgtaggttcctccaggattctgaacaacttgccacatagcagatgctcagtaaggcatattaataaacctacactttatgaacatactttgtaatgaaatttttataaatgctgtattttatttacaatgagaaaccttattagaataaaaatgattcataaatcttaatcttttgtttataaatgttcaaacataaaagtacttaagtaaattaaccttttgattttgtccccttaacattggcttatgtttaaccaaagaccgatgacttaatattaacttggaatgttgtaagattattaactgagaatgtggtaaggcctaattgattactgctgttacagtgcttcagaattttgaagtgttaggccttgtaactgcagagaagtctcatgaaatatttcaaagacaaattgtgctgaaattctaaatttcaaaaatccatatcttaatagtgtaattccaagaataaaagaataagatttcatttacttgattttaactttttaccatattatctacacaataattacctgaaataaattctggctttaggctttctacttttcagtgcttagttcagatttattttttaagaggatgagtactgaggcgaactaatagcttagaaacatcaggtaagccagaaagcacgtatgttatatagccttaggccttggtgaaaatggaaaaaaaacatgtggggcctctactttttctgaagtgcaaatagtttacgtagataaatgattcaacagcaataccataatcccagagtaaattattttcatttttactactagctcaagggaattactgacttttaaatggtgtttttttttttttttcaaaccttttatggaatctattgctgaattagcttaaggctttacaggcagaacattttagtggtggagtctcatatctaggagaagaaacatttctgttcctcccatttcacagatatgtaagtgctgaagttaaaacaaggacacatggatgcctgtttttgtacgtaaaacaaaatatacattagcaaatttggttagaattttaattaggcttcaaacaacagatggatctttttaatttgaagttttgttattgtacttatatacccgatgccatagttgtgtttaacctggcttcagaatgttctaagtcatttcttctgctgttattttattgcttactcaagggctcatttacatactgaatgttatggcaatacgacacaaatttgatttttccttttctttttttgagaataggttgtttaaatcaaagcataaggaaggattcttgctttatatggctgtcaacaattatataaataggacattttagggcaatgctgtttacagttgacgtatttcttccatttcaacctaaatattgtcatgtgtttgtaacaaaacatgctgtttttcagtttcaatgtgtttcttcctcttatagtcctgtaagctccacatatacaaaagcctaatgcaattttaggctgcaagaaaagtctcattttgacttgttttccatcttgatataaaagacccgaagaaaactggttcgaagtaaaggatcgatgtccttagaattagttcagaatgctgatgggttgtgaaacaatacatgagcaatgagtagatgatttttaataacataatactgaatgcaaaggagaacctaacaataatgataaacactaggctgcttcaaaaacttttatagattaaattacaaattatgtttgaattttgactgttacttcctaagactaagccctctcaatcagtttagcatagcaccagggacagatgctcaaacctttttcaaggggaatgtagctgtgtgactctcattaatagctgttgcattattctgattctggaaaacactttgaaacatctacccttttaaactgaatctcagactgagtattaaagggtaaaattgcagtcacttatttgtggtcccataaagtttatgaatcatcttactaagaaatgaaaatatatccataaatgtaggcttacaatgaattttaattgtgaggaaaatttaaaacccctaaaagagatgagatttttagagaaatttcagagcttgcagtattctatcttgtaacatcattagaacattgaaatattgtttgacaatggtgaaacaataatatcaacatccacggcagacaaaccaaaacaattgagagtttattggaatttctacttatatgtaaccccccctcacaaaaatgtattttcattaaaaattacttataacctgtgaaagaaatctcagactttacaaatattaagaattgcaacattaaatttagttaacaatgatttttttttttttgagatggagtctcgctctgtcgcccaggctggagtgcagtgctgcgatctcggctcactgcaaggtccgcctccggggttcacgccattctcctgcctcagcctcccgagtagctgggactacaggtgcctgccaccacgcctggctaatttttttgtatttttagtagagacggggtttcaccgtgttagccaggatggtctcgatctcctgaccttgtgatccgcccgcctcggcctcccaaagtgctgggattacaggcgtgagccaccgcgcccggcctagaatgctcattttaaaagtaatataggaatgggggccggacttggtggctcacacctgtaattccagcactttggaaagccaaagcaggcagatctcttgaggtcaggagtttgagaccagcatggccaacatggtgaaaccccatctctactaaaaatacaaaattagctgggtgtggtggcgcaaagtgcctgtaatctcagctactcgggaggctgaaacaggagaattgcttgaacctaggaggcagaggttgcagtgagccaagatcatgccactgcactccagcttggtcgacagagagatttcatctcaaaaaataaataaataaaaataaaaataaataaataaataaaaaataaaagtaatatgagaatggagatcatatagctatttttgtaattcagtttaatttagaaataggagtactaaataaaattataaagtaagattaaacatggagcaattacatatacataggaaaattccgttttagtccttctaaatattgtgtgtgaaaaaatctgcagtcttatgaatcttcctccaataaattttctaacaaaggaaacatttagtattactaggccgtagagactagtaatttaatctttaatttttaaatttatatgaagtaacaagagaacacaatttttcaccgcttattttataacctgattggctcccagattcacaatacgtgtaggctccagactaaaaaatgccaaactgttagtggaaagtaaccttaaggcatttttcttgatatccatattagctacaatccttggcctatttctttggagtatgtttacatgttttatgaatataattacataggtgggagaagaaaaacatacaaacataatttcaaaaagatggaaataatgttaataattgcagccacaatttaaacatattggttcaaaagtttaaacgtatttctttgttttatgagattcaaacaaaatctcataaaaacatgagatttttagaaagtacagaaaaatctctctctctgtatgaattttattttaggcagttgcatgctaaacttgtgcttggttgttcaaataaagtgaatgttcacatgtggactccactcttgaacatcaggcaacttggaagtaacattaactttggcataaggactttgactgatcatttggtttaagtgcctagcatgacttaggttctctgtaaacaaatgctgagatgatgtttggggagcatgctctctattagggatcagcatctgtgaagcttcaggaagtagaactggacagagaactaaactgtaatgcagttttgataaagccttggccaacgggataggaagctgctgcccaccagactttcctggatgtggcctgaacctttctatccaggcctaacttagacactggtcatggggtattccaagaaagtcatggggcaatgcagccctctacagctgagatagaccctgaaaaatttgacagcaggagatggtttgctgacctcactcctcacagcagggcagcaagtttttccattattaatatgaataattatctatgttatctagaaattgaatcctccatcactggggaaaagggaggggggactgagaggtggatctccttattcatcacagcatctagggttccaacaatcttcagtgcttgagaactcaagggcctaggatcagtgcaaattgttctcgaaacctgctgattctcctcagattataatgactcaggtaattcatgacttgacatttcactttgacaatttacagatttatagataggtagttcttggttgacctgggcctgttgtggcttatccatggcaattttgaattaaggctcttataaataaatttaaatagagttcatgcttaaatttcttttaatcctcacttacgaaattggaaagcagaaataaaagtaagcttagaaaaagaaaaagaggttataagtcaaacagactgggttcagaaaccgctgctcttccagttgctaatagaatgatctttacttctctgaggctcagttagttcaagtgtaaaatggagatttcaatattacctacatcattattttttgtgaagattagatgagaaaacccactaatggctttaaagatagtattcagtacgttcatgttaactgttattaaggatgtcatagggaattgatcagaatggagttctcggtgacacaacatgctcccaaaccttacttttccaacatagcttcataattctgtttgaagtaagatacctttcccagaacagtataaatttattattcaaatccaaattctcaacttatttgtacaactgcatatagactttaataaacatagataattatatatgcaacccagtttatgttttaataggttatcagtaaagtaatggcagaaggtagaaataggatagtgacaggtcaatctacgtctaccagacatgcttaagaagtgttaacgctttactttatccaaatatcagtattacagcttttttaagggaggtattttaacatttgaactcacactagtgtaagtttaaagtatacgttatctttaattactatttccaaaattaattataccaacatttactgaatgccaaagatgtaccaggattatacatagatctcaacaacaaaaaacagtaaaaatataatagcctcagtatttttaatagagggagaattattattagttataacatagttggggacttggtatagaaatgtaatattgtaagcatgagaccacatcagtgaattaaaacaaacaaattttttgctgacatacagtaaaatttggcaagcattttagatgaaaagtaaaggaagaaaaagagaatgtttgggttatatatactgaatgcagctttattcttttccctagtgatggaggattagatttctacataacataggtaattattaatattaatgatagaaacaattcatgaggaaacctaaagaatgacatttagaaatcacctttttgggtcttcttctgaaggcattacttatatgacacctgaatggtagaagaaagcctaagggtactttttgggcagcaattgccacccagccttaactcattccttactttcatcttctatcttttagcatgaactatacctatgtgaaatatttgtctttgctttcaagaggagaagatgaaaattagtaaaatgaccagaagtcagtgagcatcaaataactattttgaaaacaccatagtgtcagcattgtaacatgctaatatcacataatgaagtacatttctatgcattcaccaactgtgtagtgagaacattactgtgtggacaacagtgggctatttcagtggggatacagcatggaattaggcattgtgttttccagatgtaacattgagaagttaaaatctagtacggtagataaatacctttagcaattaaaaggtaacacacaacagtatacaccaaatgcagtcagtggaagcacaagaaaatcagtgattaattctgatttagtacacaccatgggtactaggaagcagtaccaggatgtaaaaggcaacgaggaagacatttatgcacaaaggactgacagagaggtggggaatctaaggtattccatatagagagcgagccagatgagaggactttgaatgtgaattgaggaatttggggaatggtgtcacccaattaatgtttaagaaagccttaactatatttcataggacaggtagaagtaaggagagactggaggcaggcagaacaagtaggaggcaatagcaggtgatgatgggatttttgtcttgggtggccatgcaatttcatatagtgtgaagttaattctaaaaaccaataggtaactatttattagttagagccattattattattagatactatgtgatgaggtagaactatttttaattggagtattatttaaataactagcctgtaggaccagatgtgacttgacagttgtgactccaagatacactaggaaaatatgacaaagggagagaggttgagactccaagaaacttaatatttaaggttttaaaatattcgtaagactaaccactgctagaaaaaacgttgcattagatatctacattttagataagttccaccaataataaaacaagtgaattaagaatttgaaacatggttaaaataaaaaattatatgcagtgtaagatgaaaaaattactgtttaatattttcagaattaaaagaaataatcaggaggatgggtgtggggtaggagagcatatgctttttttttctactataacttttcctctcttatcaaattcactatttaatcatttagaaacattctgctaaatactcagttgattatctgactaaagtaatttcactaaagtgtgaacaaagcttagtgacttgtctactctgtgctagccactggtataggctggaggtgcactagtgcaagaagcagacccaatactctgcctgcatgaagttcactttctaatgtgatgaaatagataataaaaaaatcactagatggtatgttaaaaggtaatgagtattatgaagaaagagcagaccaaggagaaagagggctggggaacatactgtaattttaaatgaggccatcaaggcagacctctccgagaaaatgacatctaagccaagaggaaggaatctttaaattttggatttttaatacaaaatttggcaagtttttttattgaaattttaatttttattgcttaaaacatcagtggaaaagaaagggcaaattctttggttaaagcttaatctctcaagggaaaaatatttatctttgtatttccacgtatttcagtgacgcctcagtgatatccttattgaagttttctctgttttgtaatccattcccttatctagccttttactaaacgagaagactggagacattcatccatttatctacagagcctagcaaggtgcttgacacctggtaggagttcagtgtctgagacttgaatgtctaaatggtcttattggcatatacatttttattaaacacatagggatcatgtcatgataaggtcctttattttatagaactcacatttatataatcctttggttacttttcctgacattctacaagaatacactcttcttttcattaagatttcctttgtacttccccttttcaaagtaagacgtgctctggcagtaggcacttaaattatacttaaatgttataatctaattcctagcctgtggacctctgtcaacgaggactgaggatactaaaatatcttatgatagtaacaaggtgatttcttttatactccttggaatgaaatagcatttggggaactgttagttagaagaaaggattccaaataatagctctttgttcagtgtttgtccatcaattcatagataagtcaattggcactcatcattttaaatgcatcaggggccagtgtagttaggagatatatagagagtactttaggcagtaaacagaggctttgtaacaatataatgtgtagtgggaaagaggattggaagatctataaaaactgccaaaagaaccaaaaatataattaaagcagcaaaaagacatattgaacacaatctcagggactatttcacgcaatagcaaatgtctcttcaactacagagatggaaagcaaaatagaaaactagtttcatgaagggagtgagaaaaataccaaacagaattgtaggaataggctcacaagtgttgattttcttatgctaatttttacccttctttaaaatgatcagaaagtgtctaacccagatatgggataatttgaaattctcagatgagaaaagagaaaagcaaaataaaaatataaacaaaggtaatattttaagcaagcatgtctcagagtagcacagataaactgatatgtagaaaactattgaaatttacagtctacactcaaattttgccaactaaatacagttggtttaggttctatcaaagttacatattatctaaatttttttctttttcttttcattttgtaaaagcatggaggtttacacacgatttcctcaagaacaaaaaaaacaatatttccagtagaaaatatttttcgatggcaaattttcattacttagacgagaggtttcacctaataaaacacatcagagttacctggggagttttcctaataaacacacttctattcagacccattagcagagatatttgcatagcttataataatctttagaaatacactgaatactatcactcttactttctaaaatcttcaacttctgtcttgaattgtaattagacaaaaactagcaaattaaaacaaaatttagaatcagaatagcacattatcagaagaaacatgcgaagctgatttcctggatacagaagcagaattcagacttctgtattaagatcatttcttccatagaagtctggtttcactcataataaataataaataaataaattattgtggtttcctttgtgctgagtaactctaaagtatttttaaatttagtgaagacaaactccaactatttaaagtgtcaagcttgagatttcaaacactgggtcgaaggaaatagataaatctttaactcaaagataatttgataagcctagtaaaggacaaaatatttttggctaatcttgcccaggaacacacgcatatgctcactcacacacatacaaacacacataaaatgtacagtagagtacattgttcaatctttctcagaaatacaaacttgaaattcacatatcgtacctctgatttaaaaaaactaataaaattatctgttgagaggaacatcttaaacatatcctatcaattttaatggaaaacactaacatagttttgtgtgtaaatgtaagttaataggtatacacactcacacataaacaagacgtcggaatatagtatattggtttaaaggtaatcaagacattattttacattgcagaacacaatcattctaatgacaagagacttgggtgctttggatctaaaagaggcatcttatttctacagagagaattattatagaaaaataacgggctttcttcattttaacatttgaaaaattgagtgcatgttataaagcaagaggaacatagaaacaaaggtctagaaatcatttatggagttcctgctgcctactaaagtttgtgtgtgtgtgtgtgtgtgtgtgtgtgtgtgtgtgtgtgtgtgtgtgtgtgtgtatgtgtaatgggagtggaggtggggtggcaagatttaaaaggattaggcactttggcctcagtcctaaaactgtaagggaagtaaaatgaagaattagtatttttttttgtcttcgatgactacacttaaaccttgcagaaagaatagcacaatgaactcctttacttcaggaaattcgactcatggccagacttcttttctctatatgcctgtctatccccctgactgctgattactttgaaggaaatctcagatatcatactattttatccttgaatattacagtgtatatcttttaaaaggcaacaacttaaaaatgtaactacaatcctaagaagatcaatcttaaaaaattacttagtataatcaaatatcaatttatgattctaatttcctcaattattgcagatatgtttttctttatactttaatttttaaaaaccacattctaattagtttgtcctatagagtttcttagagaatctgtattttgtctcctaaggtgtagttgaaaacatttctctctcccttgaattttacggaaattgagagttagatttaaatggtttcaacaacagaatttagagtatttataaggagtagatgatgtctgcttcttaaatgtttttccagttgtccctcttcttagctaagaatttggtagacactggctcaaagattattatggcaaagttatcaaattccgaatgccatagtatagagaaggaagtagacatggatataattaactctaataaaaaagcaaaatacaatatacttctagaatgttccacagtgcttggttttgtgtcagcattaagagagtgataaagtttcagtttcttcatgaacataattctggcatggaaagggcaacccttgggacaactccatcaaacacaagagctctgtggaacacagtttgatagataatcttgaagattccttctggctctaaatctcagagtgatgatgagctgtatggtacaattcacaatgtttttgcaaactcatgaactttccttaaagctattcttgagcaaagctagggaatgataaaggggaaaagacagatacataacatttcagctaaagtgaagtatttctggcttgttaacaactctacaagtaaacttagaatagacaatgtatctgcatgcttcagttcctcttccaagaaaacaaaacaaaacatctgccagttacaagagctatatatttgaagaaaagtgacaagtaataggaaagcaactggaaatctgggcattatggtttcattaaatatactgtgcctttatttaatatgtctgtgtattttacctttggaatatttttgtgtgttttgtattatgtattctgctaagattcatgcaactgtttcttcaggcacagacagcacacattgtcctggaagatggaactaagatgaaaggttactcctttggccatccatcctctgttgctggtgaagtggtttttaatactggcctgggagggtgagtaatgcttttccaaggctttatttttcctctagtagagaaataactggaagatctcactcatggtggtaagttgaaatcactgcatcgtagtaagactacgtattgtcctgaagttgcaccatgccttgtgcatagcctactgctgccgtccttgaaagaaagttagacatgaacttcctgctactgtaaatgaaagacaacatgggcacactggtggtcccctggataaaaagaacaaaatgaattctagaaacttaggttgtgaggacacaggttatgtgagattaccaaatggtttctgtaaggggaggtatgggtctgattaaggtgaaaatcggagcaaggaaaagaatagatagtatattctagtgctatttcattaggaaagaatcaattttgcacatctaatatgaaatactataagaagattagaaagtccttgggtattttatataattttgcactctagtaagaaagttgaaataacagatacatttattatctttaatcaatgagggagcatctgtgtagatctaatattttcaataattatcaactgtgacctgccttagtatttaagacctgctaacatgtacagcaatgaaaacgagagttgctacagaaattaagtggctgcttttacctagttaataaatgtttgttcacctgggaatcaggaggctgaagttctagtctcaattctaaggataactaattatataatattgggaacatcacttaagctttttgagttctagtttcttcatataaaaagtgagggggttggattaaatactaatttacagctggggatttaaacaattatgtgtcttaaaaacatgactagattgattgaaggggtttccaatacagattcaatccaactagtattctatgaaatatttgataaattctttagagaaattcaagttagtctcataaagacaagggggcattaggttcactgatactgaatatactaattgaccaaacttccattatattattaatttatattctttcttaaactcttgcctccctgtgtgaaatgaagaatattagaggggtttttaaatagttccactggtgagaacattaaattacagtgtatgaaatctgtttgcaaagttttgcttcaccaggcaattatttaaacttttcgacagcactaattactagctgtgttaatatacctgccaacaaacaactgtttaatatagatcagcatgatggagggcactagagttttcttctctgtgatagtttacaggtaataaatcttgtcacatcacaaaagtcaaacaggagctgatggattaatttgctcccaacactgtagttctctaaaacaaagtatatttattcatttactgaagagtattgtaagcatatgtttaaagggaatggtaagttcttttatggaaagaaagaagaaagagaagtaaaatcaaattaattaaagtttttttttgatgtaggaaaaggtattcatctataagattagtccatagaccctattttccattgagaaatgcttctttcattcattacgtgcctcactcagtaaggtggttgataattaaaggggttattttgtttttcatctttaagcaatgcatttatattgtgggcaagccttggttaaaaaattatcagttcctgacagataagagacatctgagaaattagctgatggaagctgcggaaaaacaccacagccctcgagtcaccttagggattgcagagctgaaagactatgtattttgttgacaaggttagttctggtaggcgttagtctggatggtgttgaagaatttatgttgactactgcctgcgttaaactttattggtttcaaagtcgttgattctgtgcccctgagcacctaaattcactttcagttgtaatccacaaaaaaggatttagcttaactcattttgcagaaagtggacatggaagagagcaggaaaaaaacctcaattgcagtgtattccagtgcatggaaaaagtgtagatagctcctggtattcatgggaataacgtttcttcttcttaagaataagaaatatgtgtgtgtgtgtatatacacacacgatatgtatatgcacacacacacacacacacacacacacgatatatttgtatttttcctctcacccaaacttaaaaatatagccctcctgcattcctccctaattccatatcagtactttaaaatagttagttggcatcttttaacttagaagtcagaaatccctcaagtcaagtctgcgagatgaatttttttctaagcagataataactttcaaacttatatgcttctttctaaaattaaaatattttaaaaatcaactttattgagttattctttcatataaattaactcacttattctaaatattcattgaattttaataatcatatatactcatgcaaccaccactaacacaatcaggctactcttcagtatcctaaaaaatatcaagaaaaacttttcaatgtttcgatggttactatcttggtgaaactggcagccctcaacagtaaatatcagtttgggctcaatgatatctggtaggccagggaaatctttagagtatctgcaaactttaaatagagcagggatattttaaaaattaagatgctagcaagggatttttaaaggaattaaaaaatttaaagaaattgagggaataaaacttatatgaaaatataccttggtactcacgagttggtttttctttatatcaatgacatcgtggtataaatttttatattctgtcataacatttccccaggtacgttaaaatctagagacattcttgttggattcttctcattttcaagggttaaataattcagagcatgtatgcagattatagctttgtagttacatacattatttgctgataattttttggcatgtttacccaggtacccagaagctattactgaccctgcctacaaaggacagattctcacaatggccaaccctattattgggaatggtggagctcctgatactactgctctggatgaactgggacttagcaaatatttggagtctaatggaatcaaggtagtaccagtggtggccatttaaaaagtctcaatttgagggagtatagttgacttattcttaagaattaggatggccaaactttcttcctcaatacggtagtacaaatcattaagctcatgtattcaatcttattcctaggtacatgagaataatctttaacttgacagtattttgagtttcatttctcagggcactttgaattttaatgcgttggatgaaacttggcttaacttgaaaaaaatgttataagttcaaataacaactatgctataaaaggattggggaagaatcaccttttaaaaggaatttggtaatgaattctgtatcaattatttgctttttaatcttagcctctaggggatgatttaaagatagcttttatgccagtctaaaagtaaacatattaagatttcctaaacaaggtaattttggatactctcttaggaatatatatcatataaacaattcaaaaatttatattccaaattcaatactattttttcaccattccatttttgaatgacttcaactgatcatttaacttagttttcactatttctcacaatttcccatcaattttttctctgctttaagtataaattaaaaatgattttgttcatcatgtgcattaagccagtaattattaattaaattcttgataaatgccatgcatgtcagaagggggacctagtttagtctcaggatttaccaagccaggtaagcctgctccctctcaggataattaatgcaacaattacatattttaaaagaagggcattgatttttttttttttgcctcttgtttttaaaaatcctaagtctcatgtcagtggatatcataaaacttaaaaacaaatgcaaattgactcacaagagttggataatatcttgtgataacctctttaaaatgactgtctgtctttctaggtttcaggtttgctggtgctggattatagtaaagactacaaccactggctggctaccaagagtttagggcaatggctacaggaagaaaaggtaagaaatgtaatagggcatccatcatcacctaaggaaggttgagaaggtgcctgtagattcagaagtgccaagcagacagaggaagatcatgtagtttgggatctttgcatttcagagagggattccttctcttactacataaaggctgaaatgtctgaattcctccttaaatgctgatgagcacatattttcagtttatccactaggtggcactcatacatgcttggtagcacttcacatttgggaagggaggggtaagataaaattttagcattttctcttctctttagcaattgagtcttttactctccttcaccgttttatctagaatgtagtaatggaacttgcttcatgggttctagtgttctagtaccagctctactgttaactggttgtgtaactttgtgcaggtcacataatcattctatgcaatacttgcatcatctctcattcttatgagtataagcagattaccatcaagtctcgttgggcttcaacattatgacatgtaattatatataatttcatttgacatattaataatgtaagaaaagggttataaaactttatcttacacttttagtttaaatattaatttcttttcttttttttgagatggactttcactcttgttgcccaggctggagtgcaatggggcaatctcagctcactgcaacctccacctccagggttcaagctattcacctgcttcagcctccccagtagctgggagtacaggagcctgccaccatgcccggctaattttttgtatttttagtagagacggggtttcaccatgttggccaggctggtctcaaactcctgacttcatgtgatccacccgactcagcctcccaaagtgctgggattacaggctcacatgagccaccgcgcccagccataaatattaatttccaatgaaaaaagagcatttgccttgtttggatgttagaagtacttaagttaatggacctgcttcaattaacttcatctccagtgttgctgtagctgctttttgttcaactgctgggcctgtaattgacagaattttattctacgaaagtgctgcctctccaatgagtgtctatctatgggggctaaacattgctgctttctgaaaaataaaaaaaatcttgatcctggctctttagatctcattctttctaaattttaaaagggagaagaaggcatccatatcatatcctgggccatagccattttcttctcaactattatctgaatttatcttccttatccaggcagctaatttctgtaatcgtcatttgggagacacttctctccccccagcccccaacaacccaagctttccttttcctttttgttatttaggacacttgttctcatagcttttctatgtcagaactaatagttttagtgtaagcctaaccaacggcttgtaagttcgttttttaaatgtgctttgaaccttcttccatgatcacagacatgtagagtagaaaagaatccaagataataaccagttcacctccttcaatttaccggtgagaacaaatacattgcttaaacatttctcagataattagtggaagaaaaaaaaactagaacatgttttcattttttaacctctttttaaaaaaatcttattttagtaaaaagcctcccgtgggatagaacctgttttcttgattcctaactcattactctttcattataccacatgtgtctctatccaacgtagtcaaagaaccttaaaacaaatggtggtcctgcctgatggactaacaggatgatcatgttttagtacaacatgactactcaacatggcccttcagaaaaatgtgttgagtgcctactctgtgccaggaacatttggctcaaaacatggatttgcatattattgcttatgaagttcaccaatgtgatttaacttacttaacatcctgggttaaaagcaatagaagtgtagcagaagattgatgttcagaatttctcatttttttactctgagaaagaacctgggtattaagagtcctatgcctaactgtagcaacaatttactgtgttctgacaatacagtcaccctgggtcagagaaaagaaagagtggagaaattatttactgctcaagaagatagatgaggccaagtttgtaacttgaaaacaatatgctggatttaatctcctccaatttcactgtcactacaatttttttcttataggttcctgcaatttatggagtggacacaagaatgctgactaaaataattcgggataaggtataatcatcatctttagccaaatctatgtttcttcgggtgtgtgtgtgtgtgtgtgtgtgtggtgtttccctcagtgcctaagggatccattaatatgtaaaggagtgaatctggccagcttctgctatctgggtctctgttattttgttttactattttcactgtaattttcaagattgaatacttgattggtatgtttttaactgaatggacttgagattcattcacctggcagcttattgagtgcccactatgtgttcattataccaacaagtcaaggaatttataattcagctcatgtgatagaactttagtgaaacaagtggagaaggtaacaaattgcataacaattttgcctgaagtgaaaacctacatgctgaaaaatacactccaggaagtgtacagcattgttactgttatttgttttgtccttgtgaaagagttatttgtaaaattaatgcattatctttcatgaatgtgccaaataagccttgcatgcattacttcaattatatagtctttgttgagaccatatcaataaccaaggtgataaaagggaaggttatcttttgctttcagtgaagtctgattgctacaacatctgacccctcctctgagaatatctcatcaccatctgcttgttgagtttattattattttacttgaaatttccatattccaaatctgaaagaaacattacgtcactaacgttaactaaattccccaaatgcaactaaagttttcttactaaatataattacataaaaataaaaagataaatgacacaatttgaaactacacatgtgggctgggtgcagtgggtcatgcctgtaatcccagcactttgggaggctgaggcaaacggatcacttgaggtcaggagttcgagaccagcctagccaacatggtgaaacccatctctactaaatatacaaaaactagccagttatagtggtgcacacctgtaatcccagctacttaggaggctgaggcagaagaatcacttgaacccgggaggcggaggttgcagtgagctgagatcatgccactgcactccaacctgggcgactacaggaccctgtctcaaaaaaaaaaaaaaaaagtacatatgggaaaaggagtcttcaaaaaatttttttgtagatttcttgttaggatatatacatatatatattgacacaggctttctgtaaacagaaggaaaaaacagctttgaaaataaaaacatggccaaatacccatgaccagaaggaagacagtgagagtttatgccatcattctatcccacctctgattttattcactctaccacgattttcctgagaataggtgttagtgaaattatatatcccagggagattcttgtgttctctcagcctaatgatgtgtgtgagcagtaagcaatgacgaggctatgagggcgggaaaggaatacagttgggaaaatcaattcagatggcagaattggcaggttgaataaaatatagtcaggcctaatgattcaggaaaactttacaagaccgcacttgtctttcatgtgatatgttaggttaaaacgagccctccttttatcataggcagttaggttttcaaaattggcggaatagattggcacagacaaaacagtattgcctcatatttctttatcagtgatggtggttcatattaaaaatgtatattatggctttcacttctattaaccttaatttgaaaagtaagatcgtatttcattcagcatgttttaagaaaaggggaaggagaactaaaaaccaattttcaaaattagggatccataaatatagacaaggggttatgcgacttggattataaaagtaaatacaggccaccatgaaatgtagtaatctactatggaagtgaaaggtggtttttaggtagtgttcccagacttagaggcagcactctgaatttaataacagcactgaaacatccatcatgcttgcatgacacataggtactttctactctcacttacccccaagtgacttctccttcaaggaatacatttaaaagggaaatgaaagcttccttctatttccttccatgcaataatttcatcagagaagggcatatcaatgaattattttgaatttttacccctcaatagaatcttgattactaaatatagcatgccatttttctaagtagttcaaagcagacttactaacaaataagtaaatctcaagatacagctgaaaaaaggtgacattgtcgtgttcaagctagcaaggatagtttgtgaaaactttacagagggttgaacattctttcaattcaggcccataggaacacttggatatgaacatgcctaaacagtgaatattttcatttcaaattctagaagtttatgacttatgttgcatttcatcttctttgtgaattaatattactatcataatgaatgaattcccgctttttttgtgatttttagattccttattgtctcaatagattttttttgtccatttctctcatgaaatgtctttaggtcatatacgctgagtagtgtaagtttactaaatatcccgatttgcatcagcctggagcctggagacctgaattctgatgccttttgactttgccttcatcaggcaatggtgtcagccctagaagaactaattgtatttccaagagtatttcccaaaatgtatgtgcaaattgcttaatcttttcagtttgagaagatgaagatcttccatgatggttacgagtagttataaagacatctaagtcttgcagcagctgtttaaagtccctgtgagtttatcttgtcaacacctttatcgttgcttccttttaactgtctaatttttttaatttgatagggtaccatgcttgggaagattgaatttgaaggtcagcctgtggattttgtggatccaaataaacagaatttgattgctgaggtttcaaccaaggtgaggggttttcctttatattttgtagttttatttgatcccatttagaccttcttgaaatatcaaaatctttatttaggcagagtttatcttccagaagcaccagtgttcaggggtagaaagggatctcatagcagctaaaatacaccttacaaaatcagtgcatttaaagctggttttacttacaggcttacatgggaaacttcatgccccaatttagaggatttttactaaatttagtgttccttccaccttttctgattcttcagcttaggattttaacaatgtaaaataaaggaagcactgaattgccaaagataggtccagtgatgatgaggagtcagagctagtaacctgccagagagccaagagaattttacagaaatcaggcacagtaatcagaatctgggggcattttgtgcaggaaaaatatttattcatacactaaagatttattgtgttatagctttgtttcaaaattaatgttcgtaacgatgactgagtcaccctaaagtgaaatatctttagtatacatttataaaaaggtaaagaatacattttagaaagaagtccattggttttgattgaatatctactaatgtaggtgtgagtgagtttcttgagctacagtctctgtccttggggagcatagagcctggtggaacaaacaagcaagtaaatcaccatgtgcagaatcctgtgataaatgctgtccttggagtgttcatagcatgctgcaagggcatgcatggggcagcattgaaatgggataggtggatcagagaaggccctgtagaaatgtgagtcctgttttgagacacaaagagcgggtagtaacagtaaggtagatgaagaaccaggagaactttgtttcaggcagaaggaatggcttgccaagaggcatagaggtacagaacaacatagtatatttgaagagttacgcacagtttgggatggctgaaccaaggggttcacacctattggtttacacacttgggcaaggataagtggagatggactgactgaagctaggtctagaaggtttcatatcattggctaatcagcacttccagaaactattgtcaactcatttggtgtcattttggagcaaagtaaagctgaataaaagagcaagcaactagaaggttattgtaacttatcagaacaaaactcacgagagcctgaactgagcagtagtagcaagaacagatacggcaacctaggccgcttatacaaatgggaggaagaggggctgaatgaggtcaggtaaaagatcaccttactttctcagctaaggatttcaactagttaggttgagcatagtgattatgtcatttgatatctgagatgtttatgggatactgctatgaaatttttttaaagaaaagtttttgatccgctttgaaacttaaaggaagaattgctaccttctgtttttactacatacaatgggagttaaaaatagagcttctctttcctaggactatgtatttggttaccatggggctttacatgtggagaatttagccctgtggaagcctatgtggcatcacagctattggctggttctaccttggggtttatttatactatagcagagatggctacaaacttctcttccatcaccagtgtggcaatggaatttctcagagaaactctactttatccaagtagaaagtgagtgttattttgacaaaggcgattgaaattcttagaaaggaaggagtagaaaatgtacatgtggacgcaaaatttgattttaaatagatgtattcaccacaacattttatttctagatataacatacacttttttgcccatgatatttcataattatcgtggtccattcaatgtggcagctctggtcttcaaggaaaataataacaaccaagcttttttgaacactcagttaattttcataaaaactccatgtcatagatgaagaaactgaggcttagcaagtaagtctatttaaaatcaaatgtaacttgcccaagtttagtgtcaatttgaattcaagtgactccagagtctctgtggctaacctcatgctatttttctttccattttgatgggagtttgacggaaaagctttaaaaagctcaatttctagatttatgttccatgaattcaagaaacctcttcaagactccctgtgaaccaattttctatttggcctgcttcttacaaggcctgaatatgtttgtttgcttctctacgtagaaatcttttcccatgctttctccttccccttctcgcctgaagaagtcagtttcaagagtcagctcattgttcctttgtgaagcttccatgactcatctcacctttggatcccatgtcatttaataaatagcttcagtataacaaggatcaaattgcatttaactctttgaaaggattgtctctttcacttgtcttggttggctctttgaggggagaggccatggtttacttatttgaatccccagcactgcctatagtacctttcacatagtacatggtcaacaaataatgaataaataaaggaatatacaaagccagtaaatggtagttacagttggtggtaaagaaattgcacattcttattttcccttcaaatcctttaatcagtgtttcttatggttctatgacctccattattaatataataaaattatcattattactaataactgtaagtcttattaataaaaaataggcacgatctattgagtacttattatctgctaggtttcttctcaatgctttacactgattaatttattccatcttcagtgtaattatatgagatgggtattattaggaactcatttactgatgaagaaactagggtgtagagagattaaataccttcttcagtgtgaatggccataggattatacataggaaggcttggtctagtgtctgtctctcagaaaacatcatcccatactgcctttcaacatagtagaaataatagttatgcaactaacagttatactattagtaaccatccttatactaccatgtgataatattcaaataagtttacattgtttcactccttataccttttacatatgcagagtaaggattcaagaattttaaatcagaaatggtaaaatatgtgaatatgtgaatagactggaaactgactctgcttgtatgggtatcctacccgctcctgtgacaaaaccttgtcattgagagtctttagaaaggatgttcccatgcccttcctgacacctgttcatctgggaaatgattcatgttgtgatacagcaccaatcagaaggcgtatagaggacatttcataaggaagagttccagcgtgagagtttttaaaggctttaaaaaaagttattaaaagagtaaaacagtctgatcagtaacatgtaagactcagagaaaacacacattgatattatctggtattccggctcctgtcacgtgaaaatgagagacaaggattttgggttcctagaaattagtactgagtcgtgatgttcatgtcgggcagggatgtgcattcaaaacatgctgaagcctaagaagtatgtgttgttaaagaaaatcaattttaaattagatatgtaattacttatatgtatggaatttgatcatggtgtttgcaatactcacttctgatttttaattttaaaattggtcccattcatatgacttccccttgttttacatatttccctgtgaaatgatttagtttgaaacacagcatgatagagggtgatgatagatgatagaatgttagaattgagaactgccttggtggtttagtctagcatttcctaaactggaaaacagtggtgtggagcaattcatcttaaaaaattctgtggtcaagcaaggttgcaaaatgctgcataagatattcctctctgttaagtccaagcacaaatccatatatgcaagtatccatgaggtcttgtgtaacttctgttattcttatggacagtatttaatgtgtttgtgtagagaccagcaaaaatgagcatatctgtgtttttatctgtgtccaatcaagggagatgctgcagtggtgaaagctggctcctttgtttcttaatgtcagtgcaattaaataatattactatagctatgataaaatgcgtatttgtatcaggagattacatatattttgtgagttttgtttgactacatgccttggaaatgttgataacttcattcattatcttgtaattacaattttctgtagctacaactagatggtaatattgctttattttacatcagaagcctaaggttaagaaaagatctatactttttcaaattatttgatgagaaagattacctgtgacattcaattcagcaataactccccccagatcttgaaaggattagggtatttttttttccttcagaatagtcagtgggagaaaaaaaaccccagatatagtttatatattttttcctcaactacagtctaaggattataatttcacattctatacagacttagtggagaggtagatatttcagtcaaaataaactgttctttcaaatactcagtttgtacttttcatctgaaaattttcacaaacgatgaaatcatcctaaattcatagcgtgctagctaactctcaaagcaggaaccggtgtgtgtgcccacccttctaggctttctctctattatttctccttttatgactttggggagctgcttcttgggttaatgcctgtgaaaatagatctgcctcccagccgtgcttcagacatagataatgattatgatatgctctgggatctttttatgaaatctaccatttaaatgcaaacaattgcacggcaacctaaagggactggtggtctatacctgcttagcaattcctgtgactcttatactgattttatccattaggcccaactgcagaagccttatgtacagtaattcagctttaccccatttgatctttactgcaagttgaggatcaagtggtatttaaagcatgatgtatctattgccacatctgtctagtgctgaatcaggcaataatgcttaaacatttcattgctaccagttgttaatgaggcaaaacatgagaaagatggttaactatgcatgcaaccagtttcttagagatcattgttattactataatcaaccgtttatataaaacagcaaagtctttttttctcataaaaaagatacagtctgtggcacttgttgtgcctttcttacaaactgtttgttaactgccagtcactccctagtagttaacaatcaatctgttaccaatctaagttcaaaacattgtcagatgtgtttatgattttggtctgttgcccatagctgggacttccctctcattctctggtttttaaaatggcaggatgtcaaagtgtacggcaaaggaaaccccacaaaagtggtagctgtagactgtgggattaaaaacaatgtaatccgcctgctagtaaaggtaagtaatttgttcatttcaaaggtgagggtttgtcatattgaccattagtgttcagctaatttcctctgtcacagagaaacttatgcattctttcagaatgtcaggggtctacattcttcttgttgcttttgatttacaaaataacacatttatccctgttcaaattaaaaatatagactgctatgttttttctttaaaaaaaaaacctcaagggccactaaaacatggaagaaaatgatgactgttcttgtcattaattgactgacagtctgagatgcatcatgttcactttctttgtggtatagagatgaccaaaaagctagagtctgtctgatagcatctcctttgggcttacatttattttgtaccacacgtttgtaggaatcatgccctgacagagtacgaactttcacattgtttttatatcaactcttagacaaccagttaaaattaaaccttaaaaattctcaaggagaacttaaccatcataataatgtttcttaaataaagttttgttaggatttttccttctcctcactcctctctcagtctgtctctgtctacacatctcccctccatacacatacacacacatacacacatatttgcataacaccaaattagcatgcgtattgggagactcttcatcgtacctccttattagagaataccagcaatattcaaatcatgatttcaaattcttgtcaattttattaacaaacatttgcatggatagcatgcatggtagcagatgctgtggatggcctgtgtatatctcaatctcaagttaccattttaattcatgttgcccatcttccaattgcaaatatctatatctctttgcctgatggctggagcctactggcaggcagtaaatggcatagaattaatgatctctggagtagcccccaaccaaagcacagaaaaagccagtgtttaaccaccctggctcctttgtcccatggataggcagtctctaaggtaactattccacacgggctctcagagttccctactgggcttaaacttcacttatccctagtggtaactacttgctaatgcataatttattggggtgtttcatgatgtcacttcctctctgtttagtatggaagtaccttccaaataagcttttgttctcttaaatccttgtttcaggaaatgcttcatgggaaaccctcaaagacaccttcctatgtgcttttatattaaaagaaatttctaagttttccattcgaatataaatcttacagaaaatgagaaaaccctaggaaagaaggctgattaaaatttgataagactaaaaggcaagactgaaaaaggtctgacgtgggccaacttaacattttcagaaaatggatttatatctttttgcaactggtcgtgtgaaggtaacctactctcctgtcagtccagtcatggcatttgtaggcactgaaacttctcttgagtgcaggagagtgcattatccattttttcaggatcaaaacttttaatggtgtttatttttatttttatttttattttgagacagggtcttactttgttgtccagcctagagtgcaatggtgtgatcttggctcgctggaacctgtgactcctggactcgggtgatcctcccacctcagttttctgggtagctgggaccatacctggctaatttttgttttatcttttttggtagagatagggttttgccctgtttcccaggctagtcttgacttcctgggctcaagcaattcccccctatcttgagcttccctatgtgctaggatcaccggcatgagccaccaagcccggccccaaagaaatttttgctcagcattatttattttaaatgtttacaaatttttccttccctttaaggaatggttagtcaagagaaagtctagcaaaattatactttggcaaagaaacatgttattaaattcatcattcttgtgtctcttttccagcgaggagctgaagtgcacttagttccctggaaccatgatttcaccaagatggagtatgatgggattttgatcgcgggaggaccggggaacccagctcttgcagaaccactaattcagaatgtcagaaaggtgcaatgaaccttgaattcatgtgtatctgtgtgggaggtgggggcttccgctctataccctcaaagggctgtgatacattttatttattcaggcatttttcaatgctggtatttgtgacttctgaggcagtgtcagtagagatattctgtaggggaaccaatgaggagagaatatcagagaaaatagggtttttcttcaggcaaagtaacttggggatcatgtccttgagttaaaagaactggagtccaatggccaaatgtattttgctttacagttttaaaccgacaactcatggttccttatcatgaccttgggacccataagacctgcaggtctctaaagaaatattaaattagatttagtttagtttgaatgtaaagtacatcttaatgaattataatgctacaaatttgtcaattatgtccttttttatattcttctttaattcagttactattctctttaccttcttaagaaaaaaggatacctcatttttgttcattcagaagcaacattttttggaactgtactaattggttaataaaaattctccctgatttagattttggagagtgatcgcaaggagccattgtttggaatcagtacaggaaacttaataacaggattggctgctggtgccaaaacctacaagatgtccatggccaacaggtgaggtattttcacttttgcttacagtaaaccagctctgacatactaactaaatacaaagaactcagagcacttacctgccatttctttagagtaaataaatgcacatgtaccctaaaacttaaagtataataaaaataaataaataaataaataaataaataaaataaaaaataaaataaataaccataccttacgtggttgacagttgtttgactacctgataccacttttgttgcatttttggaaagcagccttctctaatgataaccttgctataatttaaagttattttccttcccttggcataaattgaggttataatactcaatcaaatgatattccaagggaaattgttctgattttaagcttgatttcagaacattgtaacattttaagaaggtaagtgtgacttaagagccgaggaacctttagatcctcttggtttctcttttttgcctcaaacaatattaatttattaaacatcaggctttttcccatggcccaccctctacataaattataattcaggtctgagcagtcatctctttgttatctccctataactctcgggctttaaaattattgtagttctcttaaagtaagtcacttatatttcttagtttctgttaagccggtgagcaaccctttttgttatgagtgcaatgcccccctttctaaaaccgattatagaatttaatagacctgcgtatttaacacacaacaaagcttcctgaattgatttttgttgggaaaattactgggattaacaatctgtgacttttctcacagagtgattttcactaagcaattgaaattttgaattttaataggctttacttgttcactactttataaggaatacatttatattattctcttcacttttccttttccctattctttttctccttttctctccagagggcagaatcagcctgttttgaatatcacaaacaaacaggctttcattactgctcagaatcatggctatgccttggacaacaccctccctgctggctggaaaccactttttgtgaatgtcaacgatcaaacaaatgaggtaaatgatgtcaataaacctgttcagttggtgatgagaaacgcagggcttttaaaaataattgatacataagcattgtatatatttatgagatacatgtgatattttgatacatgcatatcatatgtaatgatcaaatcacactaggataaccatcacctcattttttatttctttgtattgagaacatttcaaatcttctcttctagctgttttgaaatatgcaataaattattcactcagaatattcacccagagtttttaaatacactatgatgcaaatacctttctcctgtttgtttgtgatttttttggggttgagtgttgaaaaacagctataggttttctcccatagccctctgtgttttaaaacgtcatttctctctcttattctctcatcagttgacttgttaagattcactatttgagttattaatcaacaactatctcatatattcaatgttagtgggctgttggtccaaatctgtttgagccccatctgggtgggtctctgggacttacttggcactggtgtagtgtttgagaagacccttggaaaagtaatttcggacttggggataagatgaggacttgagtttactctgaacagaacccagaggggtcccaaagactatagaccaaattttttatttatttatttattttaaaggaaaacacattcagttgagtcttcattgacccattttccatacttaatcaaaaaggtcagatatgtaagtccttaagatatcggaccatgttacttaatagtactgttagttacaaaaattttgttaagcatctaactcagtttttaaatttgagctttattgttccctgaataatacatagccacacttgacattcattgttacagaaggaatttcttcctgtttcttattcctttaggggattatgcatgagagcaaacccttcttcgctgtgcagttccacccagaggtcaccccggggccaatagacactgaggtacgtcaaaaagatgaggcctattatgtatgcaaaaaaaaaatgtatttgtgtggaaattcgagaaaccaaaataatcaccccagatgatcttgagcagaacattctcaagaagagtgctttggtaacacacattttgtattaaaatctccccatgaatgtcacagaggaaatttttatcttttttaaaatttaaagtgggaaagcccttaagaaacccgaagcgatggtatttttatttaaacccattatcattctaatatatttagttctgaaatttacaattgttgtactatgcaaatgaattcccttttgctctctctcgttctcatgactgaaatgaaattttaatcccccatctgtgacttcacaaaaatccctatggcaactggttgtgtagccactaagggagaataaacagcagcaggagaaggaggggaagggtgttggaggggagagagggcatgcatgcacatacatagatgattcagacggcttcagaaaagaaccacaaggaatgcttagaggagttttgtatttaatctaaatatttttacttttttgtgtgtgagctcttagttcattgttcaaacccatctttccaaataaattcttctggtgatatccagaaaaatctgaagtctattgtgacttccccacacccaggggcctccagtagcaaatcttcattgtcagaactctcagaaaagacttcgaggtaaaatggggaagagaataagagctttctttctgcaagctctgctctactctctcatgtctgaattgccgttttagatatttatattttgttcttgttttaatattattaggaaatattggttcttaatagccaaaatcagtattatattaccaacccatgatgaaactcataaatcaaatttagttatgtgtatcatctaacacatgctaagtagttttttaatttaaaatttaaattagcatatattagtacttcggattaggaacattgcaattaagatgtaataatatccactgtcacataattctccttttttgtctttccaataattgcaaaatgaatattctttgttgtaatttgtcatatctagtgaaacaacagaagtaaatcctttggcaaagattaagaataatcttcagaaactgttttttagagccgatagaaatttaaatttaaattagtatttctaattttctatatcataagtgatatagcttcaattgttatatccacctagaatttgatttagaagaaacaaatgatatacaatttactaaaaacttggcattctcagaaggtatctgatatgtttactgcttgttggaaacttcttttttataagacttgaagtgaacagaagtgtttatttgattaaattctcacactaacagatatttagttattgacaaaaaagcaaaaaaagctgaaatgctataataaaaattatttgttgcttatctgaagttcaaatttaactgggtatattgtgttttatctggtgaacttaggaattttgaagcttctaactagttggttgtatttttttctagtacctgtttgattcctttttctcactgataaagaaaggaaaagctaccaccattacatcagtcttaccgaagccagcactagttgcatctcgggttgaggtcagtatgtgggcttatttttggtttatgaattttggattgtccctatcacatgaagatttttaaaaactaagtgatgtaaggcatactagtgtttaataaaagatgactggtaatattgtaatagactgtcattttgtaactaattatttggttccttcttgatgatgtctagtggaacttctcatgttttgatttaaaataatgtcttttaaagtttacttcttccagagtatttgtaataacataacaaagaatagtgtttagtttagaatttatttcccattatccaaaaagccatagctctatgtaaacatgagatacatttcagactacagaatcattatagatgatagaattctttttgtttcaactagaataactgttattcaacatcatgtactgagtattattttacctctaaaaagcaaatggacaagaatataacacttaaatccttaatttgaatatgtatgttagtgtgataaagtttttacccatttccttcataaactacacattcatatcattatttaaaatttagaaggatatatgtgtatttgaaaaaataccacacatagatatatttacatatatgtatatatttttggatatttatatatgtttaaataaaatgtaaacctctgccaaaaattttttacttaagagaaaaaccttaataaactttggaagtcacattgaaatcagagatgttttaagttattagtctttttccctatatattacatatttttcattacattagaccttagatgaccacataaactcagacaatgtggtttgtcttctccaatcttgaaaatgccttatttcccccattttagcagtaataacagtgtctttttcttattgcttataggtttccaaagtccttattctaggatcaggaggtctgtccattggtcaggctggagaatttgattactcaggatctcaagctgtaaaagccatgaaggtgagagaatatgatccttactagaattaatatgcttcctttaatgagtctaattagtattttataatttagatttatgacactacctcttttcaaagttgctataattattttccttaactgtgcctttataaatcttgtattaaagaagcttgatcacgagcaagaatttcaactttctgtaatgtgcacatctgtaaattgaggaggttaatctccaaaattatttaggttattgcctccttatagtgaaaacatataaagccacatttatttatgctgtttatttcttttgaggcagtgagtttttcaaatatacttatcttttatgtgaaagagaaattttgggcatctttggtgctttaaagtatttcaagtgctctacaggatgcttcgggcatctctgtggttgaaatgggaaactccagttggagaagcaagggcaacagtacattttgttcaggtgttataaattattatctgtcactgggggacacagttctcccatcagtgcctgggaaacgggatgatatggcaacattttcaagtagaaaaaaagatttgatacacaggtgtggaaggacatccttcctgtttctttaaactctctggagatctcccaacacttactgtagtaaaataaaactttagaaaaattccgttgtatatttaatgtatttctcttgaggagttcagttggtacccctcgttgtgctaatcaggccattcggaggcaatgtgagctcttggtgacattgcctcaggctttgcagtgtaatgccattcaccagagaccaggctagtagagtcagcatagaatggcaacagaagactaggacagcaaacctgggaaaaatagttggccaaaggttttcttatttttctttttgttagtattctatagtcaaagattttcacctgatgggcgtctgttgaagaggtagaacacagtctcaatgactttactctttttcccatttgtttttattttttaatactctcctccattcatgtgcatgcatactcacatattttttggaataaattttcaaaacgatgttttacttctttgtattatgctttaatttctcattagataattggagactgtccagtggtttagattagttagtacacaatctaagtgtgttcagagtttagaatacatttaactgtatacagtttttattctatttgggagttttgcaaataattagaatttctatagttttgtattttaatgtgttttacatcaattgggtaaagttatatagttttaactaaagaacaggaattattagattagattgtgatcacttagaaggttaataactagaggtggatttttaaactaaaaaaataattggtgcatatattgcaacaagaattagaaaaatcagaatgatttaaaattaagattgcaataaggtttaaaataaatgaacactcatcatgtgtatgtataggatcttttcctgtataatttgacttataaaaaatcgccatattcattgtatagaacattcagaaaaatacttaaatatactaaagtttgttggtacttttctttagttgtgaggctttctataacttctgttgctggtatgttctcagttgggactcaattattaaaattcatcacatattataaaagcatttgcttacctgtttgtatcttcctgacattttgttaataatattactcttaaaatcttgagagatgactcgtattgaggaaagagcataggatttgaatcataacatttgaattagagccctaatattgccacttattagctatgtgacctttagcaaaccatttaaccttactgaatctcaatttcttcatccaaaaggttgaaatctctttcatagtcttggtataaaaatcaaatacattactaaaaagtacattacaagcattaagtcactatttgaatttaaagcagcataaaatatatttaatgttttattcagatcctccccaaagatatgtggggttttcaataataatttctatacttttatctgaatattttgttgactttttaggagaatttaaaattgacatgctaatgtatgaaataattagaaccatctggctgtatgttataataattattttgctaagtgtcaccctcatcttggtttataaaacaattatccttagtagcctacataaagaattattttgaaggtctctcccgatgtaaggaatgagatagagctatgaataccttcatatatatacacacacacacaaacatacacacacacatgcatgcatacacatagttttatttcttttaccatatggttttttaaatatgtacaaacagttgtataatgctttttgttaaagcactatagcaagcatgaatctagaaaataaatagaaaccagcagaaggctctcagtgcttccagcaagaagggagcacattattctgcattttaaatgtacattcaatgttcttcttagacaaataaatacaagggggagcagcttttttttttaacttttattttaggtctgggggttaacatgtgaaggataaataagatcctttttgaataagcaaatattgagggaattcattaccaccagactagccttacaaaatatcttgaaaggaacactaagtatagaaagaccactaccagctaatacaaaaatgcacgtagacacacagaccagtgtcactgtaaagtaactacacaaacaaaccaacataataaccagctaatagcacaatggcaggatcaaatccacatatcaatactaaccttgaatataaacaggctaaatgtcccacttaaaaggaatggagtggcaagctggataaaaaagcaaaacccaatggtatgctgtcttcaagatacccatctcacatgtagtgacacccatgcgctcaaaataaagggatagaggaaaatctaccaagcaaatggaaaacagaaaaaaaaaggggatacaatcctaatttcagaaaaaacagatttcaaatgaacgaggatttaaaaacagacaaagaagggcattatgtaatagtaatgggttcaattcaagaagaagatctaactatcctaaatatatatgcacccaacacaggagcacccagtttcataaagcaagttcttagagacctgcaaagagacttagactcccacacaataatagtgggaggtatcaacactccactgatagtattaaacaaatcattgaggcagaaatttaacaaagatattcaggacctaaacttgacattggaccaaatggatctgatagacctttgtaagaactctccaccccaaaacaacagaatatacatttttctcattgccacatgacacatactctaaaattgaccacataattataagcagctttcgtattgcctctagttccattttatatttactaatttaaaatttttggaatatgttattcttttaaggttgattgaactacagggttcagtaatatttgtggctctctagaccaattatatagaaatggtctccagctttgccaacagtggcaaagatcacctcatggcgatcttcatgagacagccaattcttttggatagtttcattttcaagaatttcttcatttctttgaccaaatgcttgtcttcctttaacttccattcactagtcctgttacggatctctacggcccacagataacctaaaagcttagttaccccatgtctttttatttaagtgtggtcattctcttctttagaccatatattcatgtactggattcttttgtttctttcaggaagaaaatgtcaaaactgttctgatgaacccaaacattgcatcagtccagaccaatgaggtgggcttaaagcaagcggatactgtctactttcttcccatcacccctcagtttgtcacagaggtcatcaaggcagaacagccagatgggttaattctgggcatgggtggccagacagctctgaactgtggtgagttcttataagcttaattgcagagttttgacatatgcactgctgtgtaatgtattttatttgagctcatctaacaattgtgctttgtgtgttcataaaacctttcctctactgtgtgagaaagcagttagcaaacagccacttaatatagtcatatgatgaatactactagttaatttcacaaaatagctgatagacaaagaaacctttcactttaatgctccagagtggccagtaggtttcttgcatttctctactctatcgcaggatattgcttttctctgttgctattgaggtcttgagaactattatgaatgaaaaatgagaattaacattggttaagtgctcttaggtatcagccctgcagcaatttcctctcaaacacattttcatgatagcatagatcagtctttctactattacttcatacttctgctgagtctactgctttgttctctttaaaattcttcaaatctttggaactggatcatgaataagagtctctttagctagtttgggtaagcaattggtgatataacttgtatgtcaaaaaaaaaaaaaggactaaggcaaaattaggtggctaggtagtggaaacacaaaccattttgaggataattttttagcccaggtaggtactcatatatttgggattttttaaattatagaatctcattatagaaatggactttaggaggaaagggaatatattgaaatcttaaggctcagtataatactatgacttttattaataaggataaaaatgattttcagaagatggtaatataagtaaaagtagcatcagtaacatattttgtcagaccgtcttcagaatttttatttcaatttttttccctaagtgcaattctattgtagacagtggtaacttctcggattttaagattaaaaaagtagttgtattcagttgtctattaaaaaaggcacaaaattcaagattttaaaaactaatcctatttggttcttctttaggagtggaactattcaagagaggtgtgctcaaggaatatggtgtgaaagtcctgggaacttcagttgagtccattatggctacggaagacaggcagctgttttcagataaactaaatgagatcaatgaaaagattgctccaagttttgcagtggaatcggtaaggattctttgctttggaaaaacaagggcattatttgtcttgtgttgtagggagaatgatttttcatgcctaataataatagttaagattattatacttgcatgcattttcttctagaattgtgttaatagtttagaaatattgtgtattacagcactcaatgctgaaattataggtattaacattttactttatgcaaagagaaacagaagtccagagatgaagtggtttatcaaggcttgaagtgccaatgaatctcagatctcctgaactgaaactaagaaccataccaacttgcaataacaaagcaatttttaccttgtttctgggatcaatcacatattttgcatgtgtgaattccctgcaaatgagaaatttgctttaaattttttttaaataaaataaacattttagaataaaatggatccagtcattaaaatgactggaaaacctgtagtttagatatttaaggaagatttgcttttctgttatttatttccattgccccttatgcctatcaataagctattaacagttaccaggaaaaagaatcaactcactttatatctgtttttgcccctgactttatttttgacttcaggctcatagctggtgaagtggaggtgctaggggcagtgttaaatccaacttctccatggtagaaacaggcacacccttaggaataaagcaggtactgctgggacaactaaaaatgggttatgtatgtttcagaagacaatgctaccaagtatcttttgtgttacaaacttgtcaatcaaataatcccaggataactctgctgcacaatttgggaagctcttgccatacatttgttctttcattgccagatttaattatgtccttgcttcctcaggaaaagaaacaggcatatgggaaaggtgtaattacattcccattggtagtgtaataatattccatgacagaaaaatatagccaccatatgttgtattctgtaagttaaaaaaaagaattccaagcttctgggactatgctcagactgaacttgaaaatgaaaaatccatttatatacagtgttcctaatggcttattgtggtaacatcaagctagcttcagcagcagagaacctggtttcattaagacagagacttttaagctgcatgtaaaaatcgtaaaaatccaataattcaatatggctgccattctcaaatgaatgatgattatttctgctttgaccatggttctgtttcaataggacaggataaaatttaccgcaaaagtgtatttcttagaagatatatatatatatatcctcccttctagaattttacttaacatttgagtaacaacacttgcttttcagaatgagatgagggaataatagaacatttctagattcactctccccacataagttggtttacctgattgccagactctcttggtgtggtctgttctgccagtgtgctcagcttttaaaatgttgagtccttgttcttgttgacagattgaggatgcactgaaggcagcagacaccattggctacccagtgatgatccgttccgcctatgcactgggtgggttaggctcaggcatctgtcccaacagagagactttgatggacctcagcacaaaggtatgtatttttgtagacaatattcttaccaaccaaaaaaactggcttgatagaccttttcaactagagaaagttatgtagatgagaaattacattttctttattaaatcatgatcatgttctccaaaagcgtattccaaaagatgacacttttgcgagagcatgcagtgcaactcttcatgccaggatgcaatgataaaccacatggttcaaggtaaaccagtggtcactttacctcaaattccacttttatagtacaatctattgacttcaaggagatgaacttaattcaactccttcttcctttgtttcaaaatctactctcaaatatttaaaatgctaaaatatgttttagtggttaaggaaaaataggacataatgtctcatttttaattttttagaaataatgtggctggcatgggtgacatccagaaagtgaaacaaagcacattgagtagtttgactttactcaaaattaaggtgtctaaaatatacatggtataaaccactcaatacagtaaatgactgaactccaccaactgccatatactcataaaaacacgagagatttgagggtttataatttattttctatcaaaatcactttaacatattaggaactacttctttctttgcatgttagaggaaaactcttgagaaaagtaagctatgctacaaaaactaaattagagactaatgcagaaaatatgctccaggaaaacagagacttttgtctatactctatttccacaaaatagaacagtgcctggaaataccaggagttcaataatgtctttgaagaatgattacacgtgcagccaagaaacctgtgtaacttacatggcagtcatagaagtgaatttgacagaattactgtaagggctattttgggaattatttaggaaatagctcacggacagcttattgcttcatctttacttactttttgaactgaagtgaaatgagacccttgaattgttgacatagaattttgaaaacagataagtacaattcagcatatttaaataactacaatggcagacttacatataaacaacttgggtttcgtttttctaaagttgtgaaaattacaaaaaagggaaacatacctcacataaatgtttcttgttaccattctggacatatgaatcacatatttagagcaaaaacatgtttttgaagatagaaagtttatttcctctagcatgttagaggctccaaatattttcaatattaacaacttcataactgccaattgtgacagtgtatacatattctctattaatttttttactctataagaaaccaatctgaagactgaacttttcatgtaagaaagtttataataaagagaattttggaatgaaatagctttcaattatttatattgtactcaaataatcaatagtcccttaaatggtttttcttgttgaaaaaaaccctcgctcttcccttgagaataattagtcatatcattatgtcctaaacaatcccctattctcttgaggttataattagcaccattaaaagctgcattaacttatccaggtccctaaattaactttttacataaaatcgaagacttcaaaaaataaaaataaaaataagctgaggaaacaggtgaagataatttcaaattttccctgtatctaaatatccattttacttcattagaatgcaaaatacttttccaaatttataccctttgtttcctagatttcttcttttagcaggcaaccggaatgatgaattaatcattattaaattgttaacattggctactgaattttctaaccactttgagaacctcatcgtgggcagctgtggggacaaatgtgtcacattttcatttgcacgtgctggagcctgtagtgatgactgaagtttaaaaaaatcctattaaggcacattacagaaaaacttacattaaattattattttaatgcctattaataatttgaaaaaattcaaactgctttccctttcactgtcaatccaaatcaaatatattataagacaataagacatttctcccttggattatcagccactgcatgtcctaaggtcaaagattaccactttcctattttgggttcagtattctacccattgtgggtgtgccgtaaatatgaaattataattatgctaattcatatctgtctaatcaggcatacatgatatatgactcagagtatttaagcatttaggcagtgattaaccataataatagtcccatatgattcttctaattctcaagttttatatgccatcttggctaaccgtttacaaccatcatcatctcctttctcctcctcatcaacatcaactaacttttattgtgtgtgtcactgtacaaagcaccctcagctattttagagagagccagagtctttagacttatttttccatatttattcacacttatcacattttctggtttcacagaagcctagctgctgaaataatttcatttccctctgcctgattgctcaattattttctctttttcctaaattagtttgatttactgtcatatcagcactttgaatggcaagcctcaataatgtaaatcaagcatattcactgcaggatgctattcctagtacctcactgattttctgacacattgtgccttctgtgcaggggagaatggagacggggtttgagagttcagtgctgaccaggatttatgccagggtattttgccaaatatccttgttgaagccagtgctttttcttactctttgatatcttttgtcaccaatttctaggcctttgctatgaccaaccaaattctggtggagaagtcagtgacaggttggaaagaaatagaatatgaagtggttcgagatgctgatgacaattgtgtcactgtctgtaacatggaaaatgttgatgccatgggtgttcacacaggtaggcaaagtatcttcaagaactatagtaatgctttcagttcatgtctttgatggccaaggcagtctttataaagttgttgcctttaaattactatttctagttgacagactagtgataacattttggacaagcatagtattttacagtattgaaaatgttctcacatttaatttgatcttcacacaaaccctgtgaagtaaggcggatattacactgagttaattgaggaagagccaaaggtaagcaatatggtagaaataagatccataaaacttagtgttgagaaataagaagggaggttgagacagtttaaagcagactgagctggtaatcacccagtaaatgagaaaataggcacaataatagaaataagtttttcagaaaagtacactagttagataagagggcaaagatgataacttaggatttaaaagtgctaaatttggggtgtgagcagagctgtcaaaaaagggagttgagaatgtggagatggaatttaagaaataaaatagaaataaataagttgatacaaagacactggaaactgttggcataaaaggggaaattgaagttgtaggcatagacaaagtattcaaggacataggtatagaaagaggagagaatagggttgaactttgaactctgggaaacatttagatttatagggcaggggaaagaggaagtattactgttgaagatagaaggggagaataaagagttaagaggaaaatcaggtagtactgtaccaactaagccaatgcaagaactattttataaaagagctttgtttttggcagtatcaaatgctatgcaagaccaagactgattatttaatttggctcttttggatgtccaagagaacaatttcattgcaaagtcagttctgtgagctctattaaaaggaattacatggtatcaagtggtaagcagaattggcaaactttcaagaagctcattcatgtaaagaatgagagagaagctttgtatggttgtctggcaatgttgggagaagacttccggaggcagtgaagatctgagcgtgtttgaaggcagaagggatggagactaagattgcagatataaggggctatgatgagggaagtgaagatggaaagggatgagatacagaaagccagctgatgagccagtctgagtgataatattcaatgaaaggaagaacttcagaaataatttgagatgaagagcagggaagttgaagtcaatctagtaagtagacgattgaagccttgatagctacttactagatagatgaacttgggaaaggttagagaggtttctaaaagtactgtatcagagtaatatgggcaaaacaggaattgggggaatacctgatatcacatatatatcccaacaaaccctcagactgttctatgtcttgcatcgtgcaagtagatggttaagtcgctgaagttggttatttcaatatgccaccaagtaatgagtgcttcttggatatataggtgactcagttgttgtggctcctgcccagacactctccaatgccgagtttcagatgttgagacgtacttcaatcaatgttgttcgccacttgggcattgtgggtgaatgcaacattcagtttgcccttcatcctacctcaatggaatactgcatcattgaagtgaatgccagactgtcccgaagctctgctctggcctcaaaagccactgggtaagaccagaataattgaccatgggtttgcagattcttttcagatagaaatgaaaaattgacagatagtggaagactgtactgcatttacaaactatgttccctttttctgtatgttagctccaaatcatttatagcaccctgaggacatgattattaatgagcttgttgccagattgaggtaaattatattgctagctggctttgtttgcaggctaatctaaacgaatcaaaatctaggtggctaaagcaggctgtgaaaaatctgcttcctaattgcactttgcagatgttgttaaaagtgcagattaatccttaattttagtcttcagctgttttcttcaggtgtatagccctatagcaaatagttgacagaaaatatagctcacttgactcaagcatgcaatacacattacttttattttatcaaaactccacaagactgaacagtgcggaattttttcacaagtaactgttacaaccaaacaaatacatctgctgtctatgtaacagccactagcaggcatgattggagggaaaggtaatcaaaacctttggtttctaataatatatttagcaccttacacttaaattatggcatttaaatgaacacaatatttacttctttatattttttttacgtagttccacagcactgcgtggagtggtgaaaggcatgttgccctgtacaggagtcacaattctgcattctcacttggttcttctgttgaccgtgtgattttgagcacatcactcattgtctttatcagtttcctcatttgttaggtggaagttgtactaaagaactcatttttaattctatagttctatgaattattttctcaaacagaataacccaaactgacattctggatgaagatagtcaagttctcaaagtgttagttttgtaaggagcccaaagttcaaagataatttggagacagagcaaggacccaaacttgaaatgcctacattttctgaccattatgtactctcttgtactagctaactccactgtattcttaggtacagatatgtatatgtacagatatgtatatattttctcaaaaaatattttgcagattctcatcttagtggaggttaaatacaaataaaggttaaactttatttatcaataaagctatcgattttgggttgaagaggtgaaggttgagcgttgtagcaatgcatgtagtgcacagagagtaaattctcctgtgacctgtgcctctatactttgtatcatgactcctattattccgcaagtggctactaaatattgatgcagaacagagaatcaagtgtcttataccctgaagtagaataataccagaaattttaagaaagaccaatttatgttttggtctgttttcaataattgctcgaagaaaaaaaaataaatttgtcttctttttatagctacccattggcattcattgctgcaaagattgccctaggaatcccacttccagaaattaagaacgtcgtatccgggaagacatcagcctgttttgaacctagcctggattacatggtcaccaagattccccgctgggatcttgaccgttttcatggaacatctagccgaattggtagctctatgaaaagtgtaggagaggtgagtccttggtttattacgcttttcttcttgttctcagttattttgttaaatttgtgacaccattgacagtgttaaagttgcctggataccatcaacacatggacagtgttaaaggtgcaattgacagtgttaaagttgcctgaatattagcatactaatatgctaacagtctctatgtgattgtttacatattacatatgttacatggccattttgctggatttgaaggtcttcctattcaaaaggtgaggccatatatctggctatatagtatagatacacatatgaaaacacattcatatacatataactgagttgtaatatattttataaccaaatcaagaaagtaatatagaatataatatatcaaaaagaccactgaactgagcttaagaattcaactttagtccattcatgcaaattgtggctctaacttcctgagacctcattccccacatctataaaagaagaggctggactagttcatctctcaggatccttccagctctaaaattctaaattgatatgagcatagtagattattaagccctctttaattatactaaaaagttctaagcttttaacatctttagaagattttttagaatgtgctgttatactatttgaaattaaagttagcctttgattattgcatcttcaaagatgcagtgttcttctgtgtgagaggaaagaaaggaattcatatctctgctgagattcactcccttgcctccttccaccaagtcctaatcattttctgcatccagaaggtttgggatagtggagaaaacatgaaacttggaaccagctggacttggatattactcttggcattgccacttattagctacagactctcaggcaagactgagtttcaggatccacacctataaaatagaaataataatacctaccttgcaggattcttataataccccctcttaataaatgtaatccatcattattgttattattaaattagtattcataaatgttgcatggggtagatgagtgctgaagtatgaacaaatctcagtctttctctatcatttgtctatctaccatttatcttagtttatctgtatctcatctctatttctgttgtggccagtgtgggagcttttagtctatgtatctaagttgattagagtacagagcaaaaggctgtttatgacatatttttccatattgttctttatttgtcccataacacagattatagcctaaacccaggccagccatttcagaaatgcatgtcactaatcacagaaaatatagattaaatctgtcaccaatacagggaaaaagaaaaagaaatgctttactggtctatcatattcacacatgaaaggcagaattatttctattttggcttccttaatttgtaagatactaatgaaagattttaaagtagtaacaaatcaacaaattggccttttaaattaaaatgtcttactagttgtaaaacactaaatattagttttttctccattatagttgttttaaatcttatttttcaaatcatactttttagtgtacaaaagaaatagaacgcaaataccatgaaaatctatgttgctagtgtttgcaccaaataaacaactgttatttagtttacatttcatgggaagggtcctttttaaataatgttcaccataaaattggtagttcaaggaacttgagaaaattatgtaatattttcatttggggcttcttatctgagggattttgttgtcaaacaaaaaataaaaggtaggggggagttttgttgtctaacaccttacatttagttcaaaaagtgagcaaacatttcctgagttcttactaaacgcaagacactgggaggatttaaaaaaggaatagattatagataattgagatacattgtctgcagttggtaaattcagaatacctaaactgacccgaatagacaatgaattattaatctctggtaaatattaaaagatagtacttatatatagatgctatgagaatatagtagaatagggttgaggaagcccattatagtcattccactggaaaatgtgaaatagtcactcaaggaaggtgcattttaatagtatagggcaaatgtggtgggaggacgacttgagcccagggggtccagtctgtagtgagccctatagtgccgctacactccagcctgggtaacagagtgagaacctgtttcaaaaagcaaaaatatatagagagagtattgaaaagcacaatttttgagcaaacatttatagatacatattcctttgttatacacgttttttttttaattgaatggatcccatgtaccattatatagattgtgcttaagaataataaaaatatatggagagttacttatagaactaatttcagataaattttaaatatgtaatacttcaaattttcttaaatatacccaaaatatttccttaattttacagaacaataaaatgtctgatttctggcagtcttttccatgcccaggctagacaatctataaacatattgtctaactcttcaagataccactatgacttgcaaattgcatatctgaattgcattaacaggttgtttattcctgctcttgtaaattttcccttatttctaattaaatttggaacagtgtgaaaaggttatctgtttggctttagtgatcattgaatatgtatcttgtcacataattgacatgaagatttcctaaactgacattagtggtaatttgagtctatttgaggaatcacaaaagtttactgaaaatagcattatgactgctattattttaaattggagaccaaaaatgcatagcaatctattattctatgaaaagattcaaacaatgtttatccagcgaaaataactgggtaggttgcaagatcaatttaagtttagttctgacatgcaacttgtccaaactaaatcaccacataatttttctaattgattagtgtatgatgagctgtaaagattgtggaaagacacattgaatttgtcacagaaagtttagtctcctcctacgttcaaaatcataatcatcagtatttgttatgactctcaaggttctattaatattaatgcttagctgtaaggaaagccaacctgtcttgaatactgactgatactcatttacaaatagtttctgtttcagtgttaatatatttctggtttctttttatttgccttccattctaaagaacatgcgcataaagcaagatcttactaagaaaaggtctctatgcttcaaccttgaatttcttattttaatactatggtccagagcaggtacaggtgatttcctcatcaatctcagcaaatacagctgaactccctgagtggtaaaagactgacctaatgaagatgcattataccaaaaccatggagaaagtgagagaggaagaaaaaaaggaacacctttttttttttttaatttgagaggctttatgatatattttttgttcttatttgttttataaaatatattttacgtccagttcagttacaaattaaagatacataagctctttctttcaatatgaggtcttaaacatgtattacaggtcatggctattggtcgtacctttgaggagagtttccagaaagctttacggatgtgccacccatctatagaaggtttcactccccgtctcccaatgaacaaagaatggccatctaatttagatcttagaaaagagttgtctgaaccaagcagcacgcgtatctatgccattgccaaggtaagatgttacaaggggcccacagctactagttgcttttccagaatgtagtcagtctggacattaaaataaaactgaatcacaaagtggttttaaatcagggatttttggaaaatttttaattcttttatagtattaaactggaaacatctatagatttcattagagtcttttacaattaatgataaattatcatttttatttgactttaagcctggatttaagggcaaattgcagttttaaaggatgattaaatagataaaatgtccccctttttaagtatacttagtactaatactcaagtagatttgactatattgacttgtcctttactattaactttattacatgttccttgaatgtgtaaaattgtattgtagaaaggaaggtgcatacaataatgtcccttagtatgtgccacttgagtctagaataatcttaatttatttgcttctctttctgtgtttaaaaaacagcaacagactataaaggcccacatgattatagggttttccatgtaattattttattggtcttactttcaggaaaaaaggccctacatttctcacttccctccactacttgcttctcatgcaaattaaatgccatgttaatctacttttatatttactgtgcttagagttttgaagtttcagctcatctgattttataaaaggtgacttgggcagctggaatctgtctggtcagaaatccctgaaaggctttttgacatttaaggaagcacaagcgttaatcctccaacagtatcaaaccgcactggttctacaaagctctactgaccattttatgtttgtgtgtgtgtatgtgtgtgcatgtgggatgagtcggtgaaaacatgaactttctctttaaaaggattcccgtctttgtaatttgcctgtgtagaaacagaaaaatgttgttagtgattttgaactcatcgcaacttttatgtccatattttgagtccttaagagacctgaaggagaggaagggatatttccttaattgcatccaatgtatattctcctcgctcttatggtttctaaatggaaaatatttaagccctactgaaattctgggagttgctattatctcttgatggacattttcccatgttgagtttcaaggtaattagaatttttctctggcggtggcgggtgggatagcagtgataagaagttattttagaaagccatttcaccttcatcatttattatccctatttcagtcttttatttaagaagcagctcatgacattcatatgtgtgtgtgtgtgtgtatatatatatataaaatttttttctcaggcaaaggacagtaaatagattttttccttaagtctagcaatcatgtttctgccactttgaaggagatgaaaaaggcaagcatttccaagttcccagctaagctgtaaaactcaagcaaatctctcattcttttctaacagacttataaaagatgagaatctgggaaaaatgtgtggaggttctttctttcacagggtaccctatgtatgagcaagaagtgcaggggctgcgtgtaaattattgcctgctcgagtgctgggagaaggaactgatttctgtttgttagaggtcatcattactgttcatttcaacagcagccgggaacttggtgattttgacagagagtgtaaggacggtggagggctgaaggggaaaaagaatgaagggagtgtgtaaatctttgcttgctttcatgagtcttagaaagagcaacttgctctgaggtctgatttttacagcagtcttatttcaggatgactggatcatcacctcttttgatttggggagaatgcggggcattatttttgatttttggaacattaaagtaacctcaaacttgtttgggggtcattatagacttcattacagtgatgttacatagcaaagctgcagtgcttggagatgaggtcttaagactggcaggatcttgcttgctgttgagaaatcatggatttttttttttatccagtctatcattgatgggcgtttgggttggttccaagtctttggtattacgaatagtgctgcaataaacatacgtgtgcatgtgtctctatagtagaatgatttataatcctttgggtatatacccagtaatgggattgctgggtcaaatggtatttctggatctagatccttgaggaaatgccacactgtctttcacagtggttgaactaatttacactcccaccagctgtgtaaaagtattcctatttctcagcatcctctccaggatctgttgtttcctgaatttttaatgacagccattctaactagcatgagatggtatctcattgtggttttgatttgcatttctctaatgaccagtgatgatgagcttttaaatgtggcacatatacaccatggaatactatgcagccataaaaaaggatgaattcatgtcctttgcagggacatggatgaagctggaaaccatcattctcagcaaactaacacaggaacagaaaaccaagtaccacatgttctcactcataagtgggagtggaacaatgagaacatatgagcacagggaggggaacatttcacaccggggcctgtcggggggtggggaggtaggggatgcatagcactaggagaaatacctaatgtagatgacaggttgatgggtgcagcaaaccatcatggcccgtgtatacctatgtaacaaacctgcacgtcctgcacatgtatcccagaacttaaagtatatatatatatataaaagaaagaaatcatggatttgactgtagtcctttccttccttccagtgaaatgactacaggattctaggccctccctcactgtatgtgcttgtgtgaaaacctcctttgatctcttaaaagtttcagtaacttaaggttctctccacctcacagtgtagatggccgacagctaattgtgcctttaatcacttagaaagtaagacagaatattaagtctttgggaacctgactgtaattacagggagaattaaacaaaagaaacatacattgactaggaaatgaacatggctttgagtatttctgttaaatgtcatcttactctagtcaacaaaattatgagccatgccatatctcaacaattataatcatggtctctctgatactatcattatgtaaaagctttaagaaaagtaagctccctgggctgaaatataccagcagagttactagttgcatatatttcttaatgggtcttaaaaacgcagtgtgttattctaaaatatgttgttctggaatattttcagatttttcacagggtatatacacgtacacatacacacatacaagaataagagtagacatctttttgtataaagattttggttttgagagtttatctcttttttcagttaaattttctactcagcttaatgacccatagttgtagttttacttttgagaaattgataaagtaagcttgaggaagaggctgagctgcctatcagaacagaagttattactacattgttttggaatatattaggattttaaaaaatgcctgccttagcacaaaaatcatagtgactgattcaaaacaattttttatttgaagtcctctgtgaggaaatattctggaggaataaagccaagccagatccgacccataaattctcactgactattgtatgtttgtgtgaatgtggagtgaggtgataaaaatatgctatctcctacaagataactatcaacactacaagttaagagatcattatattaattctagattttcttaccaatttggcttaactgtagtttcaagagactttctttaattccaaagagatgtaccaaatttagggtataatgggtaacacaatcaaataaagaggagcgagtcaaaacctgttaggagatttttctgagaacacaccactcaaggcaagcacctactctgtatgccatttgtggatatagttggcaccatctttatgtttattggaaggaatgtcagtgatgtcagtttcatgttttgtaactcagtctacagtctcgggctctctaaataacacacagaggcatgactgctatgtattttaaaccaaataagacatttagaaaaatgtttgccaaagaaagtatctcttctcctcttggcaggccattgatgacaacatgtcccttgatgagattgagaagctcacatacattgacaagtggtttttgtataagatgcgtgatattttaaacatggaaaagacactgaaaggcctcaacaggtaaggcagtgctgctctcattcatgccagacaccttcagtgcaatttttaaagagtcttcttcctactcttaagcatttggtctacattgtgattcaatgaggtagatagtgccattgttggaaaatagtacccgtagccagaagacaaatggcaggtttttttttttttagatgtttacctttagaaatgtatccattaatctttttaatcatcttctattcccacccttgtcatcagacatagtaataaggtcttttgaatgcacaaaattggtatacattgatgaacgtgtattatttaattatgaagtattatctagatttaaattttattaatcaattaaatgaatatttgttttctataaattttcctctacattctgaagtctgttttccccttttaatatcaatctatacattgctgtatattgaggagaaaatgcattccttttgcgctctactgtttttaaattgggacattcagttcagcatacaattaagccacattcaggtttctcttaacagactcttcacctctgactaatttacatttttatctccatcatggccaattatttttaaacttcattttatgttgagaatattttgataatgtagtccttaaaatctacttttaaatttttcatgggaaactgctggggcaccttaggctgatgaaagcatggatcagttttaaacatctatcttcaataagaggagcatttattagcagattaagaaagacaatatagtcctcttgaacttcttccctctgaaagcactctgaaatacactactattggaaagacgtcttacctgcaaactagggatgtgtttagagaaggaaaaattttgtttgtataaaaattgttctcaaatgatttgacaaaatgtagatactttaatcacttaaaatatctttgaggacagtggaaaatctcaaaacctggattgctcaactatttagcaattgcaacatatacttgggttactgtatttgcctgatcaatatgtgtacaaactaggtaataaaacacttgcttttctttttgagaaaaattaggttctttttcatctatttaattattgcccatgtcaaatgcttggttttgaaaactgaggaattctatctgacaaagatgaaaccagctatagttgcttgtaaatcatcctttctagtgatcacataaaatgaacagtagacagcaaataatttaggaattgaacctatacatttatcttataattttgctgacttaagtttccctttcttggtttatgatgccagcagaacttctgtgtaaaattatagtctgttctactgttctcagtttcaggcaactgatttcaaatgcctatgaaaccactccaattaagccacatgggggtgctagaaacttatagtatgccagtcacagcagtggaaaagacctggggtggaaaatagcagatgttattgtgatttaaatttccacttgacatacgttctgatttttggacaaattcaatgttttaattgaatagttttcgttacaaccagaaggcaggttgagattctaactaagcataaataagggtatattgatagtgaaaaaggtccttggaggattaaaacaacacactgttacagatcatttataatatttttctgacttccacattctgttgcatttatttgccgacaatttgacattttcaatctccattttctggcataaatatatttgtaaatagggatattttctattgttcataatgatctacatttaaaactctttatgtaaagctttatatcatttcaaaaatttcaaaaacttacacttaaaatcatctctactgtataaatttgtttttgatccagggaggttgaagtgtctattatatagcaaaagctaaagtaaacctgaagtggaactcacagatgatccacggcgttagcaaacctaaaccctgaactcattatctgagtgtcactttatggtttaattcctttctttttgaagtgtcattgatgcacgcatagcaatttgataatgattgttatttagcggtattagataaataacaagaatagatggccactaaagctacctgtctccatcattttgtggcacataggggtctgaagttgaaagaatacgacagctgatggaatgaatgttaagtatgtaaggccttgagtttccttgccctattttaattatactcaccattagtctgggtctgagtcctctgctttttctcggcccctcaatatccagggaggcttagtcatcaaggtacgtactgctccaacagtaacaagagctccctattaatgacctatagctgacttacatattgcgagtttggagagaggctgagaagattagttgttctttttcatttgtatttatttatggtttactttgaagatctcaactgcttctgtgttagaatggctgtctttagctgtaggcctaggagctagcgatttatttggtgtgcgttcagagaactccaaaattctcctgcctcaacatctatctctgctgccaatgtaccgcactccctttgtacttttcatagagatccttgagaagacaggcagtggggctctcacttgggaaaagagaagtaaattaagagaaaaaatatagaatgctagacgtgggttttctggttccacccttgtgcattggaaggagcagactatggagccagagattggtgcgcagtcctccccactgtagaatcagacgtacatcacctctttcatttctccagattcatgttctttctcttaatctctgcttctagtttttttgtgaagcttaatttatataagtataaatgacatctgacatattgtgagggcccaagaaaatttttcctcttttcccctgaaaataaaaatgctacttgttgtaataaaggttactttatgattttagatatgtattatatattatgattttagatatgtagatatgatagttaaatatttaaagattcattttcagactcacaatttttatttgcttttatattttgcaatgtatcatttcttaatttcctttatgatgcatcacttattttaatatcagacctattttttaaaggaagcaattgatagctacgatgcaaatgctattcttattaaaagataaatagctttcccttatgctaatgaataaaaattcctactctacagttgttaatcaatctcgagttctaaagtccgataaacacatttaatagcagaggatgagcatatcattaaattgatggtcagtctctgacttgtgtttacatatagtcatctgaaatgaagttcagaatttgagtcccaaatagactatacccacgcatggacacagggaggggaacatcacacaccggggcctgttggggggtggggggctaagggagggatagcattaggaaaaatacctaatgtagatgacgggttgatgggtgcaacaaatcaccatggcacgtgtatacctatgtaacaagcctgcatgttctgtacatgtatcccagaacttaaagtataatataaaaaaagaaatataaaaacaagaacatagtttatgtttgaaatgtaaacaataaatgtgcttatttatgcaatagcttcaaacaatatattttaagataaaatacaatggaaattattaaaaaagatatactcacatatttagtatatataaatattcacagactgagatggggaaaacaaaacaatgattgtaactaggtagatattatggaaataactgatgagttttccatgcctgtgagatagtagaaattataatcagaaacccttctctttgaaggggagagataaacatgtttcatgttcatgattacgtatgaagtctcatctttctgcagggtgatgagacaagagggataggtgtattaggccattcttgcattgctatgaagaaatatctgagactgggtagtttatgaagaggtttaattggctcacagttctgtaaacttcacaggaagtgtggtgctagcatctgcttggcttctagggaggcctcagaaatcttacaatcatggcggaaggcaaaaggaaagcagccgtgtcctatggaaaaagcaggagccagccagagagagggagtcggtgggggaggtgccacatactttcagacaaccagattatgcaagaattcactcactattgccaggagagcaccagggggttggtgctacatcattcatgagaaatctgctcccattatccagtcacctcccaccagtccccatctccaacactggggattaaatatcaatctgagatttgggcagggacaaacataaaaactatatcaacaggtatcagaataatcaactcagcatcctagctttgagtgcttgccccctcagaactcagtatgctgtctctaatacctgaatatagtagcaatggcaaccctcacaagacttctgaagcaatatctattcttaccagcttaggtaataaccattatttagacagcttcagccaaaaaaagatctctttcctgtttacgctcactgactttctccttttccacttaaactgcttattgctacccaagggcatggtagggaagctgactgttctaggcagttccccaaatttataggctggtgtagtagcattaactgacctagggtgataacatatttacagtggatttctttaggatttgagaagtttctttttactcagtacgatataagttgtgtcatgtaggattcgaatacttgttatgtgtatgctttggaatttagatgtttaatggtcaccaaaggtcttttaacttcacattgtcagatcaccctgcaaggagtttgaggaaaatgaagtctatataaatttttagtggaaccacaacatgtgcataatctctgtccattagctttcactgctaagctattgatattttagtctatttttcccatactcactctcccaatgccgacgctttcacatattgtgctcttcccatgtagtattttaataaataccaaaagaaaaatatccttactccgatctgtaagaaattataaaaatctcacctatagttcttttttccattagtgcatagattcaattttggtcatgtaaagatctcctgcctggagagaggaaatgcaggtaccataaatcaaataaagatgtcaaatgtcttcaccaactaggttcttctgatatagcctattccttattgtaaccaaataatgaatttataactcttaatactgaaacttgaattttgattcagtttaataattctgaatgccttccaagggtaagataataatcacaaaaatttttggactacatattaagcactgttctaagcacattattttgtttaattcctaacacaacattaagaaatcagtgattgtcctaattttattgatagtaaactgaggcactgagagattcagcagtttcctctacatcacatactaataaataacagaattgggatcaagtctaagcaggactccagaacccaggatacttgctatttaaccccttatatttgatatataattatattcttatatactttttactttagtaaaaagtaaacattgtttttatgtacaatgttgctatttatgtgagcaatattgtggatgaagcttagaaagaatacttacatgtaagtatatacctacatacttaaatatcaaatataatatatttatatttgtgtataccatagatgactgcttaaaaataatacatatatgtgtatgcttatatacttacatatcaagtatatggtatgtaagtgtgcatgtaaatatattaaatatatgtaaacataagcatatatatacacacacagaaacaggtttgcttggggtatagaaacagatttgtttagaggtgtagataacatctagaggaaataagaagtaagactacctaaaatagacagcttcagtttagaaacagtagccaataaaggggtgatagtcctatcatggtagaatcagcatatataatgaaggtttctactatattattaataaacaagcacaggtacaaatatccttcagttggactccccttgctataagtatgtaaggaattcaactataatagaacttgtgagaaagaactatttcaggactttacacccccaagcattattatttataataccaatttggattggcaattttatattgaaagacaatcatgatacttaaaaaaaaaaaaaagacacatgaacaggcaagaaaaaaaaagtgagagtacaattaccagctttaagcatctgcttatccctctggctgtaactgtttttaatttttttatttccttattttgtttttttggtttctttagctatttctgactgacatatccagcttggagattttattatacctgcctaaattgtataatttcgctcttttactggctaaaactaagctgaattaagttttgaatccttgcttcaagtgattatcttaaagaagatggccagcctctgcttttgctataccatgttaaatcatcaaagtgaaggttttctaccatttatgatgattgcttgttcttgtgcattccattcattttgggcaattttccttcaatggtccattttgctctcttgtttttatgtacaatgccgctatttatgttagcaatgttgtagatgactacttaaaaagaatctattttcattcattttacacgttcaaaagtaggagatataaccattgtgatacaatttataccatacgagtattggaagctaaaatttgtatttgtttccctattgttgacataaactttactatggatttatttacaaattatccagatattgcttttgtctaatattctgtaggtttcatgtggtttttttttgctatcttcactctaataactttaatattctctttcctctttactgcttatagtcaatatagttttaaaaaaaagagtaaagtgcacttttcaagggtccaatttccatccgaaatcactatgttcaatgtgataaactatgtccattggtgagtggtgaaaaatcataggcgtgcctattgcttaggaaaacaatctaggacaaccctggtgagttccacttgggcattcaagtgctaaattgagctcagtaaagttggccatttccctgcagccacaaacttctggcagatgtaataatgcaggtgtcacgttagctggaacactccctttgaatgtcctctcctacacatgctaacttctattgactttttatttaacttgctcatgaggcatggcaaaaatcaggcaagaacgttttgtgcttatgcttgattgaagtttctgggggaaaagtgtcacctaagagttgttggaacttagatataagaaacagaagggtcagtactttactttctgatgacaatgtatattttctggtagaaaaaaatcaacaactttcatcttaaactactaaatatacaagtaatttaaagaaagataatataacatataatcacattataatttttgtgatactttactatgacatgtttttgtgatagcatctattattttggatatagaaatgagaatggagatgattgaacactttagtggaacccattaatttgatttgcagaaaatggtcttatgtcttctcatattactactaactcacacgatattctaagcctcagtttcaccctagtaaaaacaaaacaaaaagaaacaacacaaactcccttcttattttactggtcagtcatgcagctagctgaatatatactatatgtgaagtaacaaactttaaagaaaaacagtcttaccagttattacatattaccattctatgctttcagtcttcatactccaagccatttatataatgaacctcttcaggtgtactaaaaaatggggcttatatatacaagtacttatttctttgtaagagaagagtaataccatgggaaattttataactctgtgaactaatgccaaaaatacattttatttttaatttgcttttatgttccatgtaataaaaggatattttaggtgatgtcataggtttgataggactccactaatttttaaagtaataatttattgagatagatataaaattttacatcaaatatttaatgttctgagagtcttcatttgttatttaaatagtgttttcatagttttggcaaatgattgtgcatttttgaatttgtgagagagtacttccgagtctggcatggacaagatgaatgttttgcttaaaaggttttcagagtaatattcagatgactcataaagtgcctattatgtttctgtatattaattattgtatgtttgctagttcataagaatatacaacttaaaaattttaagttgatttaaaataacacatactcagaatatgtgtatatatatctataaatagtcaataattaatacattattcctgtgttaatgtctctgaactaagcgtgatgggatatatatttacttgatggcatttctttttattaggagctggtattagaccaaatggtatttgttcttctattcagtcattatgtattgggtacctactatgtgtaaggttttgtgctagttccaaagccatttgttgatgaataatcactagttattagaccaaatggtatttgttcttctattcagtcattatttattgggtatctactatgtgtaaggctttgtgctagttccaaagccatttgttgatgaataatcaccagtcattgaatctataatataggtttataacctatacaaagagctatatatagacaggacacattaatggacatgtgagaagcagaaatatgaattcatgaaagtttagtggaggttagaaacaaaagctcttagctaactttacacatgttatctcatacaagtctcgatgtacagtttttaggaggtatgtgtctctatcccatattttatgaaagaaatgatgactcagaatgtttaagtaaattctccttactccatattggagccaggttttgagttcagaaatctctcagtccaaggacaatattctttccttcaatatatcccactgtcatgggagccaaaggaagaaggaagagagaatttaaaataaatgaaatagaaagacactttcaagaggattgcatggtttagagagagaagagagaaacagaattaagtcctcatttgatgttgggtaggtaggagtggaagctaggctataaggtccaaacacatagtgagaaacaggtaggtaaaggtatgaattctactcaggaactgacaaattgtgtttgctctttatcctatttatgctatttttcataacagtgaaaatctgactatgaagaaattaagatagtataagaagaaaaactaaagtggatattagctacctgtttgttcattgggtgaaatagttgacgccacacagtcttacttcattgttccgtaaatattgcatatatcctaatatcatcccccaattaaattgtgattttcattagggaaagtatccaataccataatgtcttaatatgtttttattataggtctttcttagcaaaaaattgtgttaatttgtatgaatgcagaatagagttcactgtggcataaggtataagtcataatttctgaaacagatacaaatggtttccaattctttatttaccatatattttcttgggaattgatatatggtgctttgtataaacactcaacaatatttgtatgataatataacaaataaactttcttggtagaaagtgaaaatcatcatttcttagtgatggcaaaggagggggaattgtagtggagcaaaatgcatatgattcctggttgttcaaagggattgaattcacaaaattcacaaaattattaattagaaaatacatagcccaagatataaactgactgtgttgggaaatattgtaaaccaacatctctaggttttaatttcttaaagtagttatgtatctactaattagctaggaaggctctgaataaactgttttttaataaaaagagatttatctaattgttttatattgtcaaagattatatacatgtaggcagtataggtatatcgtgaaatctctaactcctggtgagaactaaccagtgtttgtgtattcttgatcttcaaaaattattcacgttttcaaatttttgcattttctgagaagtttttgtgagaaatattcacagacattttcaactatatgaagggatatgattttattaaccagtgaagaaggttaaggcaaaaataaatacttatttaaaatacaggcatctactgtatatctccggtgaccttaaagtacatttctattataataaaggtgaaaaatatcactatcctatttttatggatggtgaaactgaatcacacgaggtgtgtgtcatactttatgtcacaccaatcagaggaaaacaaggaatctagcccagggctcccactttcagttttagtcactaacccttttcaaaagcttcttttgcgagatatgacttttaaatcagacagctggagatcagttcctgcttagcggtcaagttgtgagccacctgcattgttgaccccacttagagaggagacattgtgaggaatttgcccttttccaaaactcttgggggaaaacacaggaagtctggcagggagaaagccccagcaagtcacctttgaaaaatgtaaacaggattttcaagggtacaaagacccaggataataattttctttttaagttttgctttatttataataaaagatttgtatatatttatacacaatatatgtctataggtatcttttctttaaagtacaaataccttgccttccatgtttagggaggtgtgagtaaaacaactcttgagcgtagaatggaattaaatttacgcaaaataggctgccagagctataattacagaagctagataattagttgctgaccccagaatttcttcagctgctaatttatacttgagatgcctttatggggcataaagcctttgagtctgaccttaggatagagtcatgcacttcgtatccaaagactataaggcagcgaccatgcctcctaacagtggagtaaatacccgagagcactctctctctagaagatcaattttgacttgcagggagtcgtaagtatggtggccctcaccacctcaaagtgtgagtacagaaatactacacaggagaggaaagaaaacaaagggagctgaggtgctgggccaaatgtaggtgacttgctagttttgctcttctaaacttctcctcctgcttcttctcttctttctcttcctctttctcctccctgttggtctggttctttcccttcctccttttcctccagcaattgtatctattaagcacttattaccttcttggtgttgtgctgaacacttgccacatttattattttatctggctgatgagtctttttctcaggatggtggagcatgactacaggttttgggcaaaggtatttgcctatctaaggttgaagtaggtattttgacaccatttgcctatataactataatgatgataatgtaatggccatcacagcaatatccacctggcagtattaaattgcagttacttcttctacccctccccttctacccactcttcagctgataaactgacaagtatacagttgtagtgtcaagtggatggtaatttttgctttcatggattttaatgtgcattttctatgtcttcttatgaaaaaccccagataataaagatatctgctttccatgtaggtagtaagcctcatatcaacatagactgaatatgacatgtcaccaggaatttaattctagcattttcccacatcctcctaaaaataacttctccttttcctcctttctaaaaatggcttacattttttccttcaagaactagaaaaatgtagtcaaaaattattcttatatatcttacatttttctaggaaaaaaataagcagtagttattagtagataggcttctgttaagtttttaggaggctgagacaggcagatcacaaggtcaggagtttgagaccagcctggccaacatagtgaaatactgtctctactaaaaatacaaaaattagctgggcgtggtggcaggcgcctgcagttccagctacttcggagactgaggcaggagaatcgcctgaactggggaggtggaggttgcagtgagccaagatcacgccactgcacttcagcctgggcaacagagtgagactctatctcaaaaaaaaaaaaagttatttattttaacaaggctctaagtaattctttctagaagtcaaagaaagatatattgaaatatatttatatatttgttgcttggtacaacctaagtgatgtttggaaaactgctctgtggaaacatgatgatttaaacaaagatgatggagatgttttaaaatataggagtttcaaataaatttatttgcaataacaaattgtaaaacatcaaagagtgcccattcaatccctattttctatgaggccttataaagtgtttcttcttatctgttagatttaaattctgtacacataaaaatcttatattcaggggaaaatccagagttttgcttactgaatacatcttctttattttggggaaggcatacattgaatagatttaaaattataaataaatgtattcatcagaaataacagaagcaacatttcatagtatggacttaacccgttaatccaattggctcaagcaaaagctatttgattggtatcagcatcctttttttttctttttttttgagacggagtctcgctctgtcgcccaggctggagtgcagtggcgcgatctcggctcactgcaaggtccgcctcccgggttcacgccattctcctgcctcagcctcccgagtagctcggactacaggcgcctgccaccacgcccagctaatttttttgtatttttagtagagacggggtttcaccgtgttagccaggacggtcttgatctcctgacctcgtgatccgcccgcctcggcctctcaaagtgctgggattacaggcgtgagccaccgcgcccagccagaacactttcttatatacgaattgacataacttactactttggttaggcagtttccatttgtttttcatcttggtaaagacgaatggtaaaattcaaatttggtaaaatcaagggcagagagagagtcattgcatcttaaattaagaaccatgggccgggctcggtggctcacgcctgtgatcccagcactttgggaggctgaggcgggcagatcatgaggtcaggagatcgagaccatcctggctaacacggtgaaaccccgactctaataaaaatacaaaaaaaaaattaaattaaaaaaataaaattagccgggcgtggtggcaggcgcctgtagtcccagctactcgagaggctgaggcaggagaatggtgtgaacctgggaggcggagtttgcagtgagccgagatcctgccactgcactccagcctgggagagagagcgagactatgtctcaaaaaacaaaaaaacaaaacaaaaaaaaaaaacaaaaccatgaaaaaacaaaatgtggtttattatggctcaaaaattgcaattaacctacattaagcgtttttcttcatcattattccttgtattcatagagcataattatgacattatattcaatactaaatgagtggctttaccagattaagagtaatatcatgatatttctggattattagggtcattaaagattagcaaaaaagaacaggaaattcagaaaattaaaacttgcctatttaaagatatctacattatcagtttctcataaggtttcctttttaatgttgattttactgttattattactagcctttaaggtgaaatatagttttaagtatgccattttttgaaaactattacttgtaacattttagcattattgtgatagaatctgggtccacttagcactattagataattttcttgatgccatactgtcacgtgaacattggatctaggtattatttgctctgtacaagaaatataaagattcaagtcttcttaaattccttcaaagacctcattcctgtatagaaacagccatggtactcaaaaattaagacaaaatagtagtgcctacccaattgcctgggtttttatactttgcttttctaaatgccacttctatttttgaaaattgtcttttgcatttctcgtaaggaaacacatagcaacttgtctccttgaatgaagagaggtgacaaataatttctccactgatggcattattgtgattgtggcatggtcttgaacccgtgaaacgccaaaaataataagtgaagcagtaaaaaactcaagagagaggctagtgagggttcatgagtcagagaacatatatcttactcaattctcttattaaagcagatgtcattactgaacgtcaggcttagtttttttctgccttttggagtgttttttttttttttttaaagaggataataataaaattgcaaacccattccataattgtaggccaggtggagtgctcattttcacattagagcttgtgcaatctggagggaaatttggtttagtattactcgtgagttggtggatcagatgaaagccagtcaagtggaagagaggactgtgtgaagtgcgctggctcccctgataattagaatgctgcaggcgttcctccagtcagctaatagatttccccagctcctctgtgccaggtgaaaatttcctcattaaggggaatttattccatttccttttatcatttattattgaagactaagtgtgagtggaggaaatttcagagatgacagggaggaattttaaacaacaacaacaatatctacattggaagtcttagagaatgaggagaaaggcttgtattgtttgtaaaccagagaacacaccagagactttttgctatagaagccgagccatgctgtctcaccattaaaagattatggcagagtgtgtaaaagtctgatggtctggttttaagacatttttttcaccttctaaaatttcagtcattttgtgctgctaagtagaaagaaactgaagattatgaaaaggccagcatcacagccatttggtgtgttgttttattgtatagattctattatgcaatgatgaaagtctaaccttttgtaaagtttgcccttgaactctcaaagcaaggcaaactggcacgggaaagaatagttgtatatataatagcatattttagaggacacagttctgaaatatggatttaatgtgtatatgttcaaaagagtaaaaattaacataaaatactagtacatacaaatatatatcaaagaacagaaggataatttattatgcatattttaaaattgtgtgcttttgtgcaatatgctttcttcagctgatcacatttctagctgggcataaagctgtcttgatttacaacataatataaatggagtattccctattgaggtttcaaaaagcagtgttgaattataaattcagtatttatatttcttttagtaattattctgttttgagtttgtttcaaattaaggtttttattttccttcagaaaaataaaaatgttatagccttgttttgaaaataagcttttacctagtttgatcaaaaaaacaaaaacaaaaacccaccatgatggaaattggttttggcaaacaaaatggagggagcataatgtgggcagataaagatgaggaacatctatctgagtctccacattgttaaatgagctttatgtttgcttaagattatgcatcttgtatttatttgactctgaggagatttaacctgatctaaatcactgccccacaactaatgaattgtgtctttgaactgtctttttttttctttgattataatgggacacacaatacaattttgtatcagaataagctgggactaaagtcaattttctactgtgtataatgacatctcagccagcctggtgttacaccaaagagagaaaacagaggagaggaaaggtgaggacaatacagagaattgacctgcttccattaggagtaccttgtggaattaggcagcactgactgtgggaagggatctaacttgcctgtgcctctctaatggccctggtgggtcagtatcaacaatgatttctcagtgaggaggattgctaagtgttttgcactatttcatgatcatgtctaaagagcagaaataaccagagagaccatgaacaaaatactatagaaattacattactttggacatccaatgatcacacatacccaatatctgtattcaagttaaggtagatgaacatgaatgtactaatataccatttcaatttaatacattctaatttttaagacatttaaaaatattgtattctgttattgatctagttatttgaaaattgggcagaagttgaagcagtttttggctcaccaagaaaatgtcctaagaatcaactagtgagattaaaatatgcaaggtgcaggtctagcttgatacatctgtttcaaaattctcacctagtatgatttaaagggatgcctatgtagaaagttttcactcccattctgaagtatcattcacaatcattattttgtgttactgttgctcttctcagacattttctttaaattatgaaaactctctggtgtgggaaatgctatgggcaggggagcagtaacagttgagttagtcttagtgacagatggcttttttttttcgtcaccagagctgagtacaaaattaactcacttcactttttaatgcacaaggccaattcttatcaatcaacctttttcttttctctcttctttctcgttctcccttctttcttattatttttatttctttgctgataagtgttcagttttattagtaggtagaggcagaagactttgtatatttgctagagatgtctacatacattctgttagactcttgtggtgaaaaagaacaagagaaattatgcatattccagaaatgaaaatactacattcctgaatgaaaatactgcattgctgaatgtagacgacacaaatgcaaatttattgcatccctaatagaaatgtgaggaatctaattttttcttatttaataccattatttataattttcattttaaacaacatagcgacctttgaaaacctgactggtattccatgtaagaaggaatgcaaacaaataattaaagaccctctaaaaattgcaacaacaaacaaatagaaaaacctgactgaaaaagctaaagataactacatgacttctgcttatcttagcatttgaagaacccgcacttatggtgctgccgtgttagcccatggtcacaattatagatgtgatggttcttttcaaggcatgtgttttaagtgtatctggatgactgttcttcagagttaggattttagtcatttaagtaaaagtggttattgttctaatttagaaaaatcgcttatttgtcaagcacttccaccgaaaggctgagtgcatacttgcacataaacaaatgagcaattggtttgggagcatattcttggcaaggaaagtggaaacatacctttctaaaacaaataacaacaataacaaaaaaaaatcttcgccaggcgcggtggctcacgcctgtaatcccagcactttgggaggccgaggcaggcggatcacaaggtcaggagatcaagaccatcctggctaagacggtgaaactccgtctctactaaaaatacaaaaaattagccaggcgtgatggcggacacctgtcgtcccagctactcgggaggctgaggcagcagaatggtgtgagcccgggaggcggagcttgcagtgagccgagatcttgctactgcacttcagcctgggcgacagagcgagactccgtctcaaaagaaaaaaaaaatgtttcctctactttcaaaattaatttctctctctctctctttttcttgaaagtaaaagtaaccacaaactttggtgtttccaaggctctctgaagctctaaagtcacctctggggtaaagcctttccagacttctccattggcagctggggtcccctgccctgagccacggcttcaacttgtgcacacttctcccacagcacctctcatgatgtagacatatcattggctatttgtgcttcctaacatactctgacctcctaaatgtaagagtacaatatttcatcttccatcattaatacaggcaggacaggtctgatacagagcacgtactcactaaatgttaaagcagtaatgacaatgaatgtggctaccctcaccatccagtttcctcagtatgtttcccatacgtgccatgtccactgctgctctcaaacaatagccaatactgttgccattgcctattgtacacctgtcaactcctttatctacataaagttgaactttgttttttcttttttgaggtggagtctccgttgtctgagctggagtgcagtggcgtgatctcggctcactgcaacccccacctcctgggttcaagtgattctcttgtctcagcctcttgagtagctgggattacaggcacctgccactatgcccagctagctttttgtattttttgtagagacggggtttcaccatgttggccaggctggtctcaaactcctgacctcgtgattcaccctcctcagcctcccgaagtgctggtattacaggtgtgagccaccacacccggccaagttgaactttatttatagctctgttctcatccctccactgctgtagtgtttctcaagtacaacctttcacactattatctttctctggcctcacgtagcaccacatagcttatccctccataaagtgttttgaatcactatcatttcattgtctcaaatattgtttccttatcttctggggcagcactgttcagtagaaatttctgtgatgatgaaatattctgtaatctgcactgtctgacactggagccactgaccatgtgtggctgttgagcacttgaaacctggctttggtgactgtagctctaaatttttggtcttaaaagatttaattagtttttcaatttaaataaccacatgtggctaggggctgctatgttggatggcacagttctaaagcacagggcttggcacacatactaagtcagcaataatacttaatattggattgcattcaagaatttgacaggaaaatgcattgctctgagagaatgcttatcaaatacttgggaaaactaaattcaaaataagaataaaaagagaagaaattaaattcaatgggagatttaacacactgatttgagacagaagagaatttaggtgcaatagaaaaagcaaattgactaggaagagctgtagctgcaaaaatttaaactaatactgacactggaaatccagggaaatagccattatatacaccagcttgattttttcttctccaaactcagaatatgaattaattaaagcagattcatgattagaatgaacaaaatgcaatagatttaatccaattacattttattaacagcatttcatgaaaatgttttcttaaggcaagttagatcttctggcaatacactattttaatttcattgtattgactatcaaactattataattgaattgtattgtattaacaattacatgaaatagctggcccacaggtatctggttaaagatgcttttacagtagtattttattcttctgtcccttagctctttacaaattatttttgcatgcattttgaaatctagttatgagctaatttcaatcacttctttgtcttttctataaaataaaaacctagggaattgaagtttttatatttatccttcatttatttataatttatattcataaattatatttacatttaatttataaaatatatgcattttatttatatgtttatattacttatatttatccttcatttatttattttcataaatatttattgaatgctgtctgtgggccagataatgtggtagatttggggagtaatctggtaaataagccaaatgtattctttgcctttatggaacttaaatccagcaggaaaaagcctgattgacgaataaaagttaggagacattaaaagtatcaggtgataatggacatgctaaactgtatgattctatgtccatcgttccaagcaaaagaggcagtaaaaagcacaagaagttcagtgtggatgacagcaaaccaaaaggcttcacaaatgaggcttggctttagttggactttgaagggctgctgagggtcagggagaagttgagaaggtaaaaggaatgttaaaggtattacagatgagagaaacaacacaaataaagtctacgctatggaaaggagtagggggaaaataagacaaatctagtttgagtggaaaacaattataaaatgacaaaactgtcttctcaacatagacagatgggtgatattagtaagtagaggtaatttagggagaggatatccaaactgatgcaatgttgggacacctaggtgaagatgattctcaaagttcatatgcataaagacctggagcacaggtcagatgttggagaaccggccatggatttgggaattgtcaaccagtcatgctacttgcacccatgacagtggctaaatttagagagggagagagggaagacaaaagcaggtaacaaagggtagagccgtgggtaggggtagggggaaacccaaaactagtaaatggtagttttgagtaataaagtagagcgagaagccacttagtagaagccagaatatctttttaaaaaatagatcatcaaaagggtcttgtgatgacaggttgaggaaaatgaaaactgaaaaagggctcctggatttagagagtgaggtctctgattattactaatgagcacatttattagaacagtaaatgcacttgccattttttataaaagcagcagggaagaggtcgcatagagtgtgaaagcaggagatcagagattgtcagctttgcaaatagaagacttcatagaggctagaagattgagtgggttagttatttgtgtatttttaaaagataacaagacttaaatatgtttgaaggtggaaaataagaagcccttggtgttcttgaaattgaacttgtcaccgctttttattgtttttggtctaaacttgaatctctcttttctattaaatcctagtgagtccatgacagaagaaaccctgaaaagggcaaaggagattgggttctcagataagcagatttcaaaatgccttgggctcactgaggcccagacaagggagctgaggttaaagaaaaacatccacccttgggttaaacaggtaaaggagtttcccttttcccccatcccccactgacaggatttctgtggtaaaacgtaggcacccattcaaaaggccattgttaataaaaagaggagtggaattaagaagtgacaatactcatccggttgatgctcataatgtcaccaattttattcagcaagtgattaatttttacttaaaagggaaagaaggaaaggacactaggatgtaaagataagagtgagtacctgattttcttggcctaactgaacaaaacaaaacaaaaatttaaactctcctctgctttttgacctgtgttcaaatatgtaagtagttaagaaatccttagtgtaattgaaggacttgaaatttcctagcatggtggctgaccctcttgaaaataatagttatctcctttggcagtaactttttacagggtaatactttatattaagtgccccatgattatggttcatttagtattcattgtgatagggctgggcataatgagctcatctagtattcatgacaatcacgcatgaacattcataggtgtgctgttgtgattttttttcctttggcctttaatggaagggatgtcttagtttaaagtaccaccagctggtttttgtcctttaaaatcattgacttttcactgtgtgctcaaggggcacgtgcatacccttaggtctcaagctttttgctaaatattttccactcagcgattattatctttcttccttctcacctgccttacaccagcttgccctgtcggccccaaattcttgctcactaagctgagttactggcccttgagagtggaattgatttccaaatatgttcaatgagatcttgttctccccccgttcatcccctatggctttatggtagttgtgtcatcccaccgctcagtgccacaggccacttaaatcctgcgcattaatttgcaagccaaagagatccttacgtataggtcattttgctcagattttagatttcatatacagctgcttttagagagctggtggggtaagtcttcctagtaaccagttgactataggaccactttgcgatgttcatgagagttactattactactagtgatccaatgccctgtttctcaggtgataactagaccacatcactattttctctctcttattttcagaattagaaagcaattccacgggtcatacattttcctgtttgcatactttacagtaataggaattaaaggaatatgtatataaagcacaaaaaatttagtcttgaaaaaattataataacattcttatttgtttattttatttgttttctcttacagattgatacactggctgcagaatacccatcagtaacaaactatctctatgttacctacaatggtcaggtaggaatgggcaaattggcctatccagaaagctctagatttcatagacagttcacattagggaatatatattttttacctctttggatatctaggtaataaaaaaaggcatcatggccgggcgcggtggctcacgcctgtaatcccagcactttgggaggccgaggcgggtggatcatgaggtcaggagatcgagaccatcctggctaacaaggtgaaaccccgtctctactaaaaatacaaaaaattagccgggcgcggtggcgggcgcctgtagtcccagctactcgggaggctgaggcaggagaatggcgtgaacccgggaagcggagcttgcagtgagccgagattgcgccactgcagtccgcagtccggcctgggcgacagagcgagactccgtctcaaaaaaaaaaaaaaaaaaaaaaaaaaggcatcatgtgtgtcaggtatgatgatatgtttctgtactcagtcttttaagaactgccttaagataatgaaatcaaacaaatgaaaaattaaggacaatgactacatgatcatacaattatgctatgttctcatgactatttaatttaaaaaattctgccatatctattttttataaataagtagggcttgtataacactttatacttatgggtttccagagactaatagagaatacatgttaacaagaggaagatgagaaatacatacttaatgataggacaactagtttaattaaatggaataataacacttaatgatttctgcatcttccttttcttatttcctcaggagcatgatgtcaattttgatgaccatggaatgatggtgctaggctgtggtccatatcacattggtaaaataataaattatgtgtatataggactttacacaatttatatagttttcttcatacatgttaattccattattccaagaactatatcaaataaatgctgtaatatatgttttgcaaattaggaagctggggttcagaaaaataaaacccaaatatatacagctatttagtggtagagtgggactcaaatgcaggtctcaactacaaattctatctcctctcatttcactgtgtaacttaattttcatcctttttaactgaattgagcctttcactggagttgggaatggattagattttgacctgttatcttctagcatagtttttcataaggatctacatttactcaaggactttatacattagccagaaattacattgcagataccacctctgacctcatcctacgtaacatatatgactttcgtttacctcaaatgcaaaaatcttgtctgtttggtgcatgggtagagcattatgtaggtgaattaaaacataatcaccagagatatgacatttctctccagtcaattaaataaccactaaagattattacagatgcaagtatgtattttaatggacagtgatattagtcaacatatggatttaatatttaatctccacaaagcattataatatggaaatgataaaaatctatgatttgaatatatttaaatcttattctattactttaagcatagtttatttagtttttacaatgaactaagagcttcaggatatgttagtttaccaatctttggacaaatcttgaagtaggacaaaaatgttatatctttaccaccttagtcattgtcttagtccatttgtgctgctgtaacaaaatacctgagattgggtaatttataaataaattctcacagttctaggggctgggaagtccaaaatcaagtgccaggaagttcagttgtctggtgagacataggtctctgcttctaagatggcgccttaaaccttgtgcctcctataaggaaggaatgctgtctttacatggcagaaggcacaacagcacaaagggaacaaattccctccatcaaaccctcacccccagttttttctgagacaaggtcttactatgtcacctaggctggaatgcagtggtatgatcatggctcactgtagccttgatgtcccaggctcaagcactcctcccacctcagcctccctagaagctgggcctataggcatgtgccatcatgcttggcttatttttatttttattttttgtagagatggaatttttctgtgttggccaggctagtctcacacttctggactcaagcgatcctcctgcctcagcctcccaaagtgctggtattacaggcaggagccactacagctagcaagcttttctataacagcattaatctattcatgagggatctgcacttatgaactaaaaccctcctaaaaggccccacctcccagcactgttgcattggtgactaagtgttctaacacatggatttcaggagacacgttcaggccatggcagttatcttatggtgaaatagcctgaccatttcaccagcatctacctgtctactctctggagtactttttcttccttttcaaattttacctattcatgcagtaattctgcattatatcaggatccaaagaagactagtcaagctaataatcaagtgtgtgcttacttgatagttgccattaatatgccagtatatttgaataacgtgttttcacaagaatttttagaagacaatatcttaatgcaaagaattagtacaagtctgtggactttcaattctatggcatcccagtagacgtgatattttgaggtgtttaggccattattacacttcagatttctttatagaaggtcactcactctgcatgggtggccttgccaagtttaaaaggatatgcttggaaaagataggactcttcaatcaatcaggatatgtcagagctgcaaggcacctcagggatcattaggttcagccctcagacagcagattaagtggaaaggctgaaaaaagagcacaggtatcctcatcactggattaactatttttgtgtattgaggtcaatatattcactttgaatttcttttcagtaagtgagggttatttttatcattaaaattacctcccattaacattgaagttctaaatacttcaaatattgagattttctattgcagaatttagcatatatgacaagcccaatatttccttgctgtttaattagtacccatttttcctactactaatacagtatgcatcatgggtttgaaatttatatcttggagtttaaaaaattgaattgaaaatcattagcttccttagcctggactgactggtgatacatttctgcttctctttgtattgtaacttcgtgcttctcttatcccttttgccaatctcattgtctctgcaggcagcagtgtggaatttgattggtgtgctgtctctagtatccgcacactgcgtcaacttggcaagaagacggtggtggtgaattgcaatcctgagactgtgagcacagactttgatgagtgtgacaaactgtactttgaagagttgtccttggagagaatcctagacatctaccatcaggaggtaagaaaagaaaaacagaaaaaaaagaaaaaagaagacagatatatgtagtatacactttatatatatgcattctggtatatagatgtatatagtaattcctcttagaagaaagggctgccagtggcatccattgtcttattttgtagtaaaactctaaaaaaaatcactccattcttatatttttgagcccctggcccagagtgattatttttcacataaagtttttatttacattttctttctaagggtttcagctagattgaaaactctacttggtaacatgtgccagatacatattaactaatacaagatgatccctcataaatatcttgcagagtgattgaattggtcatctagacatacaataaacagcctctttctagtttgtgtgatgtggtttaatgataaacagttccagttccctgaaaatagtcaattgctcacaaaagaccagttaattccttgttccatcagatgaagccattagtcttcagtttaagatcaatgagttcattgtgaataattttgcttcctttatagctttcacttacagttgttcctccattcccatcccaatattactgagtatcttcactgtgaattcatgtgattgcagattactataagactgtagaacaaaataaattatcttataattaaaataaaagctactggaaaattttagtgatgtccagtagttaggcctttgatattattacagttattattactttttaccagaaaatcatctctatgtggaaaatatggtcaattagaaggaaaaaagtactaaattggaaccaaaatacttaaattttagttttgactgacaacctcattgatttctttaagttacataaattctccgtgctttatctttattttaaatgaatcgtctgagtataaacacatgctacttgcaaatactgtgaagttaacatagagtttatggccgaagtcagattgtaaagtataaagtatagtgctagaataatgttattattttactattacaaaagaaagtagacaagtttaggaaggatgtataattatagttgtctacttgggcctggcctactaatcctttaataaaattgatccattaaatagaatatatagcattttttagacctctctctgacatggttgtttttaaatcactccttaatattcatttgagatagacaggtggggatcaaaataagtgcatcccacaaatatttctcgaacaccttgtaaatccaggttcagtatgatagacagctggaaaaacaggttcttatcttcaagacattaacaataaaactagtatctgtgatataaatgtgaaaagtcaaatactaatttaaaaatattaaaaaacattacagatgatagcagcaggcattttgcatataattaattatgtcctcatgaaatggtttaaagaaagatgaaaaacttctatgactgcttttggatacaattatacatggctattaatgagatttgtttattaaaactgaagtcagtattatagaaagaaagaagttggcccttctttgaaactaattggtatttaaaatatagtattactatatattaggaggtaatttaaaatatgttggcggacataatatgatgtacatatgtaaatgtagacaatggtacttctgtcacaaaacaagttaaatgaatgaattaatgacagacattaattagtgataggcaaaacccattagagaatgcatgactcgagacagaattgaggttcatttatatcatttggtttaattgtaattaaatgtaatcctaaaatactgcctaaactataaatcatttttactaacatgtaaattagtaaaatataaagcatcatccttctcattggcaggtgtacagatagtagaattttataaattggagataattcataaaattccaaaaaccatggccatttgtaatgaggcaaatactacttctgttagaaaaattttctcacatgacattctttccataatacatctaatttgtgcataaaaataaggactaaccaaagtgattagtggccaggataagttaagatgttctcaaataagcttgaagtatttccttttcatgtttttctattgaaaataagtttctggttcagaaatattcttgtgctatggtaagttagtgatatcaggttttaaaaaacagaaaactaagatgggtaaaaaggatgcaaacagatctaggtatgattaatggaattttgggagcttaatggaattttgggcctaaatattttagaaatctattaaacaatatttgaaatttagaatattttatttcagtagatttcttgaaactattcaggcctgatggctatgataaggatgatgatttacctgtgtgggttaccaggttctcatccctttgttcctacatgtcccgtgatatttggtgttggatcaatttgagattggattattccataaaactgtgctatattaacattttacaaacatgttctcatactgaattccttttgccctgtgggaaaacctgcacgacaccatcacactgttactctaaaagattcctgaggccgtgatttgtcttcccattgatggtctctgattctagtcgtcaatgatgagaatttggttttgtgctgaaagcttttctactactttccaaaaaaaaaaagtagttttttaaaaatagcttttctcttattctttaacattaactacacctgaaatgagccagaaaagtagagttaacttaagattctaatatttggtctattacttcagcatagctgaaagtgtattagtttcagcatagttgaaattacaatctatagagttgagttcaggccggggatggtggctcacgcctgtaatcccaggatttggggaggctaaggagggtagatcacttgaggccaggagttcaagaccagcctggaccccatctctactaaaaataaaaaaaattagctgggcgtggtggtgcatgcctgtaatcccagctactagggaagctgaggcacgagaattccttgaacctgggaggcggagattgcagtgagctgagatcatgccactgcactccagcgttcatgtacaagctctatacatgtatttgctagataagggatatgggtgagtcacttcacctttactgagcctcagtttctttagctgtaaaatggggacagtaataatcacctcagaaggatagtgtgaaagtcaaaacagatagtccaggatacatagtagaatctttattaaagagtagcagctattatcttactattgttttgaatttattgcaaaacagaatttttaattccttaaaaagcagaaatttctttaaaaacaagtcaatttaatacagctaagttgaaaaatattgatgtgtttattaaagccttttattacactttaagctcctatttagtctaattgactcaaacttttgctataagttgctacttctccctcagtttaaaaaaattattctaaaatccttcatataagagattttttgtgtccatttaatggagtaatttgtttttaagtctctaaaacattaacaacactgctgataaacccaacataataaggaaataaaaagattatagccaagagagtattttaaaggtttttgcaaaaatttatattgaacatattttaaaataaaaatagtttaagtacacttataaatatgcaaaatggtggattattattttcagtactgtttacaatgcctttaagcactcaattgcagggtgtttgtttagttacacagtaccgtaattgctctcatcagacagaaattagcctcatcccttataagagtatttcagaacaattttaaataatgacaaaatatatttggcacatatctatcattttggcagttctactaatattcattagtgggtcattaggacacacacaaattatgctaagctcaatggcctatcagatatatgatttttgatattaataatcatgtcttatttatttatacacttacggtatataggacctttaatgtttagtgtttaggcaggtattatcctaattttatacacaagaagactaaacgttgggggaaagttcagtcttgttgtctataaaattagacaagaaggggtgggtggtacacagaaggaaccaagttaggaagggacttcgactggaaatctatttcctcaccgtctcacgctggtttaccctcactgctacaacaacacctgtcttgagaaactttgagatttagtggactatttttttttttcttgaagttttgactgctaataggagatttggacttatggaagaaaatcttacacaaatgtctgaaataaggctaaagattctggcactgtttgtaaagcaagtagtgaggcagtaggaactaaaatcagttactaggtactgttgacaggtaccaaggctgcagccaaggagaggggaaggtggaaggtcatcaaagtggaaggacatcaaagtgggacctgagatctaggctggaactaaggggtagctaaaggttagataagctggaagagaagagaaaggaaacaacagccagggaagtttcagtggtgcagagaatttgttagtgggaaaatacctagttggagctaatgagtagtcttttgagctgagaggggtgataatagataagactggaaagtcttaagtgccctgggggtcaaaagtttatgctttattctctaggcagtggaaacctttggagaactctgagtgtaggagcaatttgatgaagcagacttgcttaatctgaatgtgaagtgctgagatggaggtgtacaggagaagggagtgttaaaagaagaaatctgtattcagttaggaatttccagcagtagtccaggaattaattgattatagcatagagtacatagcaaacatttattgacttgattttcctttccatttgccacacatgtgagtgtcacaaatgatattcacgtgtacttgtatggaaatcttgcacagattttagcatctaagtgccagaaagtaaaaattttgtggcatcatttaacagtattcattggtaggagagatgtaaatatcacagtcaggttaagaattatcagtaaggaaatagacacaatattagcatagttgtccattcataatgaagttattccaatggctgatattgtgagtgtattttccaggcatgtggtggctgcatcatatcagttggaggccagattccaaacaacctggcagttcctctatacaagaatggtgtcaagatcatgggcacaagccccctgcagatcgacagggctgaggatcgctccatcttctcagctgtcttggatgagctgaaggtggctcaggcaccttggaaagctgttaatactttggtaaggagagaaacaagtatctgtttctaatgttctattttgaagagctgcaacctgaatgttgactgaatgttgactattggatatgttaactacagggcagatagaatgcatacacttagtgaatttaaagttgttgtatatccatgattgcagttaatgctgattatgagttgatagcagtattctcattaagattcagacaatgaaaataatttcaaaccagttttgaacaagatttgatatttagaatcagaagctaggaattttatgtatttcagtgtccaatttacatttaatggtgcctttagagaataaagaagctgggctaccactcgagctaatgatacattctgtaattttattgcatattttaaactactcatacatttttattgttgtttctattaattagaatgaagcactggaatttgcaaagtctgtggactacccctgcttgttgaggccttcctatgttttgaggtaacactgtatattgttttccaaaacaatgattcaaaaattgggagatacagaaatgcatgctgtatgctaatagcactagggttctatatgtagtaatttataaatccattaacaatttccaaaccatcacagccagtttaaggaccaatgtgtggtcttctagtttaatgctttcccttcagggagtggccataggaagactacagttcttcatctagaagtgtagtgtaaggcatctccttaccaaacagagagggtagctttatattaaagaacaggacaatttaaaaaagacacacaaattgaggtatctctcgccagcgtgttttctgatacccagaaatgacagcttatctttgactattgtcagcaccttctgatagtgcctttgttttaaaattttcagtttttgagatccgattgtttaatagataaattataagggtgaggaacaggaacagtgaggatcttttatattaaactttaaaacaaagttttatcataaaagaagaagttgtgaattatcacttactttcttcagatgttaccacatgtaaggaacaacttcaccaaacaagggataataaaagaaacacaatttgctttgcacaatttgaaagtgtaaatggaatttgagatgggttcctttaaaatgatgaaaatgaaaaatttcaaacgaggtggaaatctttttatttaaatgtcattttgtgtaaaccatagtctaataatactacctgtttgaggagttaatgtaaactaatttaaacatgcacacatttaaggaaggatggaaaataaaacagctttgactatcacacttctttttccttttttgcaatctatatctttgttccagtttcacatactctgaatgataagcattattgctctagccttcctctcttaaacaaatgaagcaactgaaagccctttaggcagaaatttgtaataggataaactggtgaggtgatggatatataaataacttgattgactttctataatgtatacatagatcaaaacatcacacaatacctcataaatatatgcaattactatttgccaattaaaaatacattttaacattaaaagataaatttgtagtagtgtaaaagaggtaaatgctgctgtttaaaagcaaagtaatatttttcttatttttatttttgctttctgttactcctcctctcctaccctcccaacccattttgcaaatgtcaaaattcagagtaaattgatttcagatagcattttttctcaagcatttaaaaagaaaggatatagttgaaaaggttttattcacatactgcacattgtattagcaaatattactttaaaaattgattcatttgcaatctggttgagggagtagcataacctgctttgacaacagagcagtaggctaagatcagctgttgataatgaactctgaagaaacaggttagggaaatcaggttctgggctgaatcctgttaaggcttaagaattacctggaaccagcagagtgttaatgtagcaaatcagaaagggcaaactttggagaagtataatttctagagctaccaggattccctttgggaattaatacaggtttactgaccccctacactttaccttcttccatcctcagcttcgtcagttttatactttggttgattgtcctggtgattaaatggagaaaagtctcaatttagcaagaggcaccttcttattcagccccgactggaactataggttgtctggaactgttctgagaaccagtcaagtctagtattagcataaacctgacctgctttttttccccttccttttccagtgggtctgctatgaatgtggtattctctgaggatgagatgaaaaaattcctagaagaggcgactagagtttctcaggtagtgtccaatttctttgtagtgactgttatctcttaataaacatgtagtgacatttatctcttaataaaatgtagtgacatttatctcttaatgcaaccttactttgtatgttttcttttcacacaatgtgttagaatgagttttcttttttcctcttctaccctctagtctcctaaaagaatgagaaaccttgaaggcattaaattataactagacttttaaggttggtggaaaaagaggaatacctgtgcatattttatcaaaacagattttagactccaggagtctaaaaggacaatgatttttgtttttctcatgaattagatgctggtcagggtatttctggaattcccagtctcaagggctgctcaaccatgctcaccattaacaagtgaaagctttcctgatttttaattttcacatctgggaactttgcctagtcaaacatgcaactttaatagtaagtccctcactcaactattttttattttttcctgttggcacattcagtttgtgagttaatacaagcatttcttattttgtggcaactcagccaccttcctccactgccccccagcctttaccttctccttcagtgttacctcagcatgatccatttaagatttacccagtggggttattgatcttgtattgtagaggataaaagtaatgttttccttttaaaagctttcaaaagcttgttggggcttttttttttaagggggaacaattcatagagaagagtttgatgttaggcaagtggaatttggagggaggaagagtgaaatcaggagcatttcaaagaggaataaagtgcgtggactgtttctgcacacatgacgctggatcgctcttctgtgtatgatagctgctccccaaggatgtttgagtggtaagagtagataagaataaagagtgagaagaggcaaagagtgtaaaagaagaaaaccaggtagactttgaattcatgtttgtgtgcaaatcagatagcttagaagggaatctttccagtgggccagttttcactaatggagtgagacaccaactgtcttctctattttattcctggccaggggtcctgccatgcggcccttttcagaggctggctactgtactcagctggtctcatgtgagtgatgaggcaggtgtcccctcttgtctgcctcgaacactccttataggatctcagtacaatatttttaaagtatttttcctttagcgtatggatagaatccatatgggaccaaagtttaataatagagatgttgtgattgagtactttacagttcaatgttccctatcaaactacagcagcatctgggatactgaattcaatgactctagagtaaaaccagccccaatcaatcagtaatctatgtatgtattcatttatttatagcacctgttatatggtggcattgttctcagtatcaggaattgtaatcgtgaaaagaaagatatggtctctactgtcacataggacttctttttgctaggctcaacagacttcaaataattacaattaaatatgatgagcaatgaacatcgcaatagagaaaatacaggatgttgagggagagtgtgaaagtcttgggctccagtccctgaggaagggacttttaaattgatacctgatggttgattcagaattaactgggcaaatggcttacattgtgggagtaggaggaagaaaggaacagcatttatgaaggtctgaagatgagaaagagtagggagtttctcaaaactgataaagcattccttatatggctaggacatcaaacatgatgctgattattaatgatggtgcagaagtagtcagggaccagataaaggagactttattggtcattataatgagtttgaattttagtcatattttttattttaaaaagatgagtgtgctgtagtacacagagtgaattatggggcaagaccaaattcatggaaagaggtgagtgagttgttgctatagctcagggtagagatgacagtgcctcggattagagtaatgacactaaagatggagagaaatagtaagaacatgcattgaaaagaattagtgaatgaatggaggtggagggtgaaagaggataaaggataactcctgagttttctgccttggataactgggtagacagtgatgccatttattgagatagggaacactgaggaaggagaaaagtatagagggaggaattatatatttattttttaaccttttgaatgtgaactgcctgtgaggaatccaagtggatatgatttaaaggcaagggttattataataggtttggaattgaggaccaagatcatggctagagatagagaaggaaatatagattttgaaatgaatagcatatcactttaatggaagatttgagaatgaaagcaatcactgagggagagagtatagaagaaaaggaacagctaagacagacactggaggaatactggcatttaaggcagagaggagaagaaagaaccacgaatgagctgaagaaagaagcacagaaatgtagtttacagataccaaaggaagaaagtgtttttcagaaggccagccttgtataatgctgcatttcatgatagtggtcagaaggagtttgtgttcagaggcaaaagggatattcagagaaggattcagggaggagatagcatatgacctaggccttgaagggtgagttgagatttgaaagatgaagctgaggagaaaagatagaatacacgtggggaagagacacatggaagcaagtgaatgcagggcctggtaaaaagacagtggcccaggttgttttagcctatggtacagaggagaagatatctaaaccctggagatcttccctcaacctcttcatttagtatggagaaaagcaagtggggattatgttgtggagggcatcccgaccctgacatggaggaaatgagtgtgggaagcacttcaagatgagaagtgtctgaaacagccaagaaaggaaggacttttgaagattaataaataaaaatacttgattttacagttacaaatgtcatactctagaagtggcataagacaaatcaactcgaggtaaaggatttcatctttggcccaataagaccaaaagaaaatgtcactctcattctgagttctcccacaattctcaaagagaaatatgatttagggagttgtagtgcttagaaaagataagggtagaaagaaagaaatattctgaaccaataataatatgtcattataaagtagagaaatattcatgattctgacagcagagaaagaagccatattctgcttcctccttagtcccctcttttctctaattgacctggatgcctatacttgaggattcagaactcatggtcagtttgctgagcactcaaagttggagaaagaccctctgcctcactacaagcaaagaacaaccttgttcttacagcacagattaggtaatgagtttatgtagttatgttcagccttgagtattttgcaagtattgccctgatacttataatacttaaagtacatggcttattgacactatatacatagcgttagctaaatgttcggctcctctgttttccttcgtgacaggagcacccagtggtgctgacaaaatttgttgaaggggcccgagaagtagaaatggacgctgttggcaaagatggaagggtaagtgctttattctcatctccttcattcctgccttctcatcatttttttctttaacaattttgaaatattgacaggttagaattcataatatctataaaacaggtctccagtaatagtggagaagctgtaaaaaaaatcaaattctctgacaattcagttgatgtgtcatgggtatcatatttcctatgtttcatactgttagaatttctctgatgatattcaaaagtaattatcatcctgtactcatcattccttttgaatagattttctctctcattttcttttgtctgtgtctttccttttatgtttcaatggctattatgaaaacatctaatacttttctttctgaagttcccaatcgaatcctggtttttcttctttcttcatttcccatcctcctccctttttattgggttaataaaggcaaagtcaaacagagtaaagtggataaggataataatattaaattggcttaccatatcacatcttgtatttctaatacaatgaatacctccaacttcaaggagaaatgaaaatgtgaagaatattttactttagttttatagttgtattaataatgcatttgtgacttctcttaaaatgtagtaagttatgttgtagggagtctatgccattttacttgctttaaggaaaaatacaaacttagcattcatcttctgctttgcaaatacttcaaaacactactgaagatgttaaatctttttctctttttccttccagattagcatttcagagtagatcttgttaataaaaatggtaatggtatctacttacaacagaatcacataatcttgagttgaaacacctttagagataatttattccagccctccaccctccaagtcagatattttctttacagcatccctggaaggtggtcatctgttttcttttaaacactttggtgatacaaagctcaacacattgtaagattatatattgtggtcacttttttttgacatctcaggtattctttatcttgaactaaggtctgtttccttggaagtcttatccctgattttctgagtttcagagcaaaaacttaatctatttccttttcaacatcttaagtatttgaaggttgagatataaaataagaggaacgtgatacctatatatggaagtggagaatgtaagactggcctagagacatttgtactttttcaaatactgtactggtaaaataatgctggtttgttggctttatttggctctaggtttgccagcatatgtgctttccctaaggttttctcagatatcaactattgcacatcgtcctgtactccctcttttggaaatgttccaggttattcacatagtttttaaattgccatgttaagaaatggacatagaactgcaggttgctgagctcagtggggtggggtgcctgagctcagtggggtgaatgcctccccttttccagacacttcaccaaaaaatgagctcttattattttataaataagctcttgtaaaaaatgagctcttacttatatgtggtctgttttatccttacaaacattctatgagcaggtaccattgttattcttatcttatcagaaaccaagactaagtaagtaaagcactttgcccaggtcacagaacagaaggatggaaactcaaatgtcactgttttaagacgttgctaaatctgataagcaaatctcttatgtaatttatttaagtcttttatacctacccaattattctcccttactctcagctgcatcatttcccaaggacacacatattattaacatataggttatagtgattgagaccacagactttggaatctgacagataatattcaaaatcctaactcagtcacataccagtcacctgaacctgggttatttattattacattacttttatttccttacttctaaaaaaggactagaatatttttcctttcgactccttcctctttcaaacttccatttaatgatctcttgatgagatctttgagacttatttttggtccacctaagttataccatttacctagatagatattgagctctcccaccttcttttctttcccagtgcctaaaagataaagatattttaagtgcttttcaaatgctttagcttcctatcctgttcttaaaagtcaatatgaattggtttagttttactcttttcctattacttatacccatgctaatcagtggatgagggaggtaggctctcagccactcttagctgcctctacaggaaatctgttactgcacagagaggcagcattttctactgctctcatcaggaatgtagcaagggaactacttagtgctcagtgcatctgttaggaccaaaggggaggatgagggagtagcttccttgaaggaagtacctgaaaactttttctaaaatcctttttttttttttttggccaggttatctctcatgccatctctgaacatgttgaagatgcaggtgtccactcgggagatgccactctgatgctgcccacacaaaccatcagccaaggggccattgaaaaggtcatcatttataaataaaagtggaagggaaaaggcaacactcagaaaaaaacacctaaggttttttttttttttttaaagctaggtagcaatgtaagatatgctgcaggttaaatttaatgatgaggctaacttccttgctctgagtcacctgggtattctaaagataacaattttcttcactgtccttttgagcccctttggttgtatgcgagtacaggggttctcaaacttgaatgtgcatcacagacacctggagagcttgttaaacacattgctggactccatcccccagtttctgatttcatatttctggatcgggctccagaatttgcgtttttcacaagtcctaaggtgatgctattgctgctagtctggggatggcagttagagaactgctactcctggggattctaatgtttcagggccacacacaggtgagcggcatctgaagcaatgcttctcagttaggagtggtgaaacaggtgtggaccagtcacttgagaactttctggaatctatgctttcccttctcacccttgacttcacctccaaacagcactttttgatatctcttttgagctccgagagccagccgtataaagaacttaacaaaaataatgactctgccttagtactcaatatgcactgctaggtgtacatttagaacctatcatctttttttttttttttttggagacggagtctcgctctttcacccgggtgggactgcagtggcgcgatctcggctgactgcaagctccgccttccgggttcacgccattctcctgcctcagcctcccgagtagctgggactacaggcacccgccactgcgcccagctaatgttttgtatttttagtagagacggggtttcaccatgttagccaggatggtctcgatcctgacgtcgtgatccgcccgcctcggcctcccaaagtgctgggattgcaggcgtgagccaccgcgcccagccgaacctatcatcttaaataagctttgaggaggtcccattagtctttaggtatattagatcaggctcaggctcagctctttttagtgagcttttccagtgaccctgccatcagaattcaggcagacctgtctctctggttgtacattgggctggattctgaaggtctttgttctagaaggtagaggtagcaggatactttgtaatagcagaagcattaaagaaaaaagtccttggatctcaaatgtacttcagtttctcatgtcaggataaatgatcctcagaactcaggattttccaaatctctcagagctcaatgtgtcatagactctacttcgttttatacccaattacattgctgaaccactcttgtgagcataatgagtgaggagctcttgctctttgtaatcaatgccccctcttggtatagggacattctggctctggttgaatacagggattcctgtatgtgacatgcagggcttccctgcagggaaacactgtttccttctgaacataatatctaaccttgtagagtccagggcaacagaaaagcaacacaaaagaaatctctctggtttctttgcagtaccatgtaatttcagggcctgtacctcccagcaggtaggtcattacattgatatagaggttggactgcagtttctggtgctaaggcaactagactgaaaggatttcatttaaccctcaatgtaaaaccaggttatataattgtaggtagataggggaatttggcagagagataatcgtgtacaattatttgttcttttcctattattttgtgtgtatttattgcatattattttgttaatagaaacctaatagtgccctccattataattattaatgtagatatatagctgtctgtgaagagaaattaaagacatccaaatttaaggtactgtgccttttagaaagttttcaaaaactaagatatgctctttagcacactatacgattatgctttttaattcaggtgaaggatgctacccggaagattgcaaaggcttttgccatctctggtccattcaacgtccaatttcttgtcaaaggaaatgatgtcttggtaagaaatgccaaggtgcctgagaggacaccaccactgtgttacgtcatgttggtttgcatctctctggtaatcttctctgtgaacaccagacaaagagcaactgagacccctggatctgtttgtgtctgagtgtggaatgatgcatagcatataatgtctaccttatttgaaggcccaggctattggtggcactgataagtcagttacagctttgtaaagcacactgatccactgggaaggtcactgtatgccacctacagtatagtatagatggatacggtgagacagactatcataaataaatggaatgtgtagagtagtcataaattctgtgtactgaaattctgctttactccttacccagagacgataccatttgcaaaaatgataaatgaactagattagtcctaattaatttagtctacttagtttaactaatcggtaactgccttagtctgttttgtgttgctataacagaatacttgagtctgggtaacttgtagagaaaaggggtttacttggcttatgattctggtggctagatagtctaagattggaaagctgaatctggtaagggtctcaggctgcttccattcatggtggagagtggcaagggagtgggcaggtgcagaggaatcagatggtgagagagaaagtaggggagagaaactgaagaaaccagactttttaacagcccactgttgtgggaattaatttactcctaccagactctgattatcctttttaatttaggtgaaggatgctaccccaacaggatagcattaatttattcatgaaaaatccacccctcggacccaaacacctcccactagtctccagcttccatcatggccacactggggaccaaatttcaacatgagttttgatggggacaaaccacatccagaccatagtagtaaccagcattgatttacctcctactcgcagtcatttggtggctgcaaaaatgtattaagcaagcctctgctctcaaaaaatactgtaatttagtgaaggttgggaagaaggtaaatttgtagaaaactataaagtagagtatcacagttgctagaggggatgtacaaataaaatggtattggaattatagagcagagagaacgtatttgccagtgtgtgtgcatgagcatgtatttgagcatcctatgcttggttaggggtagatcataaaagacttcaaggtagattttgtattgtgaactggatctcgcaaaacggttggaattttgacaagttaacgatggtagagagattattacacatagatagaacatcatctgtaaaggtgagaaaagagcatatttggagagagtaaatagttcagttgagtgagatgattttactgagtaaaatgggtgaactgggaaagtaagattgaggccaggagggtagtataagataaagacagtgaggtctccaatgaagcaagaggacagaaggccttcagggactagactttaatctgaagccagtggacatccagtgaaggttttcaggaggggtatggcattatttgagctctgcattaaactaaacctgtcagcagtgcatgggaatgcaatttggaaaaaggcatgaaagaaagttagagttcaaagatactgactgaaagtatcaggaaaaatccaagcagtaaggagaaaagagacaagattagcaaaacaagagctggtccccagttaataacagctggaaaccagtggtagagagaatattaatattgttgttactggctctcaatgtcctctttctcattttgaattttatctcttcaggtgattgagtgtaacttgagagcttctcgatccttcccctttgtttccaagactcttggggttgacttcattgatgtggccaccaaggtgatgattggagagaatgttgatgagaaacatcttccaacattggaccatcccataattcctgctgactatgttgcaattaaggtaacattttcaaaaatttattagtcattttatgagttctagtgaaattaaaagaacaatttgtcatcaaaaatcttgttacttttaaaaccttctaactaaagggttggactagggatttacatttcctttcaataatgtactgcagttgtactataggcaactttatgtgaactgttgtacatttcaaaaaaatttttaaaaccatctagaattgtataacttcaaaatcaattagctgagtgaattataagctttttgtgcagctgacacatgatggtgctagtttagctggtaaatagaaatccaggacacaccttgttaggataaagcttgaattgtgccaactcttacatgacttttgtaaaaagggttagcctgtggggttgattaaattcctaccacattgaccacctttgcttagtatatattttcttcagtggcatgatttttccatttgaaaaattgagacagctgttgctgtatatggtgctgtgcggttgttgaaattgatgacacctttataaagagtgaccaggaaaatttaaagtttgttcactaatttccaatacatatgtatattttaaataataccttaataataaagccattgtgatctcctagctgcatcagtatgatggtgcacagaattatgacctttaactacttggctggacaggcatgaggattagtgatatataaacgtatttgaattacgtagatgaagagcacaatgaaattaatatatttatgtaacattaatattgatatatttatgtaaaattgacaaatttctgatgttttcaaaaggtttccgttcctatatgtactagtgacttcaaccataattgtgttacagctcagacttggacttttgacttttatgatgggaactttaagttgaagttgtgaattaaaaatcttgtttaagctgataatgtaggatgccttgaattttatagtgcattgagatggaatgtgactttttatgttgggaggagaggtggcattttattcatggagactgtgacaaacatatattgttaaatcttttagtagaaaaatagagaaattttttttgagaccaacgattagtagccactgaaaaatatttttttccactggagattctatatatggattttaagttcatgtttctttattcatagttataggagtatgcttatttcttttagtaaattgatatatgaatttttaactaaaaataatattgatggatagatatgcttttttttttttttttttttgagacggagtcttgctctgtcaccctggctggagtgcagtgccatgatctcagctcactgcaacctctgccttccgggttcaagcaattctccccctcagccccccaagtagcccccaggtagctgggattataagcacatgccaccacgcccagctaatttttgcatttttagtagagatggggttttgccatgttggcaaagttggtcttaaactcctgacctcaggtgatccacctgcctcggcctcccaaagtgctgggattacaggtagatatgcattttttaaatgcactgtatcttctagcttactcattccctagttagctttgtatataaatcttagtttttttcaaattacttagtaattgtcaatcttaatagccctagtgaggctaattggtatcaacagatggggaaatagggaagctgaaatgcagaaatatgtaacttgaccaagatgatccagtgaaatgactcccaagctagaattcccatcataatttagaatgggtgccagaatcaatggagcaattgataaaattcctccatgtaccagataagtggacacatagcgagaaacaagaacttagtttttcatgaattgcatcagtaaaataaatgaaaaggaggcactcctatactctagttcatatgaaagttctgcacaaaggtgtttccaagcagaatgtttttcaaagcttttaagaggtgtcaacaacagtttaatgcctcagaaactggcttacagacagccatttctggcaaggtggcttgttgcaagttcaaatgatcagaacaagaagaggaatgtttccaaagcctatcaaagagaaaaaaatgtgtttgaactctgtctggagagaccaatgcccagtggactttgaaatcattccaataggaatatgcatgggccagattagaaacactggtccagactggtctcaggcgccctatttacagaattaatttgtgattatttaacctaaagttttggccaagagctcaagaaattcttggaatggagttttaaagccatctttcaagtcggatgcttggacccaagagattttttacatgtctactgtagcctaagtgaactctgtgagagatgatttgctaatatatttatcctctcttattcattttctacttttccctcacataatttttctccctgttttttttttttccaacaggctcccatgttttcctggccccggttgagggatgctgaccccattctgagatgtgagatggcttccactggagaggtaactagttaataatccatggaagctttcattaaatctactttgaaatctatggttttatgatttgaatacagtaaaataaagggaataaaaacatctgctatcagagtaagactcaaagagcttatgaattttgaatttaaaaaatattttacttctattttgaatagggtctaaattcttatttatattttaacatgggaatataatacatgtgttactaattcattttcacatgagaacatcttccaggtatttatctagacatccaagtaaatatcttctgtgtcttactttttatttaaaggttctcgggtctctctgtaacaacacctcattccctgccttgctgccatgaaattagatcatttgatttttactagtaatatggagaatgacagcattataaagatcatagacctaaacattgtggaatctgcagatacatgcaaaattttaggactacttttaacctcctggggattatctaaaaactataatggaatcggccactggatgtccctcttcacttgtgttggggctgtgtcagctgaaggtttctttaggattgtgaaatgtgtttcttgtaaagagctgtcagattctagaaagttctctccatgtcagtgtcaggacattttatgaatcacctagcccttgacagacttactagatacaaacttcagattctcatcagtgcatatccgagtggcaatatcagactgtgagccatcattgtttcctcttggtattaaggaaaacctaaaaggataaaatacttaattgcaacaaagtacgtgatgttttatatggttgcctggttacaagcaagatctgtgatgagaagccaagtgagacaagaaggcaggcagtcaggaataaatggctgtcctgtttgtatttggactcttagaaaggggactctttgcctctttgttgcttcttttaatttaagggcaaaaaaaaccttacttttaaatgaaggcactatgtacgtttcatctccagtcggtttaaggagacagtcttcaggttcttcttgatcccatggtcgctactactagtaatgctgattttagatggcccagggttcagatcagagagagatctattttccttcatactgttttatttttctttcttccttttttttttgaaacggagttttgctcgctcttgttgcccaggctggagtgcaacggcatgatctcagctcattgcagcctccacttcctgggttcaagcgattctcctgcctcaacctcctgagtagctgggattacaagcatgcaccaccacgcccggctaattttgtatttttagtagagatggcgtttctccatgtgggtcaggctggtctcgaactcctgacctcaggtgatccgcccgctacagacatgagccaccgcagccggcccatgctgttttctttagcatggcaaatttgttttcagtggttatgttcattctgcatccatacatatgttatgggagttattgaaatataaaaataagaaagaatgagaaattcagctcccctttgttatatctgtttctcaagtataaagagaatttttcttccattatttgaaagagtcgttaattccaagtgtcatacagtataatattacgaggtctgttttattactgacatcagaattctagcttagtaaaatcttaattatgcttcaaagagacattttcagtgtccaaatggcttgttgtaggattaaataaacattcagctactgatataagtaaggggcattttatgttcctagtggtaaagtggggatattagtcctaatctttaatggcacatttaactactttctatggttctgtagaaaatttttaaaacctcgtctgtgttgttgcatctgcactatgatgggattacccaattcttttcaatagaatttgagactcattaacttaggttgaccttatttaagttagttgcccagtacttgactgagtaaaatgttcactgtggagagaaaagcagcaaccacatgtactggtgaccagctgaaggttatagtcataagaacttttcttgcacagaaattgtaatttgcttaagaaatgaatttagccatcagtggttttttttttcttttttttcttttttattattattatactttaagttttagggtacatgtgcacaatgtgcaggttagttacatatgtatacatgtgccatgctggtgtgctgcagccattaactcatcatttagcattaggtatatctcctaatgctatccctcccccctccccccactccacaacagtccccagagtgtgatattccccttcctgtgtccatgtgttcccattgttcaattcccacctatgagtgagaacatgcggtgtttggttttttgtccttgcaatagtttactgagaatgacgatttccaatatcatccatgtccctacaaaggacatgaactcatcattttttatggctgcatagtattccatggtatatatgtgccacattttcttaatccagtctatcattgttggacatttgggttggttccaagtctttgctattgtgaatagtgccgtaataaacatacgtgtgcatgtgtctttatagcagcatgatttatagtcctttgggtatatacccagtaatgggatggctgggtcaaatggtatttctagttctagatccctgaggaatggccacactgacttccacaatggttgaactagtttacagtcccaccaacagtgtcaaagtgttcctatttctccacatcctctccagcacctgttgtttcctgactttttaatgattgccattctaactggtgtgagatggtatctcattgtggtttagatttgcatttctctgatggccagtgatgatgagcattttttcatgtgtcttttggctgcataaatgtcttcttttgagaagtgtctgttcatatcctttgctcactttttgatggggttgtttgtttttttcttgtaaatttgtttgagttcattgtagattctggatattagccctttgtcagatgagtaggttgtgaaaattttctcccattttgtaggttgcctgttcactctgatggtagtttcttttgctgtgcagaagctctttagtttaattagatcccatttgtcaattttggcttttgttgccattgcttttggtgttttggacatgaagtccttgcccatgcctatgtcctgaatggtaatgcctaggttttcttctagggtttttatggttttaggtctaacgtttaagtctttaatccatcttgaattaatttttgtataaggtgtaaggaagggatccagttgcagctttctacgtatggttagccagttttcccagcaccatttattaaatagggaatcctttccccattgcttgtttttctcaggtttgtcaaagatcagatagttgtagatatgcggcgttatttctgagggctctgttccgttctattgatctatatctctgttttggtaccagtaccacgctgttttggttactgtagtcttatagtgtagtttgaagtcaggtagggtgatgcctccagctttgttcttttgacttaggattgacttggcaatgcgggctcttttttggttccatatgaactttaaagtagttttttccaattctgtgaagaaaatcactggtagcttgatggggatggcattgaatctataaattaccttgggcagtatggccattttcacaatattgattcttcctacccatgagcatggaatgttcttccatttgcttgtatcctcttttatttcattgagctgtggtttgtagttctccttgaagaggtccttcatgtcccttgtaagttggattcctaagtattttattctctttgaagcaattgtgaatgggagttccctcatgatttggctctctgtttgtctgttattgctgtataagaatgcttgtgatttttgtacattgattttgtatcctgagactttgctgaagttgcttatcagcttaaggagattttgggctgagacagtggggttttctagatatacaatcatgtcgtctgcaaacagggacaatttgacttcctcttttcctaactgaatactctttatttccttctcctgcctaattgccctgtatttactctaatggtggttctgtacctgtgccaaatgatgatatacatggcagaattgactcctatcaggttcaaatataccacttgttctataattatgttggctatttgacttgtagttatattgtagcacaattaccgtaaacctaaatggaacttctgtatactctaacattactatatatgttagtttgtttggaattgttttttccccatatggctgtggtattcaggactagtagcaggatattttgtttcactttatgaaaatgatgtttttaaaaaacaggttcctttgaggttttcatggagttattaaatttctcagaaggctgtctcataagctctatgaaatggctccaaaccaattcagcagttacgcatttctgctactgaccggtaaattcatgcacggctgcatagtatatatgacacatactgttatttaaacagtaagtcatattaacattcggaaacttaccacattatggaccagaagctgtgatttgtatccaaataactctcagtagaatccagttatgttgctccattgagtgttgttggatagaaaaagaattgcttattcattcattatgcttaattaaaaacataagatacatctgccctggccagccttttaatccctggattcagattgcacaggctttgggcaacattaataaaatctacagaaggagtctatgagtaaagtactttccatttgtgcgtgcatgtgtgtgtgtgtgtgtgtgtgtgtgtgtattttaattttaatttttggtaggagtggttgactattctttgcatcctctattttaattttttatttatttctaaacaggtggcttgctttggtgaaggtattcatacagccttcctaaaggcaatgctttccacaggatttaagataccccagaaaggcatcctgataggcatccaggtaagtggtttgtggctgtgtgcttgcccatggtcatacatggtgagtggggaggggcaggatagaatgttaattgtggtatagaggaagggagatttgttttacgtttccgtttatggcaacttccaggaagaagggacatttgttctctatttgcttcctgattttgccttctgttgtatcagcccgtgcaaaaataaaatacagacagaaagaaaatgtttctagtgaagggatatttgttctaaatgggatgcagggtactttaaaaaatgaatctcttattctttggttttgtcttttctatatgttttactcttagctctccatccttagttcctgaacataggcattatatgaggttggatctcacttcctctgtttctcttgatatttctctgtctcttgattttcccccttgccaattcatccatgtctatagtacctactcttctatctatagctaccacctgtaaatttacatcctcagccatcccatatttccaacaatctgctggatacctccacttgaatatctcaaatccaacgtttctcaaactgaagtcatatctgttctctcctgaccatctccccttccttcctttcattcattcagtccttcacatttcaatcacttctaaatgccaaggattcaaagttgaatacattgatgttatttgattaaatttctcaacttaacactccagattgaaagtttttgaagggtagtgacttaatgggcctaatacagtcagtttatttcatagtatactgtagaagttcttgaaatattattcattggtaagccttctaggtcaaagtagggtgaaatgaatatctttatgcaataaaaaatgcactgtcaatttattgatgtaagttaaatataaatcttagggcaaaatgataggaaacttctattactatttggaatgctttttattactattcagaactacttttattactattactaattgcaagagtgtacaaactgtcctgtttataaatttcctgaaaaaatactagaggcttcccaactggtcattcatttttatttgagattagtaattcttgggtcctatgaaaaacaacaaatggtcttatataatatccctgctgtgcttttaataagctcaaactctgcatggctacataaaaatcaataaaaatataattagaacagtaccaggtattctcaagccagtgggtgattattttagattccatctcattagggtgtcttaatattagcaaattagactctggagactttacaggtagtggctttggagaagtttctgcaaagagtaacttgggattttgctttataaaggtaccagaaggacgacggtgaatagttagagcagaggctaacaagatgacttgcaattgtgaagcttaatggcagtttagagacaaatcacaccatatgatagactcatcatgttataaatgggtattaagtattattaagtcccaagtaggagaatatttgcccaacttccagttatggcttaaagtttaatgtgagacttgggggcattcagaggagaccatgcccttagtccacatcttcacatctaatcataatagtgctaacattttaaaatgccactttaagaaggcagtgatgtataaaattgtgccttgtttggttctagtgctgcagggaaatgtgaagcaaaaattaatttgatccctatgaagtatttgcgtaattttggcattagtggacagaattttgctttgtaggggaaaaaagggtttgttagaaaaaataatgttttcttaaagtagtgagagctggctattgaaaatctacctttcaatactttccttttaaaagaaataaatgttctagcagctacatgagttgttgcgaagaactttctgcacatgagagcatacggacacagatttaaaaatatattaaaaagtacttaaaggaacttaataaaattatacttaagaaaatatttacagccatggcaaaattgatcagctaatgcatagtttcttcattactatatgtaggattttcattcatggtgtttttaaaaatgcttagtctgataaactgaaaaagcgtgacagaatatactaaatggagagttaatagctataaaacttacttgactacttcttagttagtatggggccaaatctaatctcaactttttaccacagcttcatagcaattgcagataaagtaattagggttccatattttaggatacattgtacttttaaaaaacattttatttaacgtgatcctacttggtcagaagaactcatataaacacttttggatatattaagttagaactgaaaaatagcacaaaaaagactgctaatatataaatgggggttagggatagtaaatccaatggaaggcatctagttgaaggtgagttattatgaagttccaagagaacttgttatatggcagtctttctaacttttaaatttcttctctctttcccaccctactcctttacacatacagactctctgtttctggtcttccaaagttaaatccaataggtcaaagtatctgggaagtttgaaatattcataacatcaatcttataactaggacttaggataaaagaatcaagatgtagattttgtcaaaggattcttctcaatctattacattccctgtgtctctaccaaggcatttctaacataagaaaggcataacacaggtttatatggcaacaaaaatcatctttgattttcctgtaatatttctagccacctttcatcgcattaggatttatttttagttgctgtgagtaggcaatctgccttgttttgaagttttctggaagaccctttaacattaaatgatttactctagagtagatcaagagcactcactgtgttttcctctctgattgggctattcagtgatgcttgtggagtggcaagtaccaatctgacatctgcgcttcagcatcgctcagaaacacaaagcaagcattttatttgaaaagacaactccaagtgacatgaataaccttttatctttaatatggaatcattaggaacaaccatagagttgtcaatccagaggtccccgtagaatccacaggcatcacatagtattaacttggctttcttttctgtagccaggagttggataaatgtgaaaatgatcattggaggaaatatatatatttttcacttttaaaggactgtcttctttataaacatttccaagaaaataaatcagcttgtacttttcacctttcgtaacaaatggtttcttacacaggtattttcaatcagcttttaaatctgaggctactcagatgcaagctgacagctgtaatttctttttgtagagaggctgttttatgtgtcacaagtgttcaatacatgtttgatagaagtttataatgtgcctatggaagccaacacccagaccagaaggtagagtggtttcctggctgggaactgtcgatactgtcatgttggatatttatcttttccacctgggggacaacactgaaacagctccataatgaggttctgcctggtgtctgcaggtcttagaggacttgctgacttattttactttaaaatggcaaagaaaaaaattacattctagtactcctcccttaatgtttttcgtggtgattttagccaaggttaatgcaatcttgacttcatattacacaatgagtgaacgatagtcttcctatcccctattcccccctttctcaagcttaagtatgcatcaaaatcacctggagggtttgtaaaacaacaaattgctaggatccactcccagagttcctgattcaatagatctggggtggggttcaaattttcatatttttaataaattcccaggtaatgctgatgctgctctgccagggaccacagtttgagaaccactctacttgagcgatggtactttagaaacctggttaaaagttatgttagcacttattattgtcaaacatattatcagggaatttttgctaggggaaagtataaaagattgaggaaagttgagtgcatgattaatgtatcaattagcaagtgttggagatcattatgctgagccttctaatgtgatttggtacttactgaagtctattctgtgtttagcagagggtcacaatgtaatgttccatattaggggtatttaacaacatttggaagttcattttggacatttcatatatatttgttatataccaaggaatcttaaaacatgaaaaaaaatttatatgccatcaaatttagccctttgccttttctgaggagaatgaaacttgaattgtcttattcttctgtctaaccaattgtcctgatgtcactaagagttattctctaattttttacttgtttttttcttttacgtctaaccatgagcttcttgcatctaagctcatttctttctgtttggtcctaagtggaaatgaaaagctactttcctgggcatggttaaaattcatgttctataaggcagtcatgaataaccactgagcctgcctcagctgaaattcatccagttacatttatctattctatttaccaatagtttcctcttataaaactgcagttctgggattgagggggccagaatctgaaagaattttatatttgaacatagtctttggggtcttttcttaggatttagatctgtgctcagaaatactctgcaagtaaatattagggggtgttatgggctaaacattatcaaaattgtgcaaggatcacatgtgttttattgtcacagttcctagtttctgactctgaaataagatcatttgattttttccagccatcactaatatggtttataaacaggttacaagacatttgctgaagtaactagctcatgtcatctgtttaaaacctttttacaagggaaaccaacaagaatgttcctatttaaagaagaatggatatgtttttaacagtgtgtgattttaaatacgccagctcagttactcagacactcatgttaatgaagtcaaggtcagggtttgatctttgggtaggtcacctagtgttgttttctttcattctgaccactatcttgcaaacactagctcttgatcacaggaagtatgttcagaaatagggaactcctgatggcaatggtcaggaatccagggaaggtaggggctggacactagacaggtccacctggggtcctaggaaagacacagcaatggactacaggaaaatatctgaacagtgagatggagcattagggaagcctgtgtggaaatgaaatgcgtataaatgagggggcagtcagtttgggttgtaagtgtaatcgtgggtagaggaacccatgcttggaaactaggatgtaagggcaggaatctagtttttaggggggctgaaaaaacaattattgtaattataataatatttattaagaactattaataggcaagtaactgtgctaaattatagtagtaacacttaagtagtgcttacttctaaattagtttattgaacactcatactaatgtaagaactgttactattcctgttcaacagatgaggaaactgcatcttagagttgttaagtaagatattcaaggtaacacagtttaataaggtgtggagcctcaaaaaaaaaagttgaaatactactattgtcatcactgtttttgagtgaagaaatgaaggcaaagacattaactttttgaagctcataccactagtgaatggtgaaagccaggatttgaaatgcagctaactgactttagagctcattctttagctacaactttttattgcctcagagtaaatgaaaaaagagttccaaagattgagttattgcagggactagtgcataagctactaggaaaatggcctagttattgaagagcagtacaaaattagaacttagaaataagagcaagttgagcctgggtgcagtggctcatgcctgtaatcccagcactttgggaggccgaggtgggtggatcacctgaggtcgggagtttgagaccagcctgaccaacatggagaaaccctgtctctactaaaaatacaaaattagctgggcatggtggtggatgcctgtaatcccagctactcgggaggctgaggcaggagaatcgcttgaacccagaaggcattgcagtgagccaagatcgtgccattgcactccagcctgggcaacaagagcaaaaaaccccatctcaaaaaaaaaaaccaaaaaaaaaaaaaagaaataagagcaggttgaataggcaaaacagctagcctgactcggtactggctcctaacccgcatatcttttaagtcctccctgaccaggaaaaggatccttgtagaaccgaagtggatctgaacttacaaagaccaagtagattaaatagagaataaaaggagataagaacaaggtgaaaagcagggatcaagattatgtggatggaatttcattgacattgggatatagctaaaactcacactcaccatagaaggataaaaggataaaacttgtcattttttaatataaagcatccggcaacatgtaacattgtcttttaagatgttgtaaggaaataccatattgcataaatgaagagcatgtatatctagaaagtgaattttgtgaaattccttttcagcaatcattccggccaagattccttggtgtggctgaacaattacacaatgaaggtttcaaggtatgttcattagttttaagttgttttctgtcagcatggaatctgtccacaaatcaaaatattgcagaatattggaaaagaaatagcccaaaatatgtccttttgatatgaaaggtttaactaacttggtagtttcaaaacttagagtcaaatcattaaaaagactggtattaacttttaacaaaattaccacaaattcaatagaagttgccagctaaaaactgagaaagtttagcttaagcacaattgagacaaagtcccaacacatttccatatgtttttcctttttttgttttcatatgaggttatagattctagctgtgacagttacaggcaaaacttctttgcagtgaatacctccacacaaagcctggttgagtaaaacaaaattattcccaaggcttatgatgggcctgtggccatggggattttttgacctgctaacaaggaattagccatgaataattgagaaattattaaatttatgagaaattgtcattgaattattaaattcaaattaaacatataattattaaaatggaaatgcaaataaaattgaggttcttaagttttttaaatcactgcaaatatataaaaaatgtttaaagtgcccatgcctctggactgtgagtccaagtctctatccatggcactatactacttctcatgttcagcaatttcttcttctttatgttttaaattacatgttccataaaaataagaaatcactgtgatacggtaattgattttttcattttaaatgcagctgtttgccacggaagccacatcagactggctcaacgccaacaatgtccctgccaccccagtggcatggccgtctcaagaaggacagaatcccagcctctcttccatcagaaagtaagaactaggcatactgttttctgaaataatttagaggattaactttgagaaccagtatatgaatatttcaccttacttgattgcaagtcttttaaaacaaatttaaaaatgaatacatttgtggatgattgtcaagtttcactctccatcactatggaatacataacgtcatgtgtacatggtgatatgaaacgtgtttcaaaatacttcttagtaaggatactttccttgacggaaacaagtgagagcatgaagaatgtaatgcagcactttatatttcatgtcaaacttatattgtgtatagataagtacatcgagtataagatgaccagctatatttcactaaggttgtgcataataaatcaatttgttgagcacttactacatacaggaacctatgttgagtactatgatgatgtcatccattggattacctaattggtcattccttgaccaggttttcatgccttagaccatgtcatcattagattttgtacgacattttatttcagcagattgtgtgaatcttcaggaataccattgcatcaacccttaaagatctatgtggcataagtacataggagataattctctgctgttttaagatagtgcagcctacagaatggctgtgccattctatgcaatatgttatttgttagcgttcttgagaaaccaacacataaattattatcactttaataaaataatggcattgtgttcaaaccttagcaggcctccaaggatgtaatagctccgtgtttggggcattgtaaaacaataattagcactactaaggaggcaatagagttaatgtgggagtgggaacatgggggtgaaagggcattcaatggtggagggatcacctctttttaaaaaataagtatctatcaaattaccaattcttaatgagtgaacagatagcattttaaagagaaaacaaacatctgcattccattagacttgcactagaattccttcaagaacacaatataatccctatataagtgtaatttaaacatctacttagcaatagaggagggcagatggcagtcaactcagcatggcattgacttgaatggctaagagagcaatttatgttagtattttataaactaactataaaatatgccttgttgtctataagtttttgtttatttttccagattgattagagatggcagcattgacctagtgattaaccttcccaacaacaacactaaatttgtccatgataattatgtgattcggaggacagctgttgatagtggaatccctctcctcactaattttcaggtatagtcttttccttggatatagactggatgggagttttatttctgtgcctcccttaagagtgtaatcagtagatgcacatctctcttttcccctctttgtaactttcagaatagagaggaatttttaataatctaaaataatgatgctaacatggtaggtcatggcttaaatgggacagttggtgatcaagcaattgagataatcaaaggccatgaatggccatggctctctccttacaattatcctttgaataaaaagtgacagcatgacatggaataaagatacaaacttttatttcattgtttctaaatgaaagccaccatataaaagcaacaggttaatgatggtccagatgtagcacaagtgcttgttcaattcacagaaaatgattgcatgaggcatgttcagtttcacttggacatgacccatcgaatttatcacagggagaaacagagtggagactcattaactttctgcctatcatatttattttttatgcagaatcagttttaatccctatgggaggagaaataagcgtattcacagtgacatctgagatataaaagaaagtccccatggtgaggtctgagacatgggagaaagtctccattacataaaaaacttttatgccttttatcccatacccctttgaaaactggggacagacacttgtgacttttgtcttcattcattaaaaattcacttttatctcatggagggtgctgattcctaccattatattttcaggtgaccaaactttttgctgaagctgtgcagaaatctcgcaaggtggactccaagagtcttttccactacaggcagtacagtgctggaaaagcagcatagagatgcagacaccccagccccattattaaatcaacctgagccacatgttatctaaaggaactgattcacaactttctcagagatgaatattgataactaaacttcatttcagtttactttgttatgccttaatattctgtgtcttttgcaattaaattgtcagtcacttcttcaaaaccttacagtccttcctaagttactcttcatgagatttcatccatttactaatactgtatttttggtggactaggcttgcctatgtgcttatgtgtagctttttactttttatggtgctgattaatggtgatcaaggtaggaaaagttgctgttctattttctgaactctttctatactttaagatactctatttttaaaacactatctgcaaactcaggacactttaacagggcagaatactctaaaaacttgataaaattaaatatagatttaatttatgaaccttccatcatgatgtttgtgtattgcttctttttggatcctcattctcacccatttggctaatccaggaatattgttatcccttcccattatattgaagttgagaaatgtgacagaggcatttagagtatggacttttcttttctttttctttttctttttttctttttgagatggagtcacactctccaggctggagtgcagtggcacaatctcggctcactgcaatttccgtctcccaagttcaagcgattctcctgctttagactatggatttctttaaggaatactggtttgcagttttgttttctggactatatcagcagatggtagacagtgtttatgtagatgtgttgttgtttttatcattggattttaacttggcccgagtgaaataatcagatttttgtcattcacactctcccccagttttggaataacttggaagtaaggttcattcccttaagacgatggattctgttgaactatggggtcccacactgcactattaattccacccactgtaagggcaaggacaccattccttctacatataagaaaaaagtctctccccaagggcagcctttgttacttttaaatattttctgttattacaagtgctctaattgtgaacttttaaataaaatactattaagaggtaa

SEQ ID NO: 43 - DNA, 159389 bp, Homo sapiens
  source 1..159389: mol_type = genomic DNA
gttcaaaagcatccagtatgagggagcagtgaagtttgcattttcctgatgaaaatgttggaagaggtatttggctttgttggcggggagggcaatgatttatgcaaaagttcctaatgaaaaaatggctttgttctgggttgtagtgatataatcagagatgcgttccagcatacagtgctcagaggcagctgtggtagctgtggttttctcatcagcctgtctctgtcatgttcctggaaacacatctatatgcttattgttatattcctcagataagttctgagaaatacaaatcgtcattgtttatttacttatatttttaaatcaaatttctgatttattcatgtattccagttcatcctaagatggtgatgtatgcctcggtattgattttgctaaatttatataactttgataaatataaaacacatatattttagaaagtttattaatgtataattgacatccaataaattttactcataaagtatttaattttatgcacttttgcatatgtatacatctgtgaaactattaccagagtcaagatagttaatctagccatcacacccaatgtttctttattttattttactttaagttctgagatacatgtgcagaacatgcaggtttgttacataggtatatatgtgccatggtggtttgctgcacctatcaacccgccatctaggttttaagccccacatgcattagtattggtcctagtgctctccctccccttgtcctccacctcacgatgggccccagtgtgtgatgttcccctccctgtgtccatgtgttctcattgttcaactcccatttataagtgagaacatgcacactcaatatttcttaatgccttttcattatctctcctttttgcctactctgtctgtctctagttgactcttgatctatttctgtcactatacattagtttgaattctaaaattttatacaaatggaatcatacagtatggattattttttgtctagcttctttcaccaaacattattattttgaggttcctccatattgttgtgtttggcaatcaatggttcatttcttttcattgctgagtattccatggtatgaatgtactacaatgttttttactcactcacctgtatgaatatcagaatatttgggtttgtttttagctactacaaaataaagctgctaagagcattcatgtgcaaaagttttatgggcatatgttgtcatttctcttgggggaaaaaggggatccaatagtggatcatgcggtgagtgtatgttaggcttttcatgaagcttcaaaattgtttatcaaagtggttgcaacattttatattcccaccagcagtgtataggagtttcaattctttgaggacctcaccaacatttgccaaggctagtctttcaaattgtagccattcttataagcaggtagtatcatctcatggtaactacaacttgcatttctctaatggctaattttttgaaagatttccttgttacagaatcctagattgacagatttttttctagtagtttaaatatgtttatccttaatccttaatcatcctttcatcctcatcttttttctttctacatgtttcctttttttctcaattttcaagatttttctctttattaatggttttgggcaattttattataatattccttggtgtagttttcttcatgtttcttgtgcttgaggatcattgagcttgcttctactattggtttatagtttttatcaaatttagaagattttaaccactgattttcacatagttttctgttaaaaaattatttttcttttcatgtttcattttacagagtttccattgctatgtgtttgagttcactgctcttttcttctgcaatatatactttggagttaatcccatccagcagatttttaatatcagacattgtagtttttatctccataagtttaatgcttgtttttaaaaatatctctcatgactcaactgcttgaacttatgaaataactactttaatttccttgtcaattctaaaatttgagtcagttccaggttagttttgattgacttatttttctccacattatcaattatatttcctgcttctttgcatgcctggtaatttttattggatgtcagacactgtgatttatttgatgctagagatttttggtttattataaatatccttaagcattgttctaggtcacagctaattacttggtaacagtttgagccttttggatcttgctcttatgacttcttaggtggaatcagacccacatatagactatggctaattatttcccactattgaagcaaggctcttctgactctaatactctgtgaattaggaggtcttttagtttttctgttccctctgatctttccaggtggttcttttcctagccttgggtaacttcttcacatgcgagtgttgaatacttcagggagaccatctgcagatcaccaaagttcttgatatattctggatacatgtctttaccagtaatatgatttacaaatattttctgccagtcagtgttttatgttttcatgttcttaacaatgcctttgaagtcaaatttttaagttttgataaagtccaatttatcattcttgtattttaaggatcaagctttggtgtagttaagtgttatttttaagaattttttttaaactttagctagagtagattttgttgtttgcaagtcagaaatctgactgatatgataattaaagaaaaaggccaagagaattgcattttcattccataaattttgaatctaaaatgtgagtgagatactctggaatcataacaatttattctggactcatagtttctgttgcttgtctttgcttctgtcaaccagatggtgctattggattggctaccaaggaacatccttatctgaatggttgaggttgtattgatctaaaaaatctccagagataatagtggacagttgctatcacttcttgggttcatggacctcatcaccatcttatataattagaaagagcataccaccatcttggtgagacctcaaatataaaaaagagcaccctctaattaaaataccttatgataaatccgtgatttggtcttgggttcttatgagcaggtaaaagtactctgttgtattggaaatcatttgattgtgaaaaatgttctgacagagatcaataattaaattaagtgaaaaaatatattaatccataattaaggcagttaatccattatttattgtaaacaacttaaagctaccatggaattccaacatctgagcaaactctggtgaaataagaaaagaactgaattagaaaatgggagatccagggtaaagtcctggccctaacactaactagctgtgagatactgggcaactctcttttcttatctaagcctctgttttgtcatctgtaaaataagcatgggctatgtaatgtgaagttctttatgttttttctggacctcactgtctgtagagagaaccaactggaaataacttctttgctgccttaaaccagcagactttattttaggacagagtgagtagtttgttgctaacaactttgggggatactggagaaggaataacccgaaaaggtaagttggttgtggcatttgcacactttattaatttttttgtataatgtattttgtattaatttttttgcgtaatggtgcaatatatccatgggtttagtgtaaccattacatacataatgtacaatgtacctgctaaacaatttctcctctctcacctccttcctaccctcccacctttccgagtctccagtgtcttttattctacactctgtgtccacgtggacgcattatttagctcccatttgtcaatgaggacatgaggtctttgattttctgtgtctgagttgtttcacttaagataatggtcttcattcccatccatgttgctgcaaaagacatgatttcattctttttatggctaaatattattccatggtacattttctttatccaataatccaaagaatgaatgttcatgcaggcacatataaagtgcttggcattatttcctgcagtgggtgtgcctgaaggtgaggcagagatggactggaaaagattgacgtttctttgaccagcaatgctgaccctttgctctttactagaggcagtggcttcactgtgcaaaacaaatgtgtgcttagtggagggtacctgaggtcaagggctagccatatagatgactatgagggaaatgcagtccgcattctatgatagtcattactttttgtatattccgcaaagttttggtataccatattaataaaacagcatatgcaaaagcacctaccagaacagctgtcagaacgcaggcactcaatgaacataacttcccttctcccagcttccccatgccttccttctaacatgtactatgctctttatctttataaacctctggagccctcttatgggtctctgaccattcagggttctcagtttgaatctgccccaggctttgatttttttctatagttttacttttataaacatttaatgactgtatatatttttctttcttgaacctacatgatatctagctagtgtaaccaaagggcaatttatttagaaacaaggtattaaattaacttaactaatatttattgaatgcgtactgtatgctagttaatattatagtgatgagaatatagtaggaaataagattagtcaaagttcctgtctccatggagcttataccgaaataatgcaaagtaggactataattaagtagtggatatattatttttgtcatcccaaatgtatttatctgtttccttattttatggtttctataccccagtatttctatggggaacttgtcatccttatttgattggagtcttagtgggactgtacctaaaaatactccaatctcccttagctaattcatggatatagtaaaccatgctggaccaatcagattctctgttaggttgagtaacaagaaaataattggagtgaattcagctcaaagatggcactcagacaaggtcattgactcctgtttcctagaacctcagagctttactagttcttgttggttccaaggctttattttttggctgttctttctgtgcaaaacctccttcagtgtttcttgtttaagttgctgaatgtacttttgtgttgcttggaatccagtagtcctaacttataccaaatctggtaaagtaagaagtattagtttttacaatctctattaattccaattcaattctcaggtttcatccactgaacagacaggaaattaaatctaatttttattggaaggggatcctcctttcccgtagtaataagaactaaggagtctcttgtcatcatcagtcatttttctacttgggtcattattgaaatacctattatcccagcttctgtgccacaccaaggacaaggaaatctttggtatggctgggtatccctgagttaggcttcagcttctacaggcacaccatgtaaaacttagtatatataagcatatataatttctctgaaactttgtactttccagctaattattctgatgcaaaacctccctcagacaattaacttatctgagagactatgctgtcttttaagaacagggcaaactatcatgttcattctgtcttgttcactcacctgtcctctgtaaattactctggatttgtgtactgaactcaagggaacaattaatttattcattcatttagcacgcatttattaaatttttcatgtcttccaggtcctgcatgaggctttgaaattataaagaacttacagcttctgcttgatgatgactcaacagttagagtggggaaggtaaaagtttagtgagctggtggctaaataatcaaataattttggcagtgataagggacacaatagaggtctaaaagtaggcataatgggagcacagaggaagctcttgagtcgtttggagatgtcataccagtgatggcttgcaggagaggatagctgggctgagccttaggaaacaagtagaaatttgcttaatatacaggtggagtaggagtagtacattccaagcaaagtaaaatggagagagagagagagagagagggagagagaaagagaggaggaaggagaagaaggagcagcagtaggagaaagacaaggacaaggacaaggttgggaaaaggagactgggtgagagaaaagaatggcacgtgcaagaaaatgcaagcagtcccacatgactggtatgactgcaatgaagagtccactggggaactaatgggagatgagcatggaaagggaggcagaggacaaagtgtggtgggtaaagaatcagggatgagtttatgtcctttgcagggacatggatgaagctgaaaaccataattctcaacaaactaacacacgaacagaaaaccaaacaccacatgttctcactcataagtgggagttgaactatgagaacccatggacacagggaggggaacatctcacaatggggcttgtcgtgggttggaggggtaggggagggatagcattaggagaaatacctaatgtagatgatgggttgatgggtgcagcaaaccaccatggcacatgtatacctatgtaacaaacctgcacattctgtacatgtatcccagaccttaaaatatattaaaaaaaaaaaagaatgagttttataaataggctgtcctgggcgaaaattccagctttatttctttggtgccatggactcaaggaagttacttaactcagttttcttatctgtaaaagagagaaggtggtaatatgtccgttttaacatattgaaaggactaaatggatttatgaatgaaaagcacctagcatggggcctgccgcatagtagacttcaaagacatttttctttcctcacttccctgccacccctaccccacacaccctgaaatctatcacaagagccataaaactagaggttactgttaaaaagtgcttggtggatacatttgggaagcagtaggaaactgaagagagagaatgaagctgaattaaggagagcctttgaatgggtagcacagattgtacttaaaaatcacaaagatttaaacattactcaattgcaagcatagtattgaaatgaaaacagataccaatgatacaaattgctataatcttgtcactaatcaatcaatactgtaatttatctatgacatttctatttggtaaatgccaaaatctctattttcagtttttacagatttgcagaaatattacgttggtgcaaaaataattgtttttggcattaaaagtaatggcaaaaccacaattagatggcatatgtacctttgaatttttattaaaattaagccttgatatttttaagttattcaatagcctttttttctcttctttatttctttcctttcctttaataatactttgctgtatttctccacatatttctctatgttcataagatactatataaacaaaaacacctatactaagttgatcattttcctagaaatgtaggccagtcacatacatttctttgcaatttacttttcttacatacaaaaatataagggacctccagctaactgcaggactcccataagatggaacattatgcacatattgaaaactaaacatgagatctttagatctacaagggatctaagagatcacctagtctagtggttcctgatgtcacctcagtttaattattttcttagtgggtagagattttgaatgtgagagaagtgttgaaagttctattaaatattaaactggcaatgacagaaaaatagatttggaaggagtaacctggggccatctttcaggtccaactttaatgcaatttcctcaggaagtgtttcctgatatccctgaccaggataagtccctttctgagtgccttaatagaaccttctatttgttctttgttatgtttactagcataatattaataaattatttgttattgtccatcttatggacacgttcaatgtccatacttacccatgaagtatcgtggtaagtatgaacatgatacttcattacctaatatattcttgacagattaaaaaaggctgaaaaataaatgaataaacagagaattttttgtgggggagaggcagtcatacagctttaaaatttgatgcagtggagtgggagaaggttgcatcaggggctcagagactgatattttccttgtgaattcatgacacttaatgttaaattccctagcatttgaggaacataagcttgcatttattggtgttcttaggaatgatcagactctctgtatgaggttcgcagtaaccgaatatatagggatattgttaatttaaaatagaagctgtctctttaaagtgcttacatcctcaacacaagtcaccctgtttgtggagacttgaagtagtactcaattgcttgtttagtgggcatataattagaacaaatggaaggtgatgatcttgaggcacattttatctaggttgccttgtgatcagataaaacatatttaccccaccgcagaaaacagaaacttttttagtgatccaattgcagtctctctgatgtacccagaactactttagatccctataaaaattgtttttacacttatacattatttctttgtgtcaacagcacaattaagctttctggtaatattttaagtaaaatattgtacatttgagagactatctcctctcattatgtattgatttaattcatgtaatgctcaatcttatttctttttgtattggttaaggttcttctggttaaaagtaatggaaatcaataagtcaaagaaaaggtaatttattggaaatacaccaaggtagctcaaagaagggctggattaaccaaacaatagtgccttaggaaaagcagaaacagtgccaagtctggggatctcagtggtgaaccttgtgaactaggatgccattccaatggcatctactacgttgttattcatttagctcctagttcatgagtgtgggggaggcagatctctattttcctaattacttctgactataatagaaaaagatcaagaggatttgaaatagagtacagttagtactaggaatcaagacaactttttttttttttttttttttgagtagcttcctcggaaaatttgacaggacattgtggctagctgactatgagacaagaaacaaaaggatgaataaaaaacgttaacttttacagcatgagttattgagaaaatagtagtgtcgtgagtaagtttggaatgtggagtgctttttagggggaggagattattatatgtttggctttatgcatatttgaatgcaagatggtgagatgtccccgttaagatttttaaagggagttatagtgaaaatagaactgggaatataaagctagtgttaggataatcatgagaaagaaataactctctctggagctaattttgtatgtatttcactcttctcatttctttgaacataggaaccaagccttaatcatttttcaatctcctaaggcttagcacttagtaggtggaactaaaacatcatttagacattaaattgagtgactcagagagaaaagaccagagaaccaagaataatttccactttctcttgggacttgttcaaaatgttgtcttcctttttaaggctctgccagaataaacctattttagagtctacctcttttgataaccagagagtcaacctgcaccatttgttttctccagttaggtttatgcaatttgggaaaggttttttcatttaccttctcttggttgttggactctttgcattacagttgcttaagccataacattagcatcttgagagaaaacaatgagggattcatttcagtctgcattttcctttgaatctgacaaaaagaagaacaagtctggaaagatagcatcccagaatatttttgcttactcttcactatttaatcaatacttccaccagaagtaagacagaatgtcttacttcacattagaagtagaaaccaggttagacatcctgataataagtgaccttattgtggagatggatgaggatggataaaatatggattctatttggtttcatcttaactgcatttattctatccccattttattgcccattcattgctccatgtcagttcaattctattctatttcggcttgagatatacccacaatataatgctagacatttttagtcaaaagcattttcaaatcttgtcaccagattagtcttctcttcttatgcatttcacgtttcctgtagtaaattatagtgaatttaaacttgtaatggttttcaacttgtagaccttaaacattttattaaaagtgtaatataatatcttggtaagggttaccactttataattatttccattgataggaaagttgattctgaaggcaacttagtgacttgcataaaggcatggagtgatttagctaaaagttggacaaagtgataaaatccatgtacaaatggcttgttctattgttaagtaatacagtttttgatgagtggagttactgaacttttcaaatagattagactcttctgatttggaaacgtatttgtggaaaatgccaacaatttctaaatgattttttaaaaattccattgatttttaatactttatactttttcttccaacctcaactataaaaataaaattattcactattttctatcaaatttcctttcttatgttgcaataatagccaaactactgagcattgtgtagaattctgctaaccactttacaagagagagatttacataagattcttttggttctggcttgacgtgagggattaagtgttttcaacactgtaaactcatccataaaacaatgttgaggtgggtataattattttcattccttagatgaagaagctgaggctgaggaggttattcagtttaacctaaggtggtagtcgtgagtggcagtgataaaggcagctgttaaactgagtttaagaaacttactgcagcatcgtaaatactgcctctctttgtgccccaacttccattcacactctatttctgttatgcatgtagctaaccaccacctacttcaggatcaactggaggacttgttaaaaataaaagatgcccacctctaactgtagcaatttagatctggcagatctagtgtggcccaagaatatgcatttctaataatcattccttgcagttaattatgcacagtaagcttggacaacaattgccttagttaatatcagaaaaatgttcatgagaaagaaaactttaaaaaatctttattcttaagtattgtttaaatactttgacaaataactggtaatattgccctaaaaactcttgccatgtcatcagttgaataaaactacaaagtttgaaaactctccaggacgtgacttaacatttctgatctctaatatagaaaaaatgatgacagaaggcacaacttgtcggcaggttgagagatcatggccttggggctgaaaaccctggggaatcaattttagccatagagggcaaagacgggggaaaaaagtacgagctctggagaacagataattctctgccagtttgtaattttgaacagtactcttctgccagccttggctcctgtggtttctatttagcatcgtgtaatggtctctcaattgtcaagtgatttactagttattttaggatttctgtttctttggtacttattattccatgcctactgaaaaactgaacaataaaagtaatcaattgggaacattttaatgaggcaatccaacccaaagctttgcattcaagtgtttgttcaaatttgagggggttatgcctaccagctctgttttacttggcctactcaatgagaaaagacaaaaaagaagagagaatttctggtaactttgagctgcagaagtaaaggtcgtttatcgggaggagttaatagtagaatgctctttggacagatgatgtgcttagattatttacaatccaccaccaaaaaagatttggaaacaagattataatttgccattgataggaggtgaaactttagctagatggtaggatctcctggatgttaaagtttaagtacacatggatagtcaaaacgctattttttatgtttctttgtgtggtacatggttttctagactgcattattcttgtgaggtgaacaccttgaatacagtttttttctattatttgttgggaaaatgtatacttccatgttaagttagcagctcaagtttcccaggtcagcgagagtaagattttctgattggcttacatgatgctttcttccaaggatgtggagtactgttaactctgaaaatcacacaattctttggtattcttttaaagttaggtctctgattaacactacatttctgcatcatggtttttttatttaggggccctggggtgaaagcttaagcatttcattagtcttgaccagatcacaaagaactatgaggcattttagagagcatttaaataattttggagggttattagagagttcaaaacgttaaagtgaagcaacaaggtctgtatcgttgccaaatttcaagagaaaaggctaattagtctttgaccttggagctatttggaaggggaatgtgttgcttggaatgtattagattaaaaattattctgaagaatgaagagagcacctgataaactactatatgaatggctttatacttagcagttctaaattccaaattactcttgtttttaaatagttatacataaatctgaagtaactgcagatttttctgtttctctactgtatcctcttaggactagggtaatgactagaaagggaataagtatagcaatagctaactatgtctttttttttaattaaagtttttttaggtcaagaaagataaccaaatgctttaaattttcctgtagtggtatatgtcccaatgctcaaagttttgaattgctctattaaattaaattactcactagtttcgaaaacattggtttagaaaataactatttctaaataaacatatgtgtttaccagtgagtttaatgccaataaaacagttcctattcagggtgccttatatctggtaagcagaactaccaactgggcagagggccaacccacagtccaaatgggaaatattttttaaagttttgataggacacagtactcagttttaaagatcatactctgattatgattgaccgggtctcctaggttaaacaggtcttcaagaaggtgatcctgcaagaactaatctcagttattatcaagctaatgtgggtagtggacaacaccgtgaaaacaaggggccaattaacttgggaaatgtggggaagagcaacggtgagcggggagggaagtcgctttacaggtgtaagattttcttggagagtagtgtgaccatgaaggacagggaattgccacctggtgaggtctatctctgtctttcccatactacttcctatggatgagtcgtctggactcaaagaagaccttaatccatggaaatggtctctggttttctgaagggttaaatgtagatacagtaagggatttggagaattgaaatcccatgaatagagtcttgagattgcaaaaataacaacaataacagcaaacagtagctaatagttctctgacactatatgctagacaccattgcatgcactctgcctagaaatcacccatttaatcttcactacaatgctatgacacagataatatcattattctaattatacagatggaaaactgaggtacaaagagggtaattaggcaattttcccaagttcactcatttagcaagtggtagagccagaatatgaaccaggaagtcaggctctcgagtctgtgttctccggtacaagcttcacaaaggagggcatttcctaagacatatttgtaccagttgaagctgtgcatatcaagattcattgggctgtaaacagtgataacatgctttttatctgactctgtaaaactataaaaactcatattttctggaaactagtcactttaagtaattcctagttttgcagtttagaggcttcttggatgatccctacagctgtttctggaaggaacctgagggatcatgcaccagacagtggcctaccagggggcattaatcaaatgatcattcataaacactgtgggagcaagttcatttcagagtaatcagaaattatcttttgttcctccatctcttcaaaggaaagccactgggaaacagggcaaccaatcactagaactctctccacttggtttaatgagacagtgaatcgttgaattaagccagtgtccttaagctgcccttagttggttgctccttgattagtcaaagtgtaatttgagtgatacagccatgttggatgttcctgccacatattctgatgagttagcactctgttgctgctgtcacacagcttcttaaaagaagtgtcaggataccctgtggggaaataagcagtgtttcgatggcaaagagactgctcgcgaggggctactcatggatacacatgttgcttaggcgtccagccagccctgcagtgattgatggatgttctgctcccttctggtgtatcttcacttgtgctgggaaagggatgaagggcacctttgaaagaggaggaaccacagtaatcacttcatctctcttctgcttaatgcaaacttactctggaaagataaatgactatccactcctgtaacaactcctcaaaatcattactatatattgctgtgggccagatttgtgcatttctaggattgtcccactgtggcagttatcggctgcagtatgtagcattgattgcatgtttttgttaacttgaaagtatcttagaaggaataagcagtaaattttgaagaggtctcagtgaatctacttgacatggaaatatataattgatgagacattgtaatgggtttaaaatttacagtcataactcaggtatacagaaatgaaacattttatttttctgttactgaacttaggtcaagtccccatttgttcagttggctgaaaacagttacttttgctgtttcaatttaatttagtcacatacagtttattcagtcaaattctacgttctcttcctggtcccttctttgattatccttatagatgatctaagttactgggtggcttataggtcatcctggcatgaggggaggagtgtcctattccttgggtcttctttggtccttgcagacttttgctgagacatagcagttctcttctagcttggggacctcatgtatagcatctggtgtactgggtctgcatgggcctgcctaggcctctggactacatgctcaggctctacacctcatgccctaactctggctctctttcggcaacaggcccactgagcacttccctgtctttcctcaggggatgctcaagaactcatggctactttctgtgcagaaaatagactctgaaactctaggaggcttcttaagctcatctgcctgaaacataccccagcttttgtggtggtccttctgccatgcctgccatgctgctttggtgccatgctgagtgaggggttttcccaagggcttgtagtgttttctggctatgctttgagagcaggttaggcacctacccctgtcagaatgattcaataggctcaatctctcttaccccgttcccctcccaatccctccacatattaaaagctttctatctacctttttgcatttaaaaacctcatgacctcatgtttcatcccttctttaagttttatactataaatgctatgctgaatcatttgagctctggctcattggaacccacaaatcccccttttcacaataataccagaaagcctagcattccaggtttgtctcagctactgactttaaaaaagccagatttgaagatcaaagctgatgaatgacaatgtgattctctgatgtatttaccatctcctctggaaataaggaatgctggtgtttgtttcaatgggtaaggtaggaaacacaaggactcctggggaagaaaatacatctgctaatatttcaaaaacattatcccagctatagcactttctcttttttactacatgtacttaaaaaaagtttagtcccttctccctttttccttgttttttttttttttttttttgataatgacattgaaacttcctcattattgggtaaagttctacgcagcataactcctgcttttccaagtcagattgctgcccacctacagaccatctaaagtaggtgccaactgtgagggaggtgctattatgatcttcatttctcagatgagaaaacttatttggagagattacatccagatgcactcagctcataagtgacaaagttgggattcatggtcaggtctgttgacattatcctgccatttccaatgcaagtctatttcagacttatcatacatgtattaagttaaatccatcctgaatagactacatggagattaagttcctgcaaaatgactttatgtatacacaatttttaaaaactgcatacaagttttaacttggggagaaatcagttctctagttactaataacctcaatttttttttctggatagttttaaatatatgtattttgatttaaatagtgtttaggtacttttttttttttttttttgagatggagtctggctctgtcgcccaggatggagtgcagtggcgtgatctcggctcactgcaagctccgcctcccgggttcacgccattctcctgcctcagcctcccgagtagctgggactacaggcgcccgccaccatgtccggctaatttatttttgtatttttagtagagacgacagggtttcaccgtgttagccaggatggctacgatctcctaacctcgtgatccgcccgcctcggcctcccaaagtgctgggattacaggcgtgagccactgcgcctggccgtatttaggtacttctttagatataagccccatggattggcaatccaaattgagctagtagatcttcaaagaacactggaactacaaataccaactgtggatatttactgtcataaataacacttttgtagagaacactttaatttgcctgatcttatatccattaagagagaaatgagagtaagagagaaagagcgtaagaataaatcattggctggaaaccttaaaaaatttagattacttcttagattaaagttaaatagtaccagataaataaacatgaaaagaaagaagcctatgtggtgatttcactgtttcacatggtagaaacataatcagttgaaagtcactcatgaatttatatcatattcatgaacacaccagaaaaccaaaaagatataaagtccaccattcacttccttaatgataccagatgcatttaaataggaatttcttaaacttttgtactttgacatgctgataagctccagaatgatattatatattagctaaagatgaattatgggttttgggtttccatttccttaaatcaacagcatgttcagttacagcacattgctaagggttaattttcaaaccaatgagtggtgagaagggctagtgaaaataaaaggggaaaaacccaactataactggtaaaactctttctatgtgaataatattttttcttttgcatttgctgtgtcttctggaggaatgacagttgtgtaattcagtctggttggagagacaggcatagggttaataaaggatttgtgtatgggatggtgtactctagcatgaactgccatcctcctccagtggtgtgtctgccacacataagtagcataaataacatctgccaaaacagccctctgaagtattaagcactgacatacccgaatgctttctaggtgttacaggtgtactgttcaagtgctgtttaattgcagtcttaatcaaatatgatagcctgattccaaggtgaatgtcttataccattgatttgtagtaagtcgccacatttctttgaacagtgtgccattttatatgagaattataaaacagcaatgattattttaggatcagagatgttgtgattcatcaggtactgttgatggatgatgcatttgtgcttagtctggccttgcgcagaggctcgagtaatttgttatcctacaagacatgtgctgtttcctcttccatactactccccagtgctactaatattttaaggctaaagaacaacactgtattagatagaactacaggctatatgtaatgttaaatatatgtatttgtatatatgtgtatatcctctgctatacagatcaggtatcatgctaaaaccatataactcttaactgcatttttctggtaattagcaatggattatcttcccaaaaaatatgggttcttcaatcctcctggtcttggggagcacagaatgattcattatctcttctacattagccactttgtttgtggcaggatttgaaataggaatataggttgtataattacttaatgaaattcaaaattaataagatgccattttcagagttttttatgttgttctaatatgttcttcaagttttaaaagccattataaactttataaattcctatatttcctattataataaagtctgtatccttatttctttcaatatttatgcagatacatacataattatagtgccacatttgaaatatcctacttttgtatattacagattgcatgaaatagcccagaatggaggttcagttgatctttaagagaactcaggagaactgaattttgtattagctaaacttatttaatatattaaaatgatatacttatacattttaattttaatcctttacttcattttcttttttaaatagaaattatcttgtctacaatagcaatttctgtattggtgttttctcaggtaatgacattgatccctatttaattactattgcataattaaaaatcagccctttgacatcagtggggatggtagggctacagtgtacaacttattaactttcaaattatccaaaacatttgcttgcattttgttataatttctgtatgataagcatattggagataaagtagaaaataaatattatatattatcatacttttagatgaccaattttagcttcatatattttatcgagtttcagtaacatgagcagtgtattgctttgttcatcatgtgaaaaaattgaaacattacaaataagtttaagatcttcctatgggaaaaaataatttcctctatcagaggaaaaatttattactattatgataataccccttcagacctttttctagtcacttacaggtaaaaattgtagtactggttggtacatagtgtattttattaatgttttactgcgtatattgttgtataaattgctttccgcactcattggcatgccttagaattctttttatttaggcttcatgactaatttgtagtggaacctcaagaagatcacttatgtgcttcactttccacatatgtaaaatgggaataacaacagaatctgcctcatagtactgctgaagggtgacatggggaacacctgtgaggcattcagaacagagcctgtcatacaataaatgccatgtcagtgtttgctcttattctcagtatacagagatctgctttgatcttttcatcttctgcaaaatattccacaaattggcatattgtgttttgtaataatctctattgattattttcaagcaagatttggaattatccgcagtagtttcaaatgtacaaaaaagtaccttattttatttattttttaaataactgatctgatctacgagtctaatctggtaagttttgtcttgagtccagtaatgcagtccaatactccatttaggtaaccctgtccttgcttggtcaatttgttccacttttccaagtttgacctgcttaccctattcctcttcaagagggcatctggttgtttagtttacatgatttagtggtgcagaaggaaagggtaatcagattgatgtatcctctgagtcctccttgatatctgcagagcagctgagctggtctgctctctgtgctgttgacatctgctctttggggcgttagggggtctggtcatttgtcccttgtctgttatgatctacctgcagtggttttctaccttgtccccaggcttcttaattcttcctgtactctcagaacctctgtgttgtcacaaccagacttgggttattttgggtccccagtttccaggccctgaatgccatgggctctgtctcaggaataggtatctgctggcctgctgctgtcatttctactacattgctcctttactgccttaaagagtggtcctggatcaggggttgaaagtggaagtggaaataaaggacgctgatgtgacgtctgtgtttccattcttcttcctaccacttcaccagatgtgaaaaattcatataatctgaatcctctagtttgagttatgataagttaaagcagtttaagaatttaacgaactcccctctccctgattaaatctacttgttagcactgtgttcttactgcaaatcccgttgccttgccagaagataaatattaactttttctttctctttgccttcctgttgtaataattccaaaccacccaaaagaaataggtgagtttgtggagaaggtcagtaaaataatttcaaaagggaaaagaacattcatgcatttaaatattattcccactggttcatttatgctgcaatgaatatctatatatctatgtatgtatctatcattttgtgcacatgttttagtatttttctgagtttcatcctgaaaaaatgtaattgctgtaaggtatgcacattttacatttcactgtataatgacaaatcatgctacaaagtgactagaccaatttatactcttgctatgagtcactgagagaattctttactaacaccagatattttgcgtaacttattctgtttaaattctatcagcaaacctccatagtaggtgtattcccattttgtatatgaagaaactgaggttcggagttaaagcaacttgttcaaggtcacacaaatggtaagtgggtaatttcggaaccttttaaaataaaacatagaagcctactatcttattgttccattctagaaatatgtctgtgtttataatatcgactactttgtattattttaaactttataatattgactactattattttcttcacatcctagttaagaatctaggataaaatggaaaacgatatcacgaaatggaaaaacaatgttattccttagttagcttagtttaaacacctatttaatggtcaaaggcaagtagttgacctcccatctttttgactcacagtcattagttacacaagaaaagcagaacaaaacccagctggatggaggggtggatatgcaagtagctttcacactaggaattgtgaagcctgaggcatagccccaagactcagatcatcgggagtgcactcagtccagagggacaaatgttcagagtctgcatcacctaatattacaagcatctttattgagactgatagaagtgaatttctcaggtcagaaaacagaagagctcttttagctgagttgtgatatttaaaagtctctcattttgaatttcttgcctggccaatcaaactgtcctcccagaacaaattgttggataatgaaatgcatataatgtagcttgagagcgctgtcccatttgcagcactggcttcagcctgaggcacatctctggctgctcctttctatctataagttaaagcaatggcctcagcaagcagtacactctgtacagcagctgcaactcgttatcggctttgtccagaataacaaacagaacaaacacattttgcaagggcttttacccctcttatgtagagaaggaggaattaagcaatcagtgaaatgctgattgatcagttgtgctgactaagagaagtccaaggccacattagtactattaagccctaaaaaacaaagcaaaaagaaaatgttcttagaactttatttaaaccagtatttctgtgatgtgaagtacatttcccccaaagggaaaaatgggaaaatatttgcatttcacttagtacactttactcatccagactgctttgtaatgtaatgatggttaagtatttttacaaagataattcatgttttttggcagattttggttgatcatggagtatcagggttgtgtgaaccaaaggtgtgatgcagagcagctttagtaaaccatcccattcctatgccacccgtttgatttcagtaccaactgctgtggccacatctagaccactctttaccagaaactgtgccaccttcaaaattccagcatccttttcccctcctcccttattttttgatctcatatactcaagtattcttagtgtaacaattctttgagcattctttcttatctagcttaaaatctagggtctaccattataatcattcctttcaagataaccttaacttccacaccccaatttctaactggcctggcaaaactcagacctttggtgcaaaatcctccatctctatgcctgagcccttgtgtttgagaatggctgaagaaaaccatgtgcatggacattctgatgtcactataaattcatggtcacggatctcaaatgggagcccaagactactggctttcctgctgtggttgtctaatgacagcatgatcttactcttcacagatattagtttaaactctccaaccttcaattgaaaagtctacatcttactttattagaaagtagaaacaatcaagggttatgctcccattttcacactaccaagtaaacaaaccttcagtaagagaagatatatttcctatatctcctcctaccctcctgttaaaagggtgcaaacgtcccccctcctaacaaaaaccaatccttcttcatgctctttagatgccgtgttgtctctctttctcaaagtcttcattttttggttatactctttctctcatgcaaatttttctctctttttcaagtagagcaggctcagcagcctacaaacgtgtcttgggcacctttcatcaaaaaataaaaaacataaaaacaacaaacgaaacccttcttggctccacattctcatccagtttctattctttcacttagctgcttttcttctcatgttttgtctattttttaacatcctagtcactctctgatctacttcagtttgacttctacctccatcacttgagtaaattcaatacatggtttcaagtatattctagccctagcctgatccacagggaaggttctggaccacaagcaacatggcagagttgttcactcttgaggtaaaggagtttggcacctcatgcccctataatggattaaagaaacactccttaatcggggttagtccctgggaaaggttttaggtgtgagcaattagcaaccatcacccacagtggctgggagaggggggcactagcccaataaagaggatctaagtagtgcacccaagcaggtctaccacagttagcttcctatgtgggctcacgttgcatgcagtgcatctctatacagcaattaatctatttcataatattaataaaataatttcactttccatgttaaaatccttcaatgacttcctattgcactataaatggcaaatcaatatgttaacatgccctgccaacacctacagggtctggggtctgattgcctttcagatctctcctgataatctcccctgcttggttcaatatccttctgtttcaccaggaagatatcatcaatttccagctcaaagccttcacatatgatgttccttctggctggggtgcttttcctcccacatgacccatttaattaatatgtatcattcacatctcagtttcctcggactgttttaagcatccaatctaaattttgttctccactattattttctagcaaaacagcctactttattcctgcagagtttgtaatcatatattgtaataaaatttgtaattatatattgtgagattgattactaagctgtcttaatatactgaaagctccaattcatttatatttctttagcatctcccatgaggtatcatgaggtttgggaccatgtcatttcatttcaccattgcctaatggggtatctggtatgtaataaaagatactcaacttgttgaatgaataaataaatgcataaatgatgaataaattagatacacaaaattaggacgtcaagaaagaatcacttccccccctcccgcaagttattccttaacaattctcctagggctatcagcactgggacatgagaggtttaatcaaatttgtgttcctttggtgctctcttctgggatcatagggcttgatggatattctctcattaactcgtacacatccctgccatttttgtgacactgatttgcgcagtttttagagaaactgggaaataggaagattaatagacttggctgaggatagaatgaggttatgacagaaccagggatagagtgtgcttctacttattgactagcttagcatgctgcacacttgttagcagttaaagaaaacacattgggaatcagtccatgtcagtaggtacgtaatcctggaaacttccttctgaaatgtattactataaatattctttctctgcacacagctcatttgatgaggtacatctttaggccaagagctcttcttgatgattaatcctactcaattttcttatgagaaaatgatgcacacaaaggttaaataactcagccactgtaatagaatgaattcatgtcaaacctcagctctgaggcttctagttgacctgtacaaacatgtagctgttttccatcttcatttcaagaatgttttatatatttaatattaaaactcctaattctgcttgttgctgagcttaactctatgtaacatttatatatgtaaatattacttgaaatagttttaaagccacaaattattttcaactggatttaattagaattttcctcgtactagtttgagagggtagctattccttgacaatctttttcttcaggctgaaatataaatgcagataaaatttggagcagaattctgccagttaatttaaactggggtatggcattctgaagtataatataataggtatgtaaaaatggttgttatatttagtcttaaagtttaagatatttagggaatgtatttactgaggaaatacgttgactttgagaatttctttatggagttgaagtgcctagtacattttttttttctcctcatactaattctaagtcaggtggtccaacaaggcctctcatcctattggtattacagtatgacctgtctcctgaactttgaagccatttctttccttcagaggagataagaaaatgtgtcttatcttaagtctggaagaaacacggagcccagtatcaagggagtggagtagttcttttcccagacgtagcacagggtttttcaagcctgaagaaaaagattaatctccttaaaacaaggctttgttgacttgggtctggtcatggcaatcctgtttccagccatcctgtgtataagctctaacggtcagaagtttgtttgctttgattttgatgtggctcatcttttcttagctgctcatattcaagatttggaaaagaaggaacggtggtgagctgagcaattaattggattctgataaggagttctggagaaattttattattcctgagttttaaacccgtgtaactttaatataactttggtatgagcctttacattttttctctgtgtttttgtaattatattgtggcattcttattgggtgtggtagtagcaataaattataaatgtatgaatttatacattatggatttataatttcataagtttttgagattttaagacttactattttttacacgatgccttatgtatttatagcatttaatattaatctaaattcattttgagatatattttatcatgcttttatcttttatatgttattagaaagcacttggtattttaaaaatatatattaatgtgagatttcacaatttataccttgtctttgtagtcacatgcgtagaggatatttacaattttactcaagttaatttgctcagtgttgatcatcagaccttttagccagtattggctgggaaaaaaagtgtaattctttttgttctcttgagaattttttggatctaaagtgattcctagggtgtgggtcaacttctatgatatgaaagatgacatggaggttttttattttgtgaagtgcattaataggtgatcacatttcatcctgggagagctgctggagaggaatattgatttagcctgttatggttgagtctttggggtcttgagcttcttagatttttagttctttttgttattctttattgttcaatcttgagagtagaaaatacacatttttgtccacttctaagaataaaactgaaaggcttctcaagagggagcttttgagggacaagtctgtgttccagacttatttttattctcggatctagcaccatgcttggcatgtaaaagggctttaataagtatttatagaaggaattgaagaattaattattacttatggactatgagaggtcatggttgttactctttctaatttgtcgatattaaacagagacagtgaagatactaatttagatcacacaacgtgaatgaagcaaacaaaagcctaaagctttagaaaaatgaatatattatatttttaacttcgcactgtagttaagcagtgtggagctatttaatgatttcaaccaggaagatattaatgtgtgaaataagagtacgtggacagtatattaattgtatgatacaaacaagatatacatacataaagttcattaaaagagtatgatttcatatggctttgaaggattgataggatatagacaaattgataaaattgatctaaccaatatttaactttaggtttcttcatcagataaaatattgcatcattttatgttggctaagtgatttgcagtctatttcaattaattattctttatagtttttctctgtcaatgccatttaataaagagaaaacttcagcagacagaagttatatgatctttggcactattggctgtgtgttaagccacagtaaggttcagttacgtattttattgttttataatcacacatttctcctttgattcatttcttatctacaccccttctttcacatcctaaatattttctttggataaatgtgtagggcaagatgaagaaaagaagagaaaaaagtagtcagagcttgggagtactgaaacgctttggactccagccagctgccatcactgaggtggtgaaagaacaccgtagtataactggatggccctggtccctgccaggagtcaggatggactttcagtgttgaagagccatcttggcctgttactagcgctgccccacaccattgtgtttgcctaagagctgagccaaagaatttacatatgtatgagccaaggtctgaaaatagaagttaaaaaaatggtgctaaattgacatatttgctattttatttttttggtcagttaatatgataaacttttatttaaatgtaaacattattttaaaaagcactttgttttaaataactgattttcattgaaattaattctggcctctaagcagagttagctacaaagacaatttgtaaaaatgcagaaaattcagagtttaacttggagttgtttaaagtttattttcatatttgagtctgatatttcagttcactgtaatatttcaatttatttaaaatattatcaagacaaatattgggttaccttcacaatatttttttcatttttcttaccccatatattaaaaatgaacaaaaatgaaagaattatatagtctagtggatggcaattctcttggtacagtactcacaggatgtcagaagtgctttgatttgcatgcaaatagaaactgcattcctaaaagacccttaattgaagatattaataattttcattaggttttaagtcttttaaccttatcatatggatagaaaagtaaaagatgtgtttaataaaatgtcttttacttatttttatttgtcatttatttaaaggtttattagtgaatctgtttacctggaaaatgtgcaattctatttgcaaatttggagcactacatatatttaagagaatccttagtttctgttgggagtggcaatattttataactgggccttcatattcctatgttacagccctggtccctgaaagtcctacagctatctttgtttcaagtgtgtatgtgttataataagataagtgttaattagttaatcaagtactaattaacctttttaatttatagaaaaacagacatttatggacaagtaaatttttggggtcaaagtctttaataatttgaagaatgcagttatttttagcacaaatattctaatgtgaaaagaatttctttttctgagttatatatttttatgccattcagagtcactaatatagtactaataatactttttctattgtgtacctttgtttctctcatttgtcttacattttatgtctaatcatcatttcacaaaatttctatcattactgcttgacctcgacttctaacatggcaattaatttttatacacaaatttttgaaatcttgacagagtttttaacttcctcataccgagttctttgcttttttagtttacaagatgttcaagaatgctcttttgaaataatcaattacctaatgcaagataaattagcaacaacattacatatttttcttactatcaactgagaatgatcttgataggggcaagtataggttaaaaataaatgacatcaaaaaacaataccagaataaaacatttaattcttcaacactcaaaggcatgtcaggtattgaaatccaagtaggcacttttgactaattgttagtagtttgtagaattcaaggattagggttggcttccttttgtctttctttctcttcttcctccccttcttcatctccttcttgttcttcttttttttcccctctccagatcactaatcttctccaacaaatttttagcctatataaaataaaaaaaggtactcctgccctatgactcaacttacaaatctacaaacctggaggaagaaatagctctgtgatccattcctggggaattgcaataaagttttagggaagatggaacttaatgtttgtgaaagcacgggtcctatttccgatttccaggagggtggaatgtatcttcctgaatcacattccgctgaaaataggaggccatggaagaaatcaggttcagtataacaaattttctacaaaagggggtggagtaggaatgtgcgtaggtgacctgttctctacgtcattccagtgtaaactactgccccttacacttcacgaagtcggtaacttcaagacatgttgcaccacatgcttctctgtgatcctcaaatatgtttaatttaaagagggtccagtagtgtcctggcacatgatctggattgccatagataaccatctacctcacagctagggttgctctttagaatcttgcaaaatcatttgtttactcttgacaaaagttaagaaaacaagcccatcagagttgtttgttctgtcagcatgttagaagatggttttgttgcaatgataatcgttgtgcaaagaagactgatgatgatttttttttacattttcttaacagtatttgctatttagaatgaatgttgtctaattatttagccattttattttgtaaaatttatgttgtaggcatatttagaccaagttataagaaaatgcttcagccaaaattaagtgttgagtttgatttgtgtaattgttagtttctttactagttgttccatcatttacacaattatttctatttgaaatgcagtaattgttcagaacttatatttctatactgatgtctactaacagctttagatcaaatattaaataactcaagaataatgagatgatcttggcttacttagatatttggtttttatatctatagaacaaaggaattagaaaataattttgaagatttcatccagctatgtaaaactatctagggaatacatttactaggttttcaattttctacaaaacatctttcagcagaaagcaatcctgtttcctgatatacaatgtctgatacatagaaactactcagtacataattcctgaattgattattcttttggaaatcctagatttgatttctgaacaatcataaacatttaatggcatgaaattacccagattccatggttctggaatacataacttcaagcaataagatgcaagatagaaacatataagacattctttgctattttaggtaagtccagctgaatcagttaatcagctagaaacgtggctcacagatgaattagttttattattaggtggattactgaaaaattaatagctttatttccgtattaccttatcatttatttaatataaaacataataaaccagagaagttgtggttactttcttctgtctcattgttcagtttttactgaagttatgttttactgattttcacgaaatgcaaatatttctgagcatcagaaatccagcttttgctacctcccactcatgtattcttcccatcaaattgaatcttaaccaggtcactctttcctgttcattccatgctgttgcccctgttttctccagatataattgacatgctccaagaggatgaacattgcctaagacttgatttctggtcttggctttgcaacttactagctgtgtgaccttgaacaagctacttaattctctgagactcatcattattgtttataaaatagggatagcattagcttatttcaagaattgtttttaaaattagcaaggaaggcataccaatgcctagctcaggggatcaacaagtggcaagtacctcaactttcaggcaagatcatacttatcatcagtggagccaatagaacagatttatttaaataccctattttcacttactggcataacagcaagtggtgtacatatttatatatctctctatatagatgcagataatatactaatatattgtggttatatcttccaatgttttagtttctattgaggggtctttcttatttattacacaagaataataattattatttttttactttcaggaagattgaaagactttgcttaggactcctatgtgacatgattttaaatttaatagttagctcatggtcaaactccatttttagaattttaatttattcaatatttagctttttatgtgaacattgagtttcttttcttaaattccactctaagttctgctttctatattgggatttttaaattacagcttaacatgattaactttgggcctcttgctatgttttataattgctatatatgctttttggctcatttccatataaatcaatcctctacaacttttatttatttacagcttgtttttctttctctttttggactaacttacacgtgacctccctttgggtgcactttgtgtttggctatgtcttcaattttccaaagtcactgaattctgaatcaactttctaaggcatttcccactgttcttctcatttcacaaatacacaagaaacttcgtgaattcactggataatccactctgtccttttacattggcaataactcatttatatacattctttagcaaatgtgtatgcacataacattggcctagaatatatactccatgctgttgaattaacatctaacatgtctacttggtctgggagtagtgtcttttttaagcagaaattagcatgacaagatttactgtttataaatacatgctccttgtactgactaacttgttctccttaaggtgtttgcaaatggggtcttatgaatgatagctttttttttgttattctagaataaatcacatgtgccctgagctttaatatgtgaaaccaattttacaaggtctcttttccagcttcatttttcaccttcttttgtatcactccaaactttatgttatcaaatgttagattgataagcatattcatcataatttgatcctcactttctattcctcaaaatgccaattggatcttaatgaataggttttacttgattggatttccaaggatatctggttagtttgaaccctcatcatctaacaacatgatatctgtctgtcattttcaatccttgacatattgggaaggttttcaaacaactttaagtcttcttcctggccaaactttgaggaatcctcctaccagcttgtcctagtttctgtgataggagaaaatgtgtgccttttacatgggtacaatccacaccactttccctcagagatgccttcttcatccatatctttaattgtgaccgtgttccttgttatgatactaaggctaataaaaatcatagaactgaacccaattacttctaccttttatattctattttcacacatttctggtcaaacacaaaacagtagaactttcttcagggagttattgcacctccttttactctgaatttgtttgctctccagtcataccttactccttgctttaatgtatctcttcaaaaatagactttatagaattattgattgccaggttttttttttcatgactcctaagcatccttatttcctctcatgcttaactgatgtaattttatttgttcctgcttaaataatcatcactgatcaggcaggaattaagcacacagcaatccattcattcagtcatttttccagaagcatctcttgcatgcttgctatgttagagactttttgatagatgcaccaacttcttagagttgtttctgattcattacttaggaacatttcaagagggcagttggaagtctctgtaccttcaaaggaattactaacacccttattttctcttcattccaaaacctaagacctttattctctaagacatcctgttctcattttttttttcaatctgtagcaggtcttcccttgcttatgtcagtggactgtttaaatgaagagtggactgtttgagaagtggactgtttaaatcagtatagacacaggctgtcagtgtttctttatgtttcctttaaagacattttcgtaatgattaatataaatgagttaatggaaacaaaaatgtaaacagtagttgataaaagaatagtatcaattaaaaacatactgtgaagtattcaacttcaccagtgatttaaaatagaaatgaaagcaaaataatattttctacagcggagcaaataaaatgaaagataatacataatgttggtgaggacatttttaaagggacacccatatattgcactggtatgtaggtgagtacactctctttggagagaaatttgtaaatagtaatcaaatatggcaatattgacatgcattgtagcagcaatgaaaatggaatattttgtaatcatttaaagtaatgttttaaaagaactttgtaataacatcaaaatacatttaacataatattgcctccaaaaagcattatgcaagtcaatggcaattttcaaaactatgttctgagcattgacataaatgctagaagataatactttagtgttaacagagattatgtttgtgtggtgggttattatctattattctgtatttccacatttctttaaatatcaaatgaaagtgaatacaacctagtacttgacattttaacattttcaataccagatatgtcaataaggaattcataaaataaagtgccctgagggatttcacaggctaaatgcttctattttttaaaatgtattaatagaaaagaagactaaatctaaaaaaaaaaattcattttatcagagagtgactcataagtttagaaaacctttgatgacctggctcacaaagaatgtacttccaagtacacagggtccccagcctgatgtgtgtgcctgcattcatgcctgtcactctgctcagctgcgtgcagacagcttatatgaaggaggactgtgtacatgtggtcagagaagaaaaaaatgcttattttttaaaatgttttgaaaaataatctgtcctaaaagtgtaacatttccactaaattttttcatgtctgactttaacattccctaccaaccaactcttatagcctcaactcctttgatctatcctaatgtaaactccctcactaatgtgtaatatatttttttccagtttggttatagatttcagtctagcctgaacactcaagtatgaaactagccactattttatttattggctgttccaacctccattgtggaattataattgatggattttccaagtctctaattcagaatatttaatcaaattttccaaaatttctgccttctcctccttcattctgatgactaaagacatggaccataaaatatatatacatatatacatacatatgtatatgtatgtatatacacatatatatatgtatgtatatatacatacatatatatatgtatatatacacacacatatacatatgtatgtatatatacacacacacatatatatatgtatgtatatatatacacacacatatatatatgtatgtatatatatacacacacatatatatatgtatgtatatatatacacacacacaccgtagtttgcaagtctgcatctgggaccctttactgataaaaatgaaagcccattaaaactctcatgcccacatttctctctagactttagagtaggagaattctatcctagaattgttgattgttgacatttctatggaaaaacatgtttaattcatcatgctttgtagtcaactgctataaatggtgatgaagtcttttccttggtcaagctctggactcctcagtacttccactgtcatatttgattaaaacataagtgatgaagggaggaaatatattatagtattcattgcatgggtaccttagggtaatgggactatgactgatttaaatttattttgcatcctaaaaagtttccattagtgggtgcagcacaccagcatggcacatgtatacatatgtaactaacctgcacaatgtgcacatgtaccctaaaacttaaagtataataataaaagaaaaaaaaacttaaaaagaaaagtttccataatgaggattgagtttatatcgttttcttaattaaggaaagacaaccctcactacacacacacacacacacacacacacacacataaaaagacaagaggtgagatcaaggcgtaaactagtattggactaagccagtaagtactgcttctcagtcctcagttctctaggttgggagttttccttttgctattttcattctcctccaattcatttttcaatgatcttcaacacaaatttcgcctttatttcttgttcaaaatacttccatgactattatgaatactatttatggatgaaggctgaacattttaaggcatactaagtctcccatgatatggtaccttttcattttcccattctataccctgcatctaggcttttaaaaaatataccacatgacttcatgcctctaggctattgctcatgccacggcatcccttctgggttttttcccctctttatctacttggtgaatttgcatccttcagtataacacagctcaacataattctatgcttaaactttactgaaaatgcacaaggaacttgatctttctttcttattttccccattttatttattttcccattgcatttgggcaactttcatggcaccagttattttattaattatttgtataaactagtatgagcctattttgtttagctttctatcaccaggagccatgaagcactttgaaatcaaatactgtttgtacttgaatatattaagtaagcgtgaggacttaaattaaactttgttcctctttaaaaaaatccttaccccaactctagcactgattctatgttattgaagcttacaatctttatgtcattttctgtcatcttttctgttatgagaagacctaggtatgagtctattgcctttattccttggccttctttgcaagggtatcaaagaacactgctgcagtacttcctgttctacatagtcatgtgacttaagcaagagcatctgccagccagtgaggccccttgagagcctggttaaacatgggactgaagggttaagtgaatcactttttattcatgttgaaatatgaatgctgaagtttggaaaattttatatataacattttaataactaaaaaaacttgacttaggaatagtgcttatattaaaatcagtgtttgtcattgtttcatgaagtttttacaaatctaagaggcttaagagggatataatagtccactttgctttagttgtgttttacttgatattactgattgctttaactttgaaacacagaacaatgctatagtaagaatgtagtatactactctattaacccaaaacataatatagataggtttattgtatatttgtggagaaaagtttattctaacgttctttttacaaatagtaaaaatgctatttgtaggatgctctgatttttactttttgtaaaaagaacattgtctttttaccccaacagaaaatggcaagcgttcagctttctttgggaatccaaaatctcttatgaggcatattaggtatcacatgtgacataagcaaaagcctgtgatccttagcatgttggaaagttgctactctttaggataaggttgtccatgatgtctaggtcattccattcagctgcataaacaattcctttgatggatggctggttttctacaaccccagcattattttagcaggagaaggtagtatttgatgtgttgcaatttgtgttacatgcccatggaacatctctggacattacctcaggaggaggggttaagagaaggaggagctgtggctgaagacatttaatggcagaatgaatggaaattcaaagatcgctgtgcagtcagccttaaacactgactgcacccctcccagatttcttttacattaactaaaaagtcttatcacacaatctcataaaatttatgtaatttcatttaattttagccacaaatcatcaaaatgacgaggattttgacagctttcaaagtggtgaggacactgaagactggttttggctttaccaatgtgactgcacaccaaaaatggaaattttcaagacctggcatcaggctcctttctgtcaaggtaatacccatattgattgtttctgataaaatactatggggtatagtttagcagtgaagcaaaggtgtcccttacaaggcaaatacagttttgaatgtagctctgaagtactaatgtattaatgtttcctttactgtggaacctactgacttagcaaatgctaatttttatcttatctgagtaacatgacagtaatttttacccaacataaagaatgatgacaattcttgtgaacatgtaaaatgtaagtacactgcttgaaaaagaaacatcttttctttcatagatagctttctgtgactagatactattgcttacagtttggatttaaaaaatggagctgcttatatgtgtgtgagccacattatggtacacagtgtgttaaggtctgttctataaatagggcttactgaaaagttctcttttgaaatatcatttaaacattttaaaaacataattagaaaatatgtgtttttgagatttgcaggtcatcatgtagacactgctttagctttttccttttccttctggctgtttttttgggcaggctaaacttattattttcattttgtagagtaatacatagaggcagatagcagctgataattctgtccctccacaggtatctataattgagagggcaagcccaggaaagaaacattaattgcccttcttcctgccccccagcattgaattatgaaattcctgtaggaacctctgctccttcctgcaactttatgaagacgttcattatcagagaagcctgaagttactccataggaactttgccaatgaaaataatctttagtgactataagtttaagtaattatattagctttagatatattgcttctttagcagcaaaagctgtaaaatttgaaatagaaaaaacaaaagaaaacctctgtctgttgatgtgaaaatgggaactcacagtttggagtgttctgcttatactttgcatgctcattgagttgactaagcttctattgtttcagttgctcaagtcaggattcagtggggttttggtcctgacacctgcaaggccaaggaatattcatagattcctgtggctgccagggatagggatgggaaaggaatgggagtaaaagaaaaggaagagagatggagacagggggaggggaaggggagaagtgtgagggatgggagggagagagagagagaaagagagagaaactagctcaagatcccaggagaaaagaggaaatacatatagtagccttagtggtgtgttaacaacttcagcctttaacattgagaagattctaacaagagtataggaaattaccattttaaattaagaaaaccagaaaggaaaatgtcttttatgttgttacatattccaatgtatccaattttactctttttaaatggacatcatgttttaaagatagttaaaatcattaggatgtagttacataatggccataaagggcactgggagcagtcactaaaggttagtggcattatgtctagttatatatattttcttgaatttagcttaattatagcaaaagaatgggaaaggagaatattctaaactaacatcaaagacattgtaactagatgtaaactatgagaatttattgttagtaatacctcaaggtactcatgtatcagttcagagaaaatcaatagtaatgaaagttatcccctatgattatatgtgccatctaatacttcaaagttgggtgacttggaatatcttcttctcactctgtgagaaggtaggtatgtaggtaaggataggtgcatcttcatcagaccccagaaaccgcgaaattgagtacttacttaaaatggcacagatatgattgaaattagaatccaattctccaagatcacaataagtgctccatacaaccaccaccacaatcacaaccacgacaaaatggtctaattatgtggatggattactgtgaaagcagttctagctcatggtgacagatctgtttcaagggtctgtcacagtgcacagctaagaatgacaaatttgtaggagcactaagccatcatttcatggtgtaaaagccattactcacactcaatcattactggccagagttttggaggaatgccaagcacaaaaaatagaagttcttgaacttcacaatagtgaattaaaattccatagaacagcccaaggggacttgtgttattattcagttattgtgaaatagtcctctatctacttttcttcctgccttcactttaaaaactcaactgtcttagaaaaatatatccaaatttactatttttagatggacatcatattttaaagatagttaaaatcattaggatgtagttacataatggtcagtgaagggcactgagaacagtcactttaaaggttagtagcattatgtccagttatagatggtaaatggattgggaaagacaccctgtagtcacatctataatcattgccctgtaaattgggttgctttttcgacatatttagaggtttgcttttcctctctctttgatgacagagacggtgggtttgacgacagcaatgacgcacttataattttatgtggcccttccctgggtatttgtcagcggctaatatttatagagtgctttgccaatcggcacagttgtattttacttacaggaaagaggaaagaatttcaaggtgctctatattttaaagaaagttgatatcaagggtataaatgatcaacaaccataaaatactaaatactaaaaagttttagataccataatctttttccattagtactgaaaatgttcagcactcattattacattcagcaggctgtaacagtgtaatagtgggatatactctggattgggcacaaaaagatctggaatctaacccctgttatgcatttcctaatgccctgttcttggacaagtcacatattctctgaacctaagttttgtcatctgtatagtgcaaatgatgactgatttacttgacaaattatgtgattgtcacacatgaacaattctcaaaaatctttaaagttttaaatttaaaccattaaactgaacattttaaagcaaaaactggatatttaaaaaaaaattccattctatacattttagtagaaggacttagtagagggttagatcaaagagtccttatgttttttatggactacaagttgttgcaatgacaaggtatttgataagaattctcaaatatttataataatgatttgttcacctttgccttaatattaaacatctctaagaagatatttcttataataaatcagactcaaggaaaatgaagcaaataatctttttttttcagtatggcaaatttaattccaaaaggcagaatagacaccataataacctatttcattcattcattcatttattctttaataaacacggaacctctaccatgggagtatacaggaagaatgataaatagaaataagtggatcataagagtatagtctctgatttcaagaaacttacagacttcagaattctgagttcacaagtctgggaaagtcatcaaagctaaatagttttatttttacttgcaaatgaatttggaaatcaaaagtattaaattgtaaagcttaagttccctatgaatagaaaagtgttcaataagtactccttctaacattaatccactcattttttaacaatggtgacctgtgttataattaagctaggaacctaacaatccaagtgtcctctctgatacttcagctacgaatgagcactggtagtcattatttcttttgaaaggcattcatttttaagattttatattctgattttcacatagaagtatctatttagttccgtcttgaggagctattgtcatttgattagaaattggcaactataaaaactcctacaattagaataatttacttacattgtagtagctttaaagatagtcacaggaaatataactcattatcatattggagcctctgtacacgttagatgtaagagtggggatggggttatcacacacttttaagaataactattttattggacttttactacatatagacacattttaggacggatttcatctatggcaaactacatttttgaaatattaattgtgttcagtcccaaatgagctgttgcagaattagtttgcctgatggacaactttacatacttttggcatgcaatacttctctaattgggagatggcctttcttttgaacattttaattttttccattttttatatccccaattttctaaaatatagattcatttattagtcaccaacaacgccttgacattatgagcttcttgacataaaactcttgaaaaaactatagtttaaatgtcctagactaggttaagtgagtgaggtacctgagatgcaaaatttaaggaggctgtcactgttagtgtcatggtgtatctctttgagagttaggccctaagcacatcactcagtaccctagtcccagctttgggtcagaagctaagcattctggctgtagaactgcccaagggactagtactaatcttgacctgtgctttcctctccctcattccaatttgctcatgtctagccagactttctgacgatctagaggtgacattaggtcttattgctatggaaatggagactattcctctgcctttacatctgtattagactttcttcatatttccaacctgttccaaaaattgaggggtgctgtagaaagttttcagtatctcttaggcaatgggcatgctagaattcacttcaagccttcaggaggagtttggtatgctacgctgactgcccttgatgggatttgtatttcctggggcatttgcaatgacggaggcccgaaaaaagctgcgcgggccaaggtcaaagtttgtgttaggctccttagccctagggatctttagcttccatttgattttcttcatgtgatctaaatgagttgaacttataaaaatattttcaaggctactctgtttgctttttatttttttcaacttgttaaatgctatacattgatcttttaaatttcatagggaggtaactgactaatttgaagttctcataaatgaatcaatagggttgctacattatgaaagaattttactaagtttcttctataatgcagactgaaatataagaccattttaatttatcaccaccatacagtaaaaattagcttatgatatgtaggttcctccaggattctgaacaacttgccacatagcagatgctcagtaaggcatattaataaacctacactttatgaacatactttgtaatgaaatttttataaatgctgtattttatttacaatgagaaaccttattagaataaaaatgattcataaatcttaatcttttgtttataaatgttcaaacataaaagtacttaagtaaattaaccttttgattttgtccccttaacattggcttatgtttaaccaaagaccgatgacttaatattaacttggaatgttgtaagattattaactgagaatgtggtaaggcctaattgattactgctgttacagtgcttcagaattttgaagtgttaggccttgtaactgcagagaagtctcatgaaatatttcaaagacaaattgtgctgaaattctaaatttcaaaaatccatatcttaatagtgtaattccaagaataaaagaataagatttcatttacttgattttaactttttaccatattatctacacaataattacctgaaataaattctggctttaggctttctacttttcagtgcttagttcagatttattttttaagaggatgagtactgaggcgaactaatagcttagaaacatcaggtaagccagaaagcacgtatgttatatagccttaggccttggtgaaaatggaaaaaaaacatgtggggcctctactttttctgaagtgcaaatagtttacgtagataaatgattcaacagcaataccataatcccagagtaaattattttcatttttactactagctcaagggaattactgacttttaaatggtgtttttttttttttttcaaaccttttatggaatctattgctgaattagcttaaggctttacaggcagaacattttagtggtggagtctcatatctaggagaagaaacatttctgttcctcccatttcacagatatgtaagtgctgaagttaaaacaaggacacatggatgcctgtttttgtacgtaaaacaaaatatacattagcaaatttggttagaattttaattaggcttcaaacaacagatggatctttttaatttgaagttttgttattgtacttatatacccgatgccatagttgtgtttaacctggcttcagaatgttctaagtcatttcttctgctgttattttattgcttactcaagggctcatttacatactgaatgttatggcaatacgacacaaatttgatttttccttttctttttttgagaataggttgtttaaatcaaagcataaggaaggattcttgctttatatggctgtcaacaattatataaataggacattttagggcaatgctgtttacagttgacgtatttcttccatttcaacctaaatattgtcatgtgtttgtaacaaaacatgctgtttttcagtttcaatgtgtttcttcctcttatagtcctgtaagctccacatatacaaaagcctaatgcaattttaggctgcaagaaaagtctcattttgacttgttttccatcttgatataaaagacccgaagaaaactggttcgaagtaaaggatcgatgtccttagaattagttcagaatgctgatgggttgtgaaacaatacatgagcaatgagtagatgatttttaataacataatactgaatgcaaaggagaacctaacaataatgataaacactaggctgcttcaaaaacttttatagattaaattacaaattatgtttgaattttgactgttacttcctaagactaagccctctcaatcagtttagcatagcaccagggacagatgctcaaacctttttcaaggggaatgtagctgtgtgactctcattaatagctgttgcattattctgattctggaaaacactttgaaacatctacccttttaaactgaatctcagactgagtattaaagggtaaaattgcagtcacttatttgtggtcccataaagtttatgaatcatcttactaagaaatgaaaatatatccataaatgtaggcttacaatgaattttaattgtgaggaaaatttaaaacccctaaaagagatgagatttttagagaaatttcagagcttgcagtattctatcttgtaacatcattagaacattgaaatattgtttgacaatggtgaaacaataatatcaacatccacggcagacaaaccaaaacaattgagagtttattggaatttctacttatatgtaaccccccctcacaaaaatgtattttcattaaaaattacttataacctgtgaaagaaatctcagactttacaaatattaagaattgcaacattaaatttagttaacaatgatttttttttttttgagatggagtctcgctctgtcgcccaggctggagtgcagtgctgcgatctcggctcactgcaaggtccgcctccggggttcacgccattctcctgcctcagcctcccgagtagctgggactacaggtgcctgccaccacgcctggctaatttttttgtatttttagtagagacggggtttcaccgtgttagccaggatggtctcgatctcctgaccttgtgatccgcccgcctcggcctcccaaagtgctgggattacaggcgtgagccaccgcgcccggcctagaatgctcattttaaaagtaatataggaatgggggccggacttggtggctcacacctgtaattccagcactttggaaagccaaagcaggcagatctcttgaggtcaggagtttgagaccagcatggccaacatggtgaaaccccatctctactaaaaatacaaaattagctgggtgtggtggcgcaaagtgcctgtaatctcagctactcgggaggctgaaacaggagaattgcttgaacctaggaggcagaggttgcagtgagccaagatcatgccactgcactccagcttggtcgacagagagatttcatctcaaaaaataaataaataaaaataaaaataaataaataaataaaaaataaaagtaatatgagaatggagatcatatagctatttttgtaattcagtttaatttagaaataggagtactaaataaaattataaagtaagattaaacatggagcaattacatatacataggaaaattccgttttagtccttctaaatattgtgtgtgaaaaaatctgcagtcttatgaatcttcctccaataaattttctaacaaaggaaacatttagtattactaggccgtagagactagtaatttaatctttaatttttaaatttatatgaagtaacaagagaacacaatttttcaccgcttattttataacctgattggctcccagattcacaatacgtgtaggctccagactaaaaaatgccaaactgttagtggaaagtaaccttaaggcatttttcttgatatccatattagctacaatccttggcctatttctttggagtatgtttacatgttttatgaatataattacataggtgggagaagaaaaacatacaaacataatttcaaaaagatggaaataatgttaataattgcagccacaatttaaacatattggttcaaaagtttaaacgtatttctttgttttatgagattcaaacaaaatctcataaaaacatgagatttttagaaagtacagaaaaatctctctctctgtatgaattttattttaggcagttgcatgctaaacttgtgcttggttgttcaaataaagtgaatgttcacatgtggactccactcttgaacatcaggcaacttggaagtaacattaactttggcataaggactttgactgatcatttggtttaagtgcctagcatgacttaggttctctgtaaacaaatgctgagatgatgtttggggagcatgctctctattagggatcagcatctgtgaagcttcaggaagtagaactggacagagaactaaactgtaatgcagttttgataaagccttggccaacgggataggaagctgctgcccaccagactttcctggatgtggcctgaacctttctatccaggcctaacttagacactggtcatggggtattccaagaaagtcatggggcaatgcagccctctacagctgagatagaccctgaaaaatttgacagcaggagatggtttgctgacctcactcctcacagcagggcagcaagtttttccattattaatatgaataattatctatgttatctagaaattgaatcctccatcactggggaaaagggaggggggactgagaggtggatctccttattcatcacagcatctagggttccaacaatcttcagtgcttgagaactcaagggcctaggatcagtgcaaattgttctcgaaacctgctgattctcctcagattataatgactcaggtaattcatgacttgacatttcactttgacaatttacagatttatagataggtagttcttggttgacctgggcctgttgtggcttatccatggcaattttgaattaaggctcttataaataaatttaaatagagttcatgcttaaatttcttttaatcctcacttacgaaattggaaagcagaaataaaagtaagcttagaaaaagaaaaagaggttataagtcaaacagactgggttcagaaaccgctgctcttccagttgctaatagaatgatctttacttctctgaggctcagttagttcaagtgtaaaatggagatttcaatattacctacatcattattttttgtgaagattagatgagaaaacccactaatggctttaaagatagtattcagtacgttcatgttaactgttattaaggatgtcatagggaattgatcagaatggagttctcggtgacacaacatgctcccaaaccttacttttccaacatagcttcataattctgtttgaagtaagatacctttcccagaacagtataaatttattattcaaatccaaattctcaacttatttgtacaactgcatatagactttaataaacatagataattatatatgcaacccagtttatgttttaataggttatcagtaaagtaatggcagaaggtagaaataggatagtgacaggtcaatctacgtctaccagacatgcttaagaagtgttaacgctttactttatccaaatatcagtattacagcttttttaagggaggtattttaacatttgaactcacactagtgtaagtttaaagtatacgttatctttaattactatttccaaaattaattataccaacatttactgaatgccaaagatgtaccaggattatacatagatctcaacaacaaaaaacagtaaaaatataatagcctcagtatttttaatagagggagaattattattagttataacatagttggggacttggtatagaaatgtaatattgtaagcatgagaccacatcagtgaattaaaacaaacaaattttttgctgacatacagtaaaatttggcaagcattttagatgaaaagtaaaggaagaaaaagagaatgtttgggttatatatactgaatgcagctttattcttttccctagtgatggaggattagatttctacataacataggtaattattaatattaatgatagaaacaattcatgaggaaacctaaagaatgacatttagaaatcacctttttgggtcttcttctgaaggcattacttatatgacacctgaatggtagaagaaagcctaagggtactttttgggcagcaattgccacccagccttaactcattccttactttcatcttctatcttttagcatgaactatacctatgtgaaatatttgtctttgctttcaagaggagaagatgaaaattagtaaaatgaccagaagtcagtgagcatcaaataactattttgaaaacaccatagtgtcagcattgtaacatgctaatatcacataatgaagtacatttctatgcattcaccaactgtgtagtgagaacattactgtgtggacaacagtgggctatttcagtggggatacagcatggaattaggcattgtgttttccagatgtaacattgagaagttaaaatctagtacggtagataaatacctttagcaattaaaaggtaacacacaacagtatacaccaaatgcagtcagtggaagcacaagaaaatcagtgattaattctgatttagtacacaccatgggtactaggaagcagtaccaggatgtaaaaggcaacgaggaagacatttatgcacaaaggactgacagagaggtggggaatctaaggtattccatatagagagcgagccagatgagaggactttgaatgtgaattgaggaatttggggaatggtgtcacccaattaatgtttaagaaagccttaactatatttcataggacaggtagaagtaaggagagactggaggcaggcagaacaagtaggaggcaatagcaggtgatgatgggatttttgtcttgggtggccatgcaatttcatatagtgtgaagttaattctaaaaaccaataggtaactatttattagttagagccattattattattagatactatgtgatgaggtagaactatttttaattggagtattatttaaataactagcctgtaggaccagatgtgacttgacagttgtgactccaagatacactaggaaaatatgacaaagggagagaggttgagactccaagaaacttaatatttaaggttttaaaatattcgtaagactaaccactgctagaaaaaacgttgcattagatatctacattttagataagttccaccaataataaaacaagtgaattaagaatttgaaacatggttaaaataaaaaattatatgcagtgtaagatgaaaaaattactgtttaatattttcagaattaaaagaaataatcaggaggatgggtgtggggtaggagagcatatgctttttttttctactataacttttcctctcttatcaaattcactatttaatcatttagaaacattctgctaaatactcagttgattatctgactaaagtaatttcactaaagtgtgaacaaagcttagtgacttgtctactctgtgctagccactggtataggctggaggtgcactagtgcaagaagcagacccaatactctgcctgcatgaagttcactttctaatgtgatgaaatagataataaaaaaatcactagatggtatgttaaaaggtaatgagtattatgaagaaagagcagaccaaggagaaagagggctggggaacatactgtaattttaaatgaggccatcaaggcagacctctccgagaaaatgacatctaagccaagaggaaggaatctttaaattttggatttttaatacaaaatttggcaagtttttttattgaaattttaatttttattgcttaaaacatcagtggaaaagaaagggcaaattctttggttaaagcttaatctctcaagggaaaaatatttatctttgtatttccacgtatttcagtgacgcctcagtgatatccttattgaagttttctctgttttgtaatccattcccttatctagccttttactaaacgagaagactggagacattcatccatttatctacagagcctagcaaggtgcttgacacctggtaggagttcagtgtctgagacttgaatgtctaaatggtcttattggcatatacatttttattaaacacatagggatcatgtcatgataaggtcctttattttatagaactcacatttatataatcctttggttacttttcctgacattctacaagaatacactcttcttttcattaagatttcctttgtacttccccttttcaaagtaagacgtgctctggcagtaggcacttaaattatacttaaatgttataatctaattcctagcctgtggacctctgtcaacgaggactgaggatactaaaatatcttatgatagtaacaaggtgatttcttttatactccttggaatgaaatagcatttggggaactgttagttagaagaaaggattccaaataatagctctttgttcagtgtttgtccatcaattcatagataagtcaattggcactcatcattttaaatgcatcaggggccagtgtagttaggagatatatagagagtactttaggcagtaaacagaggctttgtaacaatataatgtgtagtgggaaagaggattggaagatctataaaaactgccaaaagaaccaaaaatataattaaagcagcaaaaagacatattgaacacaatctcagggactatttcacgcaatagcaaatgtctcttcaactacagagatggaaagcaaaatagaaaactagtttcatgaagggagtgagaaaaataccaaacagaattgtaggaataggctcacaagtgttgattttcttatgctaatttttacccttctttaaaatgatcagaaagtgtctaacccagatatgggataatttgaaattctcagatgagaaaagagaaaagcaaaataaaaatataaacaaaggtaatattttaagcaagcatgtctcagagtagcacagataaactgatatgtagaaaactattgaaatttacagtctacactcaaattttgccaactaaatacagttggtttaggttctatcaaagttacatattatctaaatttttttctttttcttttcattttgtaaaagcatggaggtttacacacgatttcctcaagaacaaaaaaaacaatatttccagtagaaaatatttttcgatggcaaattttcattacttagacgagaggtttcacctaataaaacacatcagagttacctggggagttttcctaataaacacacttctattcagacccattagcagagatatttgcatagcttataataatctttagaaatacactgaatactatcactcttactttctaaaatcttcaacttctgtcttgaattgtaattagacaaaaactagcaaattaaaacaaaatttagaatcagaatagcacattatcagaagaaacatgcgaagctgatttcctggatacagaagcagaattcagacttctgtattaagatcatttcttccatagaagtctggtttcactcataataaataataaataaataaattattgtggtttcctttgtgctgagtaactctaaagtatttttaaatttagtgaagacaaactccaactatttaaagtgtcaagcttgagatttcaaacactgggtcgaaggaaatagataaatctttaactcaaagataatttgataagcctagtaaaggacaaaatatttttggctaatcttgcccaggaacacacgcatatgctcactcacacacatacaaacacacataaaatgtacagtagagtacattgttcaatctttctcagaaatacaaacttgaaattcacatatcgtacctctgatttaaaaaaactaataaaattatctgttgagaggaacatcttaaacatatcctatcaattttaatggaaaacactaacatagttttgtgtgtaaatgtaagttaataggtatacacactcacacataaacaagacgtcggaatatagtatattggtttaaaggtaatcaagacattattttacattgcagaacacaatcattctaatgacaagagacttgggtgctttggatctaaaagaggcatcttatttctacagagagaattattatagaaaaataacgggctttcttcattttaacatttgaaaaattgagtgcatgttataaagcaagaggaacatagaaacaaaggtctagaaatcatttatggagttcctgctgcctactaaagtttgtgtgtgtgtgtgtgtgtgtgtgtgtgtgtgtgtgtgtgtgtgtgtgtgtgtgtatgtgtaatgggagtggaggtggggtggcaagatttaaaaggattaggcactttggcctcagtcctaaaactgtaagggaagtaaaatgaagaattagtatttttttttgtcttcgatgactacacttaaaccttgcagaaagaatagcacaatgaactcctttacttcaggaaattcgactcatggccagacttcttttctctatatgcctgtctatccccctgactgctgattactttgaaggaaatctcagatatcatactattttatccttgaatattacagtgtatatcttttaaaaggcaacaacttaaaaatgtaactacaatcctaagaagatcaatcttaaaaaattacttagtataatcaaatatcaatttatgattctaatttcctcaattattgcagatatgtttttctttatactttaatttttaaaaaccacattctaattagtttgtcctatagagtttcttagagaatctgtattttgtctcctaaggtgtagttgaaaacatttctctctcccttgaattttacggaaattgagagttagatttaaatggtttcaacaacagaatttagagtatttataaggagtagatgatgtctgcttcttaaatgtttttccagttgtccctcttcttagctaagaatttggtagacactggctcaaagattattatggcaaagttatcaaattccgaatgccatagtatagagaaggaagtagacatggatataattaactctaataaaaaagcaaaatacaatatacttctagaatgttccacagtgcttggttttgtgtcagcattaagagagtgataaagtttcagtttcttcatgaacataattctggcatggaaagggcaacccttgggacaactccatcaaacacaagagctctgtggaacacagtttgatagataatcttgaagattccttctggctctaaatctcagagtgatgatgagctgtatggtacaattcacaatgtttttgcaaactcatgaactttccttaaagctattcttgagcaaagctagggaatgataaaggggaaaagacagatacataacatttcagctaaagtgaagtatttctggcttgttaacaactctacaagtaaacttagaatagacaatgtatctgcatgcttcagttcctcttccaagaaaacaaaacaaaacatctgccagttacaagagctatatatttgaagaaaagtgacaagtaataggaaagcaactggaaatctgggcattatggtttcattaaatatactgtgcctttatttaatatgtctgtgtattttacctttggaatatttttgtgtgttttgtattatgtattctgctaagattcatgcaactgtttcttcaggcacagacagcacacattgtcctggaagatggaactaagatgaaaggttactcctttggccatccatcctctgttgctggtgaagtggtttttaatactggcctgggagggtgagtaatgcttttccaaggctttatttttcctctagtagagaaataactggaagatctcactcatggtggtaagttgaaatcactgcatcgtagtaagactacgtattgtcctgaagttgcaccatgccttgtgcatagcctactgctgccgtccttgaaagaaagttagacatgaacttcctgctactgtaaatgaaagacaacatgggcacactggtggtcccctggataaaaagaacaaaatgaattctagaaacttaggttgtgaggacacaggttatgtgagattaccaaatggtttctgtaaggggaggtatgggtctgattaaggtgaaaatcggagcaaggaaaagaatagatagtatattctagtgctatttcattaggaaagaatcaattttgcacatctaatatgaaatactataagaagattagaaagtccttgggtattttatataattttgcactctagtaagaaagttgaaataacagatacatttattatctttaatcaatgagggagcatctgtgtagatctaatattttcaataattatcaactgtgacctgccttagtatttaagacctgctaacatgtacagcaatgaaaacgagagttgctacagaaattaagtggctgcttttacctagttaataaatgtttgttcacctgggaatcaggaggctgaagttctagtctcaattctaaggataactaattatataatattgggaacatcacttaagctttttgagttctagtttcttcatataaaaagtgagggggttggattaaatactaatttacagctggggatttaaacaattatgtgtcttaaaaacatgactagattgattgaaggggtttccaatacagattcaatccaactagtattctatgaaatatttgataaattctttagagaaattcaagttagtctcataaagacaagggggcattaggttcactgatactgaatatactaattgaccaaacttccattatattattaatttatattctttcttaaactcttgcctccctgtgtgaaatgaagaatattagaggggtttttaaatagttccactggtgagaacattaaattacagtgtatgaaatctgtttgcaaagttttgcttcaccaggcaattatttaaacttttcgacagcactaattactagctgtgttaatatacctgccaacaaacaactgtttaatatagatcagcatgatggagggcactagagttttcttctctgtgatagtttacaggtaataaatcttgtcacatcacaaaagtcaaacaggagctgatggattaatttgctcccaacactgtagttctctaaaacaaagtatatttattcatttactgaagagtattgtaagcatatgtttaaagggaatggtaagttcttttatggaaagaaagaagaaagagaagtaaaatcaaattaattaaagtttttttttgatgtaggaaaaggtattcatctataagattagtccatagaccctattttccattgagaaatgcttctttcattcattacgtgcctcactcagtaaggtggttgataattaaaggggttattttgtttttcatctttaagcaatgcatttatattgtgggcaagccttggttaaaaaattatcagttcctgacagataagagacatctgagaaattagctgatggaagctgcggaaaaacaccacagccctcgagtcaccttagggattgcagagctgaaagactatgtattttgttgacaaggttagttctggtaggcgttagtctggatggtgttgaagaatttatgttgactactgcctgcgttaaactttattggtttcaaagtcgttgattctgtgcccctgagcacctaaattcactttcagttgtaatccacaaaaaaggatttagcttaactcattttgcagaaagtggacatggaagagagcaggaaaaaaacctcaattgcagtgtattccagtgcatggaaaaagtgtagatagctcctggtattcatgggaataacgtttcttcttcttaagaataagaaatatgtgtgtgtgtgtatatacacacacgatatgtatatgcacacacacacacacacacacacacacgatatatttgtatttttcctctcacccaaacttaaaaatatagccctcctgcattcctccctaattccatatcagtactttaaaatagttagttggcatcttttaacttagaagtcagaaatccctcaagtcaagtctgcgagatgaatttttttctaagcagataataactttcaaacttatatgcttctttctaaaattaaaatattttaaaaatcaactttattgagttattctttcatataaattaactcacttattctaaatattcattgaattttaataatcatatatactcatgcaaccaccactaacacaatcaggctactcttcagtatcctaaaaaatatcaagaaaaacttttcaatgtttcgatggttactatcttggtgaaactggcagccctcaacagtaaatatcagtttgggctcaatgatatctggtaggccagggaaatctttagagtatctgcaaactttaaatagagcagggatattttaaaaattaagatgctagcaagggatttttaaaggaattaaaaaatttaaagaaattgagggaataaaacttatatgaaaatataccttggtactcacgagttggtttttctttatatcaatgacatcgtggtataaatttttatattctgtcataacatttccccaggtacgttaaaatctagagacattcttgttggattcttctcattttcaagggttaaataattcagagcatgtatgcagattatagctttgtagttacatacattatttgctgataattttttggcatgtttacccaggtacccagaagctattactgaccctgcctacaaaggacagattctcacaatggccaaccctattattgggaatggtggagctcctgatactactgctctggatgaactgggacttagcaaatatttggagtctaatggaatcaaggtagtaccagtggtggccatttaaaaagtctcaatttgagggagtatagttgacttattcttaagaattaggatggccaaactttcttcctcaatacggtagtacaaatcattaagctcatgtattcaatcttattcctaggtacatgagaataatctttaacttgacagtattttgagtttcatttctcagggcactttgaattttaatgcgttggatgaaacttggcttaacttgaaaaaaatgttataagttcaaataacaactatgctataaaaggattggggaagaatcaccttttaaaaggaatttggtaatgaattctgtatcaattatttgctttttaatcttagcctctaggggatgatttaaagatagcttttatgccagtctaaaagtaaacatattaagatttcctaaacaaggtaattttggatactctcttaggaatatatatcatataaacaattcaaaaatttatattccaaattcaatactattttttcaccattccatttttgaatgacttcaactgatcatttaacttagttttcactatttctcacaatttcccatcaattttttctctgctttaagtataaattaaaaatgattttgttcatcatgtgcattaagccagtaattattaattaaattcttgataaatgccatgcatgtcagaagggggacctagtttagtctcaggatttaccaagccaggtaagcctgctccctctcaggataattaatgcaacaattacatattttaaaagaagggcattgatttttttttttttgcctcttgtttttaaaaatcctaagtctcatgtcagtggatatcataaaacttaaaaacaaatgcaaattgactcacaagagttggataatatcttgtgataacctctttaaaatgactgtctgtctttctaggtttcaggtttgctggtgctggattatagtaaagactacaaccactggctggctaccaagagtttagggcaatggctacaggaagaaaaggtaagaaatgtaatagggcatccatcatcacctaaggaaggttgagaaggtgcctgtagattcagaagtgccaagcagacagaggaagatcatgtagtttgggatctttgcatttcagagagggattccttctcttactacataaaggctgaaatgtctgaattcctccttaaatgctgatgagcacatattttcagtttatccactaggtggcactcatacatgcttggtagcacttcacatttgggaagggaggggtaagataaaattttagcattttctcttctctttagcaattgagtcttttactctccttcaccgttttatctagaatgtagtaatggaacttgcttcatgggttctagtgttctagtaccagctctactgttaactggttgtgtaactttgtgcaggtcacataatcattctatgcaatacttgcatcatctctcattcttatgagtataagcagattaccatcaagtctcgttgggcttcaacattatgacatgtaattatatataatttcatttgacatattaataatgtaagaaaagggttataaaactttatcttacacttttagtttaaatattaatttcttttcttttttttgagatggactttcactcttgttgcccaggctggagtgcaatggggcaatctcagctcactgcaacctccacctccagggttcaagctattcacctgcttcagcctccccagtagctgggagtacaggagcctgccaccatgcccggctaattttttgtatttttagtagagacggggtttcaccatgttggccaggctggtctcaaactcctgacttcatgtgatccacccgactcagcctcccaaagtgctgggattacaggctcacatgagccaccgcgcccagccataaatattaatttccaatgaaaaaagagcatttgccttgtttggatgttagaagtacttaagttaatggacctgcttcaattaacttcatctccagtgttgctgtagctgctttttgttcaactgctgggcctgtaattgacagaattttattctacgaaagtgctgcctctccaatgagtgtctatctatgggggctaaacattgctgctttctgaaaaataaaaaaaatcttgatcctggctctttagatctcattctttctaaattttaaaagggagaagaaggcatccatatcatatcctgggccatagccattttcttctcaactattatctgaatttatcttccttatccaggcagctaatttctgtaatcgtcatttgggagacacttctctccccccagcccccaacaacccaagctttccttttcctttttgttatttaggacacttgttctcatagcttttctatgtcagaactaatagttttagtgtaagcctaaccaacggcttgtaagttcgttttttaaatgtgctttgaaccttcttccatgatcacagacatgtagagtagaaaagaatccaagataataaccagttcacctccttcaatttaccggtgagaacaaatacattgcttaaacatttctcagataattagtggaagaaaaaaaaactagaacatgttttcattttttaacctctttttaaaaaaatcttattttagtaaaaagcctcccgtgggatagaacctgttttcttgattcctaactcattactctttcattataccacatgtgtctctatccaacgtagtcaaagaaccttaaaacaaatggtggtcctgcctgatggactaacaggatgatcatgttttagtacaacatgactactcaacatggcccttcagaaaaatgtgttgagtgcctactctgtgccaggaacatttggctcaaaacatggatttgcatattattgcttatgaagttcaccaatgtgatttaacttacttaacatcctgggttaaaagcaatagaagtgtagcagaagattgatgttcagaatttctcatttttttactctgagaaagaacctgggtattaagagtcctatgcctaactgtagcaacaatttactgtgttctgacaatacagtcaccctgggtcagagaaaagaaagagtggagaaattatttactgctcaagaagatagatgaggccaagtttgtaacttgaaaacaatatgctggatttaatctcctccaatttcactgtcactacaatttttttcttataggttcctgcaatttatggagtggacacaagaatgctgactaaaataattcgggataaggtataatcatcatctttagccaaatctatgtttcttcgggtgtgtgtgtgtgtgtgtgtgtgtggtgtttccctcagtgcctaagggatccattaatatgtaaaggagtgaatctggccagcttctgctatctgggtctctgttattttgttttactattttcactgtaattttcaagattgaatacttgattggtatgtttttaactgaatggacttgagattcattcacctggcagcttattgagtgcccactatgtgttcattataccaacaagtcaaggaatttataattcagctcatgtgatagaactttagtgaaacaagtggagaaggtaacaaattgcataacaattttgcctgaagtgaaaacctacatgctgaaaaatacactccaggaagtgtacagcattgttactgttatttgttttgtccttgtgaaagagttatttgtaaaattaatgcattatctttcatgaatgtgccaaataagccttgcatgcattacttcaattatatagtctttgttgagaccatatcaataaccaaggtgataaaagggaaggttatcttttgctttcagtgaagtctgattgctacaacatctgacccctcctctgagaatatctcatcaccatctgcttgttgagtttattattattttacttgaaatttccatattccaaatctgaaagaaacattacgtcactaacgttaactaaattccccaaatgcaactaaagttttcttactaaatataattacataaaaataaaaagataaatgacacaatttgaaactacacatgtgggctgggtgcagtgggtcatgcctgtaatcccagcactttgggaggctgaggcaaacggatcacttgaggtcaggagttcgagaccagcctagccaacatggtgaaacccatctctactaaatatacaaaaactagccagttatagtggtgcacacctgtaatcccagctacttaggaggctgaggcagaagaatcacttgaacccgggaggcggaggttgcagtgagctgagatcatgccactgcactccaacctgggcgactacaggaccctgtctcaaaaaaaaaaaaaaaaagtacatatgggaaaaggagtcttcaaaaaatttttttgtagatttcttgttaggatatatacatatatatattgacacaggctttctgtaaacagaaggaaaaaacagctttgaaaataaaaacatggccaaatacccatgaccagaaggaagacagtgagagtttatgccatcattctatcccacctctgattttattcactctaccacgattttcctgagaataggtgttagtgaaattatatatcccagggagattcttgtgttctctcagcctaatgatgtgtgtgagcagtaagcaatgacgaggctatgagggcgggaaaggaatacagttgggaaaatcaattcagatggcagaattggcaggttgaataaaatatagtcaggcctaatgattcaggaaaactttacaagaccgcacttgtctttcatgtgatatgttaggttaaaacgagccctccttttatcataggcagttaggttttcaaaattggcggaatagattggcacagacaaaacagtattgcctcatatttctttatcagtgatggtggttcatattaaaaatgtatattatggctttcacttctattaaccttaatttgaaaagtaagatcgtatttcattcagcatgttttaagaaaaggggaaggagaactaaaaaccaattttcaaaattagggatccataaatatagacaaggggttatgcgacttggattataaaagtaaatacaggccaccatgaaatgtagtaatctactatggaagtgaaaggtggtttttaggtagtgttcccagacttagaggcagcactctgaatttaataacagcactgaaacatccatcatgcttgcatgacacataggtactttctactctcacttacccccaagtgacttctccttcaaggaatacatttaaaagggaaatgaaagcttccttctatttccttccatgcaataatttcatcagagaagggcatatcaatgaattattttgaatttttacccctcaatagaatcttgattactaaatatagcatgccatttttctaagtagttcaaagcagacttactaacaaataagtaaatctcaagatacagctgaaaaaaggtgacattgtcgtgttcaagctagcaaggatagtttgtgaaaactttacagagggttgaacattctttcaattcaggcccataggaacacttggatatgaacatgcctaaacagtgaatattttcatttcaaattctagaagtttatgacttatgttgcatttcatcttctttgtgaattaatattactatcataatgaatgaattcccgctttttttgtgatttttagattccttattgtctcaatagattttttttgtccatttctctcatgaaatgtctttaggtcatatacgctgagtagtgtaagtttactaaatatcccgatttgcatcagcctggagcctggagacctgaattctgatgccttttgactttgccttcatcaggcaatggtgtcagccctagaagaactaattgtatttccaagagtatttcccaaaatgtatgtgcaaattgcttaatcttttcagtttgagaagatgaagatcttccatgatggttacgagtagttataaagacatctaagtcttgcagcagctgtttaaagtccctgtgagtttatcttgtcaacacctttatcgttgcttccttttaactgtctaatttttttaatttgatagggtaccatgcttgggaagattgaatttgaaggtcagcctgtggattttgtggatccaaataaacagaatttgattgctgaggtttcaaccaaggtgaggggttttcctttatattttgtagttttatttgatcccatttagaccttcttgaaatatcaaaatctttatttaggcagagtttatcttccagaagcaccagtgttcaggggtagaaagggatctcatagcagctaaaatacaccttacaaaatcagtgcatttaaagctggttttacttacaggcttacatgggaaacttcatgccccaatttagaggatttttactaaatttagtgttccttccaccttttctgattcttcagcttaggattttaacaatgtaaaataaaggaagcactgaattgccaaagataggtccagtgatgatgaggagtcagagctagtaacctgccagagagccaagagaattttacagaaatcaggcacagtaatcagaatctgggggcattttgtgcaggaaaaatatttattcatacactaaagatttattgtgttatagctttgtttcaaaattaatgttcgtaacgatgactgagtcaccctaaagtgaaatatctttagtatacatttataaaaaggtaaagaatacattttagaaagaagtccattggttttgattgaatatctactaatgtaggtgtgagtgagtttcttgagctacagtctctgtccttggggagcatagagcctggtggaacaaacaagcaagtaaatcaccatgtgcagaatcctgtgataaatgctgtccttggagtgttcatagcatgctgcaagggcatgcatggggcagcattgaaatgggataggtggatcagagaaggccctgtagaaatgtgagtcctgttttgagacacaaagagcgggtagtaacagtaaggtagatgaagaaccaggagaactttgtttcaggcagaaggaatggcttgccaagaggcatagaggtacagaacaacatagtatatttgaagagttacgcacagtttgggatggctgaaccaaggggttcacacctattggtttacacacttgggcaaggataagtggagatggactgactgaagctaggtctagaaggtttcatatcattggctaatcagcacttccagaaactattgtcaactcatttggtgtcattttggagcaaagtaaagctgaataaaagagcaagcaactagaaggttattgtaacttatcagaacaaaactcacgagagcctgaactgagcagtagtagcaagaacagatacggcaacctaggccgcttatacaaatgggaggaagaggggctgaatgaggtcaggtaaaagatcaccttactttctcagctaaggatttcaactagttaggttgagcatagtgattatgtcatttgatatctgagatgtttatgggatactgctatgaaatttttttaaagaaaagtttttgatccgctttgaaacttaaaggaagaattgctaccttctgtttttactacatacaatgggagttaaaaatagagcttctctttcctaggactatgtatttggttaccatggggctttacatgtggagaatttagccctgtggaagcctatgtggcatcacagctattggctggttctaccttggggtttatttatactatagcagagatggctacaaacttctcttccatcaccagtgtggcaatggaatttctcagagaaactctactttatccaagtagaaagtgagtgttattttgacaaaggcgattgaaattcttagaaaggaaggagtagaaaatgtacatgtggacgcaaaatttgattttaaatagatgtattcaccacaacattttatttctagatataacatacacttttttgcccatgatatttcataattatcgtggtccattcaatgtggcagctctggtcttcaaggaaaataataacaaccaagcttttttgaacactcagttaattttcataaaaactccatgtcatagatgaagaaactgaggcttagcaagtaagtctatttaaaatcaaatgtaacttgcccaagtttagtgtcaatttgaattcaagtgactccagagtctctgtggctaacctcatgctatttttctttccattttgatgggagtttgacggaaaagctttaaaaagctcaatttctagatttatgttccatgaattcaagaaacctcttcaagactccctgtgaaccaattttctatttggcctgcttcttacaaggcctgaatatgtttgtttgcttctctacgtagaaatcttttcccatgctttctccttccccttctcgcctgaagaagtcagtttcaagagtcagctcattgttcctttgtgaagcttccatgactcatctcacctttggatcccatgtcatttaataaatagcttcagtataacaaggatcaaattgcatttaactctttgaaaggattgtctctttcacttgtcttggttggctctttgaggggagaggccatggtttacttatttgaatccccagcactgcctatagtacctttcacatagtacatggtcaacaaataatgaataaataaaggaatatacaaagccagtaaatggtagttacagttggtggtaaagaaattgcacattcttattttcccttcaaatcctttaatcagtgtttcttatggttctatgacctccattattaatataataaaattatcattattactaataactgtaagtcttattaataaaaaataggcacgatctattgagtacttattatctgctaggtttcttctcaatgctttacactgattaatttattccatcttcagtgtaattatatgagatgggtattattaggaactcatttactgatgaagaaactagggtgtagagagattaaataccttcttcagtgtgaatggccataggattatacataggaaggcttggtctagtgtctgtctctcagaaaacatcatcccatactgcctttcaacatagtagaaataatagttatgcaactaacagttatactattagtaaccatccttatactaccatgtgataatattcaaataagtttacattgtttcactccttataccttttacatatgcagagtaaggattcaagaattttaaatcagaaatggtaaaatatgtgaatatgtgaatagactggaaactgactctgcttgtatgggtatcctacccgctcctgtgacaaaaccttgtcattgagagtctttagaaaggatgttcccatgcccttcctgacacctgttcatctgggaaatgattcatgttgtgatacagcaccaatcagaaggcgtatagaggacatttcataaggaagagttccagcgtgagagtttttaaaggctttaaaaaaagttattaaaagagtaaaacagtctgatcagtaacatgtaagactcagagaaaacacacattgatattatctggtattccggctcctgtcacgtgaaaatgagagacaaggattttgggttcctagaaattagtactgagtcgtgatgttcatgtcgggcagggatgtgcattcaaaacatgctgaagcctaagaagtatgtgttgttaaagaaaatcaattttaaattagatatgtaattacttatatgtatggaatttgatcatggtgtttgcaatactcacttctgatttttaattttaaaattggtcccattcatatgacttccccttgttttacatatttccctgtgaaatgatttagtttgaaacacagcatgatagagggtgatgatagatgatagaatgttagaattgagaactgccttggtggtttagtctagcatttcctaaactggaaaacagtggtgtggagcaattcatcttaaaaaattctgtggtcaagcaaggttgcaaaatgctgcataagatattcctctctgttaagtccaagcacaaatccatatatgcaagtatccatgaggtcttgtgtaacttctgttattcttatggacagtatttaatgtgtttgtgtagagaccagcaaaaatgagcatatctgtgtttttatctgtgtccaatcaagggagatgctgcagtggtgaaagctggctcctttgtttcttaatgtcagtgcaattaaataatattactatagctatgataaaatgcgtatttgtatcaggagattacatatattttgtgagttttgtttgactacatgccttggaaatgttgataacttcattcattatcttgtaattacaattttctgtagctacaactagatggtaatattgctttattttacatcagaagcctaaggttaagaaaagatctatactttttcaaattatttgatgagaaagattacctgtgacattcaattcagcaataactccccccagatcttgaaaggattagggtatttttttttccttcagaatagtcagtgggagaaaaaaaaccccagatatagtttatatattttttcctcaactacagtctaaggattataatttcacattctatacagacttagtggagaggtagatatttcagtcaaaataaactgttctttcaaatactcagtttgtacttttcatctgaaaattttcacaaacgatgaaatcatcctaaattcatagcgtgctagctaactctcaaagcaggaaccggtgtgtgtgcccacccttctaggctttctctctattatttctccttttatgactttggggagctgcttcttgggttaatgcctgtgaaaatagatctgcctcccagccgtgcttcagacatagataatgattatgatatgctctgggatctttttatgaaatctaccatttaaatgcaaacaattgcacggcaacctaaagggactggtggtctatacctgcttagcaattcctgtgactcttatactgattttatccattaggcccaactgcagaagccttatgtacagtaattcagctttaccccatttgatctttactgcaagttgaggatcaagtggtatttaaagcatgatgtatctattgccacatctgtctagtgctgaatcaggcaataatgcttaaacatttcattgctaccagttgttaatgaggcaaaacatgagaaagatggttaactatgcatgcaaccagtttcttagagatcattgttattactataatcaaccgtttatataaaacagcaaagtctttttttctcataaaaaagatacagtctgtggcacttgttgtgcctttcttacaaactgtttgttaactgccagtcactccctagtagttaacaatcaatctgttaccaatctaagttcaaaacattgtcagatgtgtttatgattttggtctgttgcccatagctgggacttccctctcattctctggtttttaaaatggcaggatgtcaaagtgtacggcaaaggaaaccccacaaaagtggtagctgtagactgtgggattaaaaacaatgtaatccgcctgctagtaaaggtaagtaatttgttcatttcaaaggtgagggtttgtcatattgaccattagtgttcagctaatttcctctgtcacagagaaacttatgcattctttcagaatgtcaggggtctacattcttcttgttgcttttgatttacaaaataacacatttatccctgttcaaattaaaaatatagactgctatgttttttctttaaaaaaaaaacctcaagggccactaaaacatggaagaaaatgatgactgttcttgtcattaattgactgacagtctgagatgcatcatgttcactttctttgtggtatagagatgaccaaaaagctagagtctgtctgatagcatctcctttgggcttacatttattttgtaccacacgtttgtaggaatcatgccctgacagagtacgaactttcacattgtttttatatcaactcttagacaaccagttaaaattaaaccttaaaaattctcaaggagaacttaaccatcataataatgtttcttaaataaagttttgttaggatttttccttctcctcactcctctctcagtctgtctctgtctacacatctcccctccatacacatacacacacatacacacatatttgcataacaccaaattagcatgcgtattgggagactcttcatcgtacctccttattagagaataccagcaatattcaaatcatgatttcaaattcttgtcaattttattaacaaacatttgcatggatagcatgcatggtagcagatgctgtggatggcctgtgtatatctcaatctcaagttaccattttaattcatgttgcccatcttccaattgcaaatatctatatctctttgcctgatggctggagcctactggcaggcagtaaatggcatagaattaatgatctctggagtagcccccaaccaaagcacagaaaaagccagtgtttaaccaccctggctcctttgtcccatggataggcagtctctaaggtaactattccacacgggctctcagagttccctactgggcttaaacttcacttatccctagtggtaactacttgctaatgcataatttattggggtgtttcatgatgtcacttcctctctgtttagtatggaagtaccttccaaataagcttttgttctcttaaatccttgtttcaggaaatgcttcatgggaaaccctcaaagacaccttcctatgtgcttttatattaaaagaaatttctaagttttccattcgaatataaatcttacagaaaatgagaaaaccctaggaaagaaggctgattaaaatttgataagactaaaaggcaagactgaaaaaggtctgacgtgggccaacttaacattttcagaaaatggatttatatctttttgcaactggtcgtgtgaaggtaacctactctcctgtcagtccagtcatggcatttgtaggcactgaaacttctcttgagtgcaggagagtgcattatccattttttcaggatcaaaacttttaatggtgtttatttttatttttatttttattttgagacagggtcttactttgttgtccagcctagagtgcaatggtgtgatcttggctcgctggaacctgtgactcctggactcgggtgatcctcccacctcagttttctgggtagctgggaccatacctggctaatttttgttttatcttttttggtagagatagggttttgccctgtttcccaggctagtcttgacttcctgggctcaagcaattcccccctatcttgagcttccctatgtgctaggatcaccggcatgagccaccaagcccggccccaaagaaatttttgctcagcattatttattttaaatgtttacaaatttttccttccctttaaggaatggttagtcaagagaaagtctagcaaaattatactttggcaaagaaacatgttattaaattcatcattcttgtgtctcttttccagcgaggagctgaagtgcacttagttccctggaaccatgatttcaccaagatggagtatgatgggattttgatcgcgggaggaccggggaacccagctcttgcagaaccactaattcagaatgtcagaaaggtgcaatgaaccttgaattcatgtgtatctgtgtgggaggtgggggcttccgctctataccctcaaagggctgtgatacattttatttattcaggcatttttcaatgctggtatttgtgacttctgaggcagtgtcagtagagatattctgtaggggaaccaatgaggagagaatatcagagaaaatagggtttttcttcaggcaaagtaacttggggatcatgtccttgagttaaaagaactggagtccaatggccaaatgtattttgctttacagttttaaaccgacaactcatggttccttatcatgaccttgggacccataagacctgcaggtctctaaagaaatattaaattagatttagtttagtttgaatgtaaagtacatcttaatgaattataatgctacaaatttgtcaattatgtccttttttatattcttctttaattcagttactattctctttaccttcttaagaaaaaaggatacctcatttttgttcattcagaagcaacattttttggaactgtactaattggttaataaaaattctccctgatttagattttggagagtgatcgcaaggagccattgtttggaatcagtacaggaaacttaataacaggattggctgctggtgccaaaacctacaagatgtccatggccaacaggtgaggtattttcacttttgcttacagtaaaccagctctgacatactaactaaatacaaagaactcagagcacttacctgccatttctttagagtaaataaatgcacatgtaccctaaaacttaaagtataataaaaataaataaataaataaataaataaataaaataaaaaataaaataaataaccataccttacgtggttgacagttgtttgactacctgataccacttttgttgcatttttggaaagcagccttctctaatgataaccttgctataatttaaagttattttccttcccttggcataaattgaggttataatactcaatcaaatgatattccaagggaaattgttctgattttaagcttgatttcagaacattgtaacattttaagaaggtaagtgtgacttaagagccgaggaacctttagatcctcttggtttctcttttttgcctcaaacaatattaatttattaaacatcaggctttttcccatggcccaccctctacataaattataattcaggtctgagcagtcatctctttgttatctccctataactctcgggctttaaaattattgtagttctcttaaagtaagtcacttatatttcttagtttctgttaagccggtgagcaaccctttttgttatgagtgcaatgcccccctttctaaaaccgattatagaatttaatagacctgcgtatttaacacacaacaaagcttcctgaattgatttttgttgggaaaattactgggattaacaatctgtgacttttctcacagagtgattttcactaagcaattgaaattttgaattttaataggctttacttgttcactactttataaggaatacatttatattattctcttcacttttccttttccctattctttttctccttttctctccagagggcagaatcagcctgttttgaatatcacaaacaaacaggctttcattactgctcagaatcatggctatgccttggacaacaccctccctgctggctggaaaccactttttgtgaatgtcaacgatcaaacaaatgaggtaaatgatgtcaataaacctgttcagttggtgatgagaaacgcagggcttttaaaaataattgatacataagcattgtatatatttatgagatacatgtgatattttgatacatgcatatcatatgtaatgatcaaatcacactaggataaccatcacctcattttttatttctttgtattgagaacatttcaaatcttctcttctagctgttttgaaatatgcaataaattattcactcagaatattcacccagagtttttaaatacactatgatgcaaatacctttctcctgtttgtttgtgatttttttggggttgagtgttgaaaaacagctataggttttctcccatagccctctgtgttttaaaacgtcatttctctctcttattctctcatcagttgacttgttaagattcactatttgagttattaatcaacaactatctcatatattcaatgttagtgggctgttggtccaaatctgtttgagccccatctgggtgggtctctgggacttacttggcactggtgtagtgtttgagaagacccttggaaaagtaatttcggacttggggataagatgaggacttgagtttactctgaacagaacccagaggggtcccaaagactatagaccaaattttttatttatttatttattttaaaggaaaacacattcagttgagtcttcattgacccattttccatacttaatcaaaaaggtcagatatgtaagtccttaagatatcggaccatgttacttaatagtactgttagttacaaaaattttgttaagcatctaactcagtttttaaatttgagctttattgttccctgaataatacatagccacacttgacattcattgttacagaaggaatttcttcctgtttcttattcctttaggggattatgcatgagagcaaacccttcttcgctgtgcagttccacccagaggtcaccccggggccaatagacactgaggtacgtcaaaaagatgaggcctattatgtatgcaaaaaaaaaatgtatttgtgtggaaattcgagaaaccaaaataatcaccccagatgatcttgagcagaacattctcaagaagagtgctttggtaacacacattttgtattaaaatctccccatgaatgtcacagaggaaatttttatcttttttaaaatttaaagtgggaaagcccttaagaaacccgaagcgatggtatttttatttaaacccattatcattctaatatatttagttctgaaatttacaattgttgtactatgcaaatgaattcccttttgctctctctcgttctcatgactgaaatgaaattttaatcccccatctgtgacttcacaaaaatccctatggcaactggttgtgtagccactaagggagaataaacagcagcaggagaaggaggggaagggtgttggaggggagagagggcatgcatgcacatacatagatgattcagacggcttcagaaaagaaccacaaggaatgcttagaggagttttgtatttaatctaaatatttttacttttttgtgtgtgagctcttagttcattgttcaaacccatctttccaaataaattcttctggtgatatccagaaaaatctgaagtctattgtgacttccccacacccaggggcctccagtagcaaatcttcattgtcagaactctcagaaaagacttcgaggtaaaatggggaagagaataagagctttctttctgcaagctctgctctactctctcatgtctgaattgccgttttagatatttatattttgttcttgttttaatattattaggaaatattggttcttaatagccaaaatcagtattatattaccaacccatgatgaaactcataaatcaaatttagttatgtgtatcatctaacacatgctaagtagttttttaatttaaaatttaaattagcatatattagtacttcggattaggaacattgcaattaagatgtaataatatccactgtcacataattctccttttttgtctttccaataattgcaaaatgaatattctttgttgtaatttgtcatatctagtgaaacaacagaagtaaatcctttggcaaagattaagaataatcttcagaaactgttttttagagccgatagaaatttaaatttaaattagtatttctaattttctatatcataagtgatatagcttcaattgttatatccacctagaatttgatttagaagaaacaaatgatatacaatttactaaaaacttggcattctcagaaggtatctgatatgtttactgcttgttggaaacttcttttttataagacttgaagtgaacagaagtgtttatttgattaaattctcacactaacagatatttagttattgacaaaaaagcaaaaaaagctgaaatgctataataaaaattatttgttgcttatctgaagttcaaatttaactgggtatattgtgttttatctggtgaacttaggaattttgaagcttctaactagttggttgtatttttttctagtacctgtttgattcctttttctcactgataaagaaaggaaaagctaccaccattacatcagtcttaccgaagccagcactagttgcatctcgggttgaggtcagtatgtgggcttatttttggtttatgaattttggattgtccctatcacatgaagatttttaaaaactaagtgatgtaaggcatactagtgtttaataaaagatgactggtaatattgtaatagactgtcattttgtaactaattatttggttccttcttgatgatgtctagtggaacttctcatgttttgatttaaaataatgtcttttaaagtttacttcttccagagtatttgtaataacataacaaagaatagtgtttagtttagaatttatttcccattatccaaaaagccatagctctatgtaaacatgagatacatttcagactacagaatcattatagatgatagaattctttttgtttcaactagaataactgttattcaacatcatgtactgagtattattttacctctaaaaagcaaatggacaagaatataacacttaaatccttaatttgaatatgtatgttagtgtgataaagtttttacccatttccttcataaactacacattcatatcattatttaaaatttagaaggatatatgtgtatttgaaaaaataccacacatagatatatttacatatatgtatatatttttggatatttatatatgtttaaataaaatgtaaacctctgccaaaaattttttacttaagagaaaaaccttaataaactttggaagtcacattgaaatcagagatgttttaagttattagtctttttccctatatattacatatttttcattacattagaccttagatgaccacataaactcagacaatgtggtttgtcttctccaatcttgaaaatgccttatttcccccattttagcagtaataacagtgtctttttcttattgcttataggtttccaaagtccttattctaggatcaggaggtctgtccattggtcaggctggagaatttgattactcaggatctcaagctgtaaaagccatgaaggtgagagaatatgatccttactagaattaatatgcttcctttaatgagtctaattagtattttataatttagatttatgacactacctcttttcaaagttgctataattattttccttaactgtgcctttataaatcttgtattaaagaagcttgatcacgagcaagaatttcaactttctgtaatgtgcacatctgtaaattgaggaggttaatctccaaaattatttaggttattgcctccttatagtgaaaacatataaagccacatttatttatgctgtttatttcttttgaggcagtgagtttttcaaatatacttatcttttatgtgaaagagaaattttgggcatctttggtgctttaaagtatttcaagtgctctacaggatgcttcgggcatctctgtggttgaaatgggaaactccagttggagaagcaagggcaacagtacattttgttcaggtgttataaattattatctgtcactgggggacacagttctcccatcagtgcctgggaaacgggatgatatggcaacattttcaagtagaaaaaaagatttgatacacaggtgtggaaggacatccttcctgtttctttaaactctctggagatctcccaacacttactgtagtaaaataaaactttagaaaaattccgttgtatatttaatgtatttctcttgaggagttcagttggtacccctcgttgtgctaatcaggccattcggaggcaatgtgagctcttggtgacattgcctcaggctttgcagtgtaatgccattcaccagagaccaggctagtagagtcagcatagaatggcaacagaagactaggacagcaaacctgggaaaaatagttggccaaaggttttcttatttttctttttgttagtattctatagtcaaagattttcacctgatgggcgtctgttgaagaggtagaacacagtctcaatgactttactctttttcccatttgtttttattttttaatactctcctccattcatgtgcatgcatactcacatattttttggaataaattttcaaaacgatgttttacttctttgtattatgctttaatttctcattagataattggagactgtccagtggtttagattagttagtacacaatctaagtgtgttcagagtttagaatacatttaactgtatacagtttttattctatttgggagttttgcaaataattagaatttctatagttttgtattttaatgtgttttacatcaattgggtaaagttatatagttttaactaaagaacaggaattattagattagattgtgatcacttagaaggttaataactagaggtggatttttaaactaaaaaaataattggtgcatatattgcaacaagaattagaaaaatcagaatgatttaaaattaagattgcaataaggtttaaaataaatgaacactcatcatgtgtatgtataggatcttttcctgtataatttgacttataaaaaatcgccatattcattgtatagaacattcagaaaaatacttaaatatactaaagtttgttggtacttttctttagttgtgaggctttctataacttctgttgctggtatgttctcagttgggactcaattattaaaattcatcacatattataaaagcatttgcttacctgtttgtatcttcctgacattttgttaataatattactcttaaaatcttgagagatgactcgtattgaggaaagagcataggatttgaatcataacatttgaattagagccctaatattgccacttattagctatgtgacctttagcaaaccatttaaccttactgaatctcaatttcttcatccaaaaggttgaaatctctttcatagtcttggtataaaaatcaaatacattactaaaaagtacattacaagcattaagtcactatttgaatttaaagcagcataaaatatatttaatgttttattcagatcctccccaaagatatgtggggttttcaataataatttctatacttttatctgaatattttgttgactttttaggagaatttaaaattgacatgctaatgtatgaaataattagaaccatctggctgtatgttataataattattttgctaagtgtcaccctcatcttggtttataaaacaattatccttagtagcctacataaagaattattttgaaggtctctcccgatgtaaggaatgagatagagctatgaataccttcatatatatacacacacacacaaacatacacacacacatgcatgcatacacatagttttatttcttttaccatatggttttttaaatatgtacaaacagttgtataatgctttttgttaaagcactatagcaagcatgaatctagaaaataaatagaaaccagcagaaggctctcagtgcttccagcaagaagggagcacattattctgcattttaaatgtacattcaatgttcttcttagacaaataaatacaagggggagcagcttttttttttaacttttattttaggtctgggggttaacatgtgaaggataaataagatcctttttgaataagcaaatattgagggaattcattaccaccagactagccttacaaaatatcttgaaaggaacactaagtatagaaagaccactaccagctaatacaaaaatgcacgtagacacacagaccagtgtcactgtaaagtaactacacaaacaaaccaacataataaccagctaatagcacaatggcaggatcaaatccacatatcaatactaaccttgaatataaacaggctaaatgtcccacttaaaaggaatggagtggcaagctggataaaaaagcaaaacccaatggtatgctgtcttcaagatacccatctcacatgtagtgacacccatgcgctcaaaataaagggatagaggaaaatctaccaagcaaatggaaaacagaaaaaaaaaggggatacaatcctaatttcagaaaaaacagatttcaaatgaacgaggatttaaaaacagacaaagaagggcattatgtaatagtaatgggttcaattcaagaagaagatctaactatcctaaatatatatgcacccaacacaggagcacccagtttcataaagcaagttcttagagacctgcaaagagacttagactcccacacaataatagtgggaggtatcaacactccactgatagtattaaacaaatcattgaggcagaaatttaacaaagatattcaggacctaaacttgacattggaccaaatggatctgatagacctttgtaagaactctccaccccaaaacaacagaatatacatttttctcattgccacatgacacatactctaaaattgaccacataattataagcagctttcgtattgcctctagttccattttatatttactaatttaaaatttttggaatatgttattcttttaaggttgattgaactacagggttcagtaatatttgtggctctctagaccaattatatagaaatggtctccagctttgccaacagtggcaaagatcacctcatggcgatcttcatgagacagccaattcttttggatagtttcattttcaagaatttcttcatttctttgaccaaatgcttgtcttcctttaacttccattcactagtcctgttacggatctctacggcccacagataacctaaaagcttagttaccccatgtctttttatttaagtgtggtcattctcttctttagaccatatattcatgtactggattcttttgtttctttcaggaagaaaatgtcaaaactgttctgatgaacccaaacattgcatcagtccagaccaatgaggtgggcttaaagcaagcggatactgtctactttcttcccatcacccctcagtttgtcacagaggtcatcaaggcagaacagccagatgggttaattctgggcatgggtggccagacagctctgaactgtggtgagttcttataagcttaattgcagagttttgacatatgcactgctgtgtaatgtattttatttgagctcatctaacaattgtgctttgtgtgttcataaaacctttcctctactgtgtgagaaagcagttagcaaacagccacttaatatagtcatatgatgaatactactagttaatttcacaaaatagctgatagacaaagaaacctttcactttaatgctccagagtggccagtaggtttcttgcatttctctactctatcgcaggatattgcttttctctgttgctattgaggtcttgagaactattatgaatgaaaaatgagaattaacattggttaagtgctcttaggtatcagccctgcagcaatttcctctcaaacacattttcatgatagcatagatcagtctttctactattacttcatacttctgctgagtctactgctttgttctctttaaaattcttcaaatctttggaactggatcatgaataagagtctctttagctagtttgggtaagcaattggtgatataacttgtatgtcaaaaaaaaaaaaaggactaaggcaaaattaggtggctaggtagtggaaacacaaaccattttgaggataattttttagcccaggtaggtactcatatatttgggattttttaaattatagaatctcattatagaaatggactttaggaggaaagggaatatattgaaatcttaaggctcagtataatactatgacttttattaataaggataaaaatgattttcagaagatggtaatataagtaaaagtagcatcagtaacatattttgtcagaccgtcttcagaatttttatttcaatttttttccctaagtgcaattctattgtagacagtggtaacttctcggattttaagattaaaaaagtagttgtattcagttgtctattaaaaaaggcacaaaattcaagattttaaaaactaatcctatttggttcttctttaggagtggaactattcaagagaggtgtgctcaaggaatatggtgtgaaagtcctgggaacttcagttgagtccattatggctacggaagacaggcagctgttttcagataaactaaatgagatcaatgaaaagattgctccaagttttgcagtggaatcggtaaggattctttgctttggaaaaacaagggcattatttgtcttgtgttgtagggagaatgatttttcatgcctaataataatagttaagattattatacttgcatgcattttcttctagaattgtgttaatagtttagaaatattgtgtattacagcactcaatgctgaaattataggtattaacattttactttatgcaaagagaaacagaagtccagagatgaagtggtttatcaaggcttgaagtgccaatgaatctcagatctcctgaactgaaactaagaaccataccaacttgcaataacaaagcaatttttaccttgtttctgggatcaatcacatattttgcatgtgtgaattccctgcaaatgagaaatttgctttaaattttttttaaataaaataaacattttagaataaaatggatccagtcattaaaatgactggaaaacctgtagtttagatatttaaggaagatttgcttttctgttatttatttccattgccccttatgcctatcaataagctattaacagttaccaggaaaaagaatcaactcactttatatctgtttttgcccctgactttatttttgacttcaggctcatagctggtgaagtggaggtgctaggggcagtgttaaatccaacttctccatggtagaaacaggcacacccttaggaataaagcaggtactgctgggacaactaaaaatgggttatgtatgtttcagaagacaatgctaccaagtatcttttgtgttacaaacttgtcaatcaaataatcccaggataactctgctgcacaatttgggaagctcttgccatacatttgttctttcattgccagatttaattatgtccttgcttcctcaggaaaagaaacaggcatatgggaaaggtgtaattacattcccattggtagtgtaataatattccatgacagaaaaatatagccaccatatgttgtattctgtaagttaaaaaaaagaattccaagcttctgggactatgctcagactgaacttgaaaatgaaaaatccatttatatacagtgttcctaatggcttattgtggtaacatcaagctagcttcagcagcagagaacctggtttcattaagacagagacttttaagctgcatgtaaaaatcgtaaaaatccaataattcaatatggctgccattctcaaatgaatgatgattatttctgctttgaccatggttctgtttcaataggacaggataaaatttaccgcaaaagtgtatttcttagaagatatatatatatatatcctcccttctagaattttacttaacatttgagtaacaacacttgcttttcagaatgagatgagggaataatagaacatttctagattcactctccccacataagttggtttacctgattgccagactctcttggtgtggtctgttctgccagtgtgctcagcttttaaaatgttgagtccttgttcttgttgacagattgaggatgcactgaaggcagcagacaccattggctacccagtgatgatccgttccgcctatgcactgggtgggttaggctcaggcatctgtcccaacagagagactttgatggacctcagcacaaaggtatgtatttttgtagacaatattcttaccaaccaaaaaaactggcttgatagaccttttcaactagagaaagttatgtagatgagaaattacattttctttattaaatcatgatcatgttctccaaaagcgtattccaaaagatgacacttttgcgagagcatgcagtgcaactcttcatgccaggatgcaatgataaaccacatggttcaaggtaaaccagtggtcactttacctcaaattccacttttatagtacaatctattgacttcaaggagatgaacttaattcaactccttcttcctttgtttcaaaatctactctcaaatatttaaaatgctaaaatatgttttagtggttaaggaaaaataggacataatgtctcatttttaattttttagaaataatgtggctggcatgggtgacatccagaaagtgaaacaaagcacattgagtagtttgactttactcaaaattaaggtgtctaaaatatacatggtataaaccactcaatacagtaaatgactgaactccaccaactgccatatactcataaaaacacgagagatttgagggtttataatttattttctatcaaaatcactttaacatattaggaactacttctttctttgcatgttagaggaaaactcttgagaaaagtaagctatgctacaaaaactaaattagagactaatgcagaaaatatgctccaggaaaacagagacttttgtctatactctatttccacaaaatagaacagtgcctggaaataccaggagttcaataatgtctttgaagaatgattacacgtgcagccaagaaacctgtgtaacttacatggcagtcatagaagtgaatttgacagaattactgtaagggctattttgggaattatttaggaaatagctcacggacagcttattgcttcatctttacttactttttgaactgaagtgaaatgagacccttgaattgttgacatagaattttgaaaacagataagtacaattcagcatatttaaataactacaatggcagacttacatataaacaacttgggtttcgtttttctaaagttgtgaaaattacaaaaaagggaaacatacctcacataaatgtttcttgttaccattctggacatatgaatcacatatttagagcaaaaacatgtttttgaagatagaaagtttatttcctctagcatgttagaggctccaaatattttcaatattaacaacttcataactgccaattgtgacagtgtatacatattctctattaatttttttactctataagaaaccaatctgaagactgaacttttcatgtaagaaagtttataataaagagaattttggaatgaaatagctttcaattatttatattgtactcaaataatcaatagtcccttaaatggtttttcttgttgaaaaaaaccctcgctcttcccttgagaataattagtcatatcattatgtcctaaacaatcccctattctcttgaggttataattagcaccattaaaagctgcattaacttatccaggtccctaaattaactttttacataaaatcgaagacttcaaaaaataaaaataaaaataagctgaggaaacaggtgaagataatttcaaattttccctgtatctaaatatccattttacttcattagaatgcaaaatacttttccaaatttataccctttgtttcctagatttcttcttttagcaggcaaccggaatgatgaattaatcattattaaattgttaacattggctactgaattttctaaccactttgagaacctcatcgtgggcagctgtggggacaaatgtgtcacattttcatttgcacgtgctggagcctgtagtgatgactgaagtttaaaaaaatcctattaaggcacattacagaaaaacttacattaaattattattttaatgcctattaataatttgaaaaaattcaaactgctttccctttcactgtcaatccaaatcaaatatattataagacaataagacatttctcccttggattatcagccactgcatgtcctaaggtcaaagattaccactttcctattttgggttcagtattctacccattgtgggtgtgccgtaaatatgaaattataattatgctaattcatatctgtctaatcaggcatacatgatatatgactcagagtatttaagcatttaggcagtgattaaccataataatagtcccatatgattcttctaattctcaagttttatatgccatcttggctaaccgtttacaaccatcatcatctcctttctcctcctcatcaacatcaactaacttttattgtgtgtgtcactgtacaaagcaccctcagctattttagagagagccagagtctttagacttatttttccatatttattcacacttatcacattttctggtttcacagaagcctagctgctgaaataatttcatttccctctgcctgattgctcaattattttctctttttcctaaattagtttgatttactgtcatatcagcactttgaatggcaagcctcaataatgtaaatcaagcatattcactgcaggatgctattcctagtacctcactgattttctgacacattgtgccttctgtgcaggggagaatggagacggggtttgagagttcagtgctgaccaggatttatgccagggtattttgccaaatatccttgttgaagccagtgctttttcttactctttgatatcttttgtcaccaatttctaggcctttgctatgaccaaccaaattctggtggagaagtcagtgacaggttggaaagaaatagaatatgaagtggttcgagatgctgatgacaattgtgtcactgtctgtaacatggaaaatgttgatgccatgggtgttcacacaggtaggcaaagtatcttcaagaactatagtaatgctttcagttcatgtctttgatggccaaggcagtctttataaagttgttgcctttaaattactatttctagttgacagactagtgataacattttggacaagcatagtattttacagtattgaaaatgttctcacatttaatttgatcttcacacaaaccctgtgaagtaaggcggatattacactgagttaattgaggaagagccaaaggtaagcaatatggtagaaataagatccataaaacttagtgttgagaaataagaagggaggttgagacagtttaaagcagactgagctggtaatcacccagtaaatgagaaaataggcacaataatagaaataagtttttcagaaaagtacactagttagataagagggcaaagatgataacttaggatttaaaagtgctaaatttggggtgtgagcagagctgtcaaaaaagggagttgagaatgtggagatggaatttaagaaataaaatagaaataaataagttgatacaaagacactggaaactgttggcataaaaggggaaattgaagttgtaggcatagacaaagtattcaaggacataggtatagaaagaggagagaatagggttgaactttgaactctgggaaacatttagatttatagggcaggggaaagaggaagtattactgttgaagatagaaggggagaataaagagttaagaggaaaatcaggtagtactgtaccaactaagccaatgcaagaactattttataaaagagctttgtttttggcagtatcaaatgctatgcaagaccaagactgattatttaatttggctcttttggatgtccaagagaacaatttcattgcaaagtcagttctgtgagctctattaaaaggaattacatggtatcaagtggtaagcagaattggcaaactttcaagaagctcattcatgtaaagaatgagagagaagctttgtatggttgtctggcaatgttgggagaagacttccggaggcagtgaagatctgagcgtgtttgaaggcagaagggatggagactaagattgcagatataaggggctatgatgagggaagtgaagatggaaagggatgagatacagaaagccagctgatgagccagtctgagtgataatattcaatgaaaggaagaacttcagaaataatttgagatgaagagcagggaagttgaagtcaatctagtaagtagacgattgaagccttgatagctacttactagatagatgaacttgggaaaggttagagaggtttctaaaagtactgtatcagagtaatatgggcaaaacaggaattgggggaatacctgatatcacatatatatcccaacaaaccctcagactgttctatgtcttgcatcgtgcaagtagatggttaagtcgctgaagttggttatttcaatatgccaccaagtaatgagtgcttcttggatatataggtgactcagttgttgtggctcctgcccagacactctccaatgccgagtttcagatgttgagacgtacttcaatcaatgttgttcgccacttgggcattgtgggtgaatgcaacattcagtttgcccttcatcctacctcaatggaatactgcatcattgaagtgaatgccagactgtcccgaagctctgctctggcctcaaaagccactgggtaagaccagaataattgaccatgggtttgcagattcttttcagatagaaatgaaaaattgacagatagtggaagactgtactgcatttacaaactatgttccctttttctgtatgttagctccaaatcatttatagcaccctgaggacatgattattaatgagcttgttgccagattgaggtaaattatattgctagctggctttgtttgcaggctaatctaaacgaatcaaaatctaggtggctaaagcaggctgtgaaaaatctgcttcctaattgcactttgcagatgttgttaaaagtgcagattaatccttaattttagtcttcagctgttttcttcaggtgtatagccctatagcaaatagttgacagaaaatatagctcacttgactcaagcatgcaatacacattacttttattttatcaaaactccacaagactgaacagtgcggaattttttcacaagtaactgttacaaccaaacaaatacatctgctgtctatgtaacagccactagcaggcatgattggagggaaaggtaatcaaaacctttggtttctaataatatatttagcaccttacacttaaattatggcatttaaatgaacacaatatttacttctttatattttttttacgtagttccacagcactgcgtggagtggtgaaaggcatgttgccctgtacaggagtcacaattctgcattctcacttggttcttctgttgaccgtgtgattttgagcacatcactcattgtctttatcagtttcctcatttgttaggtggaagttgtactaaagaactcatttttaattctatagttctatgaattattttctcaaacagaataacccaaactgacattctggatgaagatagtcaagttctcaaagtgttagttttgtaaggagcccaaagttcaaagataatttggagacagagcaaggacccaaacttgaaatgcctacattttctgaccattatgtactctcttgtactagctaactccactgtattcttaggtacagatatgtatatgtacagatatgtatatattttctcaaaaaatattttgcagattctcatcttagtggaggttaaatacaaataaaggttaaactttatttatcaataaagctatcgattttgggttgaagaggtgaaggttgagcgttgtagcaatgcatgtagtgcacagagagtaaattctcctgtgacctgtgcctctatactttgtatcatgactcctattattccgcaagtggctactaaatattgatgcagaacagagaatcaagtgtcttataccctgaagtagaataataccagaaattttaagaaagaccaatttatgttttggtctgttttcaataattgctcgaagaaaaaaaaataaatttgtcttctttttatagctacccattggcattcattgctgcaaagattgccctaggaatcccacttccagaaattaagaacgtcgtatccgggaagacatcagcctgttttgaacctagcctggattacatggtcaccaagattccccgctgggatcttgaccgttttcatggaacatctagccgaattggtagctctatgaaaagtgtaggagaggtgagtccttggtttattacgcttttcttcttgttctcagttattttgttaaatttgtgacaccattgacagtgttaaagttgcctggataccatcaacacatggacagtgttaaaggtgcaattgacagtgttaaagttgcctgaatattagcatactaatatgctaacagtctctatgtgattgtttacatattacatatgttacatggccattttgctggatttgaaggtcttcctattcaaaaggtgaggccatatatctggctatatagtatagatacacatatgaaaacacattcatatacatataactgagttgtaatatattttataaccaaatcaagaaagtaatatagaatataatatatcaaaaagaccactgaactgagcttaagaattcaactttagtccattcatgcaaattgtggctctaacttcctgagacctcattccccacatctataaaagaagaggctggactagttcatctctcaggatccttccagctctaaaattctaaattgatatgagcatagtagattattaagccctctttaattatactaaaaagttctaagcttttaacatctttagaagattttttagaatgtgctgttatactatttgaaattaaagttagcctttgattattgcatcttcaaagatgcagtgttcttctgtgtgagaggaaagaaaggaattcatatctctgctgagattcactcccttgcctccttccaccaagtcctaatcattttctgcatccagaaggtttgggatagtggagaaaacatgaaacttggaaccagctggacttggatattactcttggcattgccacttattagctacagactctcaggcaagactgagtttcaggatccacacctataaaatagaaataataatacctaccttgcaggattcttataataccccctcttaataaatgtaatccatcattattgttattattaaattagtattcataaatgttgcatggggtagatgagtgctgaagtatgaacaaatctcagtctttctctatcatttgtctatctaccatttatcttagtttatctgtatctcatctctatttctgttgtggccagtgtgggagcttttagtctatgtatctaagttgattagagtacagagcaaaaggctgtttatgacatatttttccatattgttctttatttgtcccataacacagattatagcctaaacccaggccagccatttcagaaatgcatgtcactaatcacagaaaatatagattaaatctgtcaccaatacagggaaaaagaaaaagaaatgctttactggtctatcatattcacacatgaaaggcagaattatttctattttggcttccttaatttgtaagatactaatgaaagattttaaagtagtaacaaatcaacaaattggccttttaaattaaaatgtcttactagttgtaaaacactaaatattagttttttctccattatagttgttttaaatcttatttttcaaatcatactttttagtgtacaaaagaaatagaacgcaaataccatgaaaatctatgttgctagtgtttgcaccaaataaacaactgttatttagtttacatttcatgggaagggtcctttttaaataatgttcaccataaaattggtagttcaaggaacttgagaaaattatgtaatattttcatttggggcttcttatctgagggattttgttgtcaaacaaaaaataaaaggtaggggggagttttgttgtctaacaccttacatttagttcaaaaagtgagcaaacatttcctgagttcttactaaacgcaagacactgggaggatttaaaaaaggaatagattatagataattgagatacattgtctgcagttggtaaattcagaatacctaaactgacccgaatagacaatgaattattaatctctggtaaatattaaaagatagtacttatatatagatgctatgagaatatagtagaatagggttgaggaagcccattatagtcattccactggaaaatgtgaaatagtcactcaaggaaggtgcattttaatagtatagggcaaatgtggtgggaggacgacttgagcccagggggtccagtctgtagtgagccctatagtgccgctacactccagcctgggtaacagagtgagaacctgtttcaaaaagcaaaaatatatagagagagtattgaaaagcacaatttttgagcaaacatttatagatacatattcctttgttatacacgttttttttttaattgaatggatcccatgtaccattatatagattgtgcttaagaataataaaaatatatggagagttacttatagaactaatttcagataaattttaaatatgtaatacttcaaattttcttaaatatacccaaaatatttccttaattttacagaacaataaaatgtctgatttctggcagtcttttccatgcccaggctagacaatctataaacatattgtctaactcttcaagataccactatgacttgcaaattgcatatctgaattgcattaacaggttgtttattcctgctcttgtaaattttcccttatttctaattaaatttggaacagtgtgaaaaggttatctgtttggctttagtgatcattgaatatgtatcttgtcacataattgacatgaagatttcctaaactgacattagtggtaatttgagtctatttgaggaatcacaaaagtttactgaaaatagcattatgactgctattattttaaattggagaccaaaaatgcatagcaatctattattctatgaaaagattcaaacaatgtttatccagcgaaaataactgggtaggttgcaagatcaatttaagtttagttctgacatgcaacttgtccaaactaaatcaccacataatttttctaattgattagtgtatgatgagctgtaaagattgtggaaagacacattgaatttgtcacagaaagtttagtctcctcctacgttcaaaatcataatcatcagtatttgttatgactctcaaggttctattaatattaatgcttagctgtaaggaaagccaacctgtcttgaatactgactgatactcatttacaaatagtttctgtttcagtgttaatatatttctggtttctttttatttgccttccattctaaagaacatgcgcataaagcaagatcttactaagaaaaggtctctatgcttcaaccttgaatttcttattttaatactatggtccagagcaggtacaggtgatttcctcatcaatctcagcaaatacagctgaactccctgagtggtaaaagactgacctaatgaagatgcattataccaaaaccatggagaaagtgagagaggaagaaaaaaaggaacacctttttttttttttaatttgagaggctttatgatatattttttgttcttatttgttttataaaatatattttacgtccagttcagttacaaattaaagatacataagctctttctttcaatatgaggtcttaaacatgtattacaggtcatggctattggtcgtacctttgaggagagtttccagaaagctttacggatgtgccacccatctatagaaggtttcactccccgtctcccaatgaacaaagaatggccatctaatttagatcttagaaaagagttgtctgaaccaagcagcacgcgtatctatgccattgccaaggtaagatgttacaaggggcccacagctactagttgcttttccagaatgtagtcagtctggacattaaaataaaactgaatcacaaagtggttttaaatcagggatttttggaaaatttttaattcttttatagtattaaactggaaacatctatagatttcattagagtcttttacaattaatgataaattatcatttttatttgactttaagcctggatttaagggcaaattgcagttttaaaggatgattaaatagataaaatgtccccctttttaagtatacttagtactaatactcaagtagatttgactatattgacttgtcctttactattaactttattacatgttccttgaatgtgtaaaattgtattgtagaaaggaaggtgcatacaataatgtcccttagtatgtgccacttgagtctagaataatcttaatttatttgcttctctttctgtgtttaaaaaacagcaacagactataaaggcccacatgattatagggttttccatgtaattattttattggtcttactttcaggaaaaaaggccctacatttctcacttccctccactacttgcttctcatgcaaattaaatgccatgttaatctacttttatatttactgtgcttagagttttgaagtttcagctcatctgattttataaaaggtgacttgggcagctggaatctgtctggtcagaaatccctgaaaggctttttgacatttaaggaagcacaagcgttaatcctccaacagtatcaaaccgcactggttctacaaagctctactgaccattttatgtttgtgtgtgtgtatgtgtgtgcatgtgggatgagtcggtgaaaacatgaactttctctttaaaaggattcccgtctttgtaatttgcctgtgtagaaacagaaaaatgttgttagtgattttgaactcatcgcaacttttatgtccatattttgagtccttaagagacctgaaggagaggaagggatatttccttaattgcatccaatgtatattctcctcgctcttatggtttctaaatggaaaatatttaagccctactgaaattctgggagttgctattatctcttgatggacattttcccatgttgagtttcaaggtaattagaatttttctctggcggtggcgggtgggatagcagtgataagaagttattttagaaagccatttcaccttcatcatttattatccctatttcagtcttttatttaagaagcagctcatgacattcatatgtgtgtgtgtgtgtgtatatatatatataaaatttttttctcaggcaaaggacagtaaatagattttttccttaagtctagcaatcatgtttctgccactttgaaggagatgaaaaaggcaagcatttccaagttcccagctaagctgtaaaactcaagcaaatctctcattcttttctaacagacttataaaagatgagaatctgggaaaaatgtgtggaggttctttctttcacagggtaccctatgtatgagcaagaagtgcaggggctgcgtgtaaattattgcctgctcgagtgctgggagaaggaactgatttctgtttgttagaggtcatcattactgttcatttcaacagcagccgggaacttggtgattttgacagagagtgtaaggacggtggagggctgaaggggaaaaagaatgaagggagtgtgtaaatctttgcttgctttcatgagtcttagaaagagcaacttgctctgaggtctgatttttacagcagtcttatttcaggatgactggatcatcacctcttttgatttggggagaatgcggggcattatttttgatttttggaacattaaagtaacctcaaacttgtttgggggtcattatagacttcattacagtgatgttacatagcaaagctgcagtgcttggagatgaggtcttaagactggcaggatcttgcttgctgttgagaaatcatggatttttttttttatccagtctatcattgatgggcgtttgggttggttccaagtctttggtattacgaatagtgctgcaataaacatacgtgtgcatgtgtctctatagtagaatgatttataatcctttgggtatatacccagtaatgggattgctgggtcaaatggtatttctggatctagatccttgaggaaatgccacactgtctttcacagtggttgaactaatttacactcccaccagctgtgtaaaagtattcctatttctcagcatcctctccaggatctgttgtttcctgaatttttaatgacagccattctaactagcatgagatggtatctcattgtggttttgatttgcatttctctaatgaccagtgatgatgagcttttaaatgtggcacatatacaccatggaatactatgcagccataaaaaaggatgaattcatgtcctttgcagggacatggatgaagctggaaaccatcattctcagcaaactaacacaggaacagaaaaccaagtaccacatgttctcactcataagtgggagtggaacaatgagaacatatgagcacagggaggggaacatttcacaccggggcctgtcggggggtggggaggtaggggatgcatagcactaggagaaatacctaatgtagatgacaggttgatgggtgcagcaaaccatcatggcccgtgtatacctatgtaacaaacctgcacgtcctgcacatgtatcccagaacttaaagtatatatatatatataaaagaaagaaatcatggatttgactgtagtcctttccttccttccagtgaaatgactacaggattctaggccctccctcactgtatgtgcttgtgtgaaaacctcctttgatctcttaaaagtttcagtaacttaaggttctctccacctcacagtgtagatggccgacagctaattgtgcctttaatcacttagaaagtaagacagaatattaagtctttgggaacctgactgtaattacagggagaattaaacaaaagaaacatacattgactaggaaatgaacatggctttgagtatttctgttaaatgtcatcttactctagtcaacaaaattatgagccatgccatatctcaacaattataatcatggtctctctgatactatcattatgtaaaagctttaagaaaagtaagctccctgggctgaaatataccagcagagttactagttgcatatatttcttaatgggtcttaaaaacgcagtgtgttattctaaaatatgttgttctggaatattttcagatttttcacagggtatatacacgtacacatacacacatacaagaataagagtagacatctttttgtataaagattttggttttgagagtttatctcttttttcagttaaattttctactcagcttaatgacccatagttgtagttttacttttgagaaattgataaagtaagcttgaggaagaggctgagctgcctatcagaacagaagttattactacattgttttggaatatattaggattttaaaaaatgcctgccttagcacaaaaatcatagtgactgattcaaaacaattttttatttgaagtcctctgtgaggaaatattctggaggaataaagccaagccagatccgacccataaattctcactgactattgtatgtttgtgtgaatgtggagtgaggtgataaaaatatgctatctcctacaagataactatcaacactacaagttaagagatcattatattaattctagattttcttaccaatttggcttaactgtagtttcaagagactttctttaattccaaagagatgtaccaaatttagggtataatgggtaacacaatcaaataaagaggagcgagtcaaaacctgttaggagatttttctgagaacacaccactcaaggcaagcacctactctgtatgccatttgtggatatagttggcaccatctttatgtttattggaaggaatgtcagtgatgtcagtttcatgttttgtaactcagtctacagtctcgggctctctaaataacacacagaggcatgactgctatgtattttaaaccaaataagacatttagaaaaatgtttgccaaagaaagtatctcttctcctcttggcaggccattgatgacaacatgtcccttgatgagattgagaagctcacatacattgacaagtggtttttgtataagatgcgtgatattttaaacatggaaaagacactgaaaggcctcaacaggtaaggcagtgctgctctcattcatgccagacaccttcagtgcaatttttaaagagtcttcttcctactcttaagcatttggtctacattgtgattcaatgaggtagatagtgccattgttggaaaatagtacccgtagccagaagacaaatggcaggtttttttttttttagatgtttacctttagaaatgtatccattaatctttttaatcatcttctattcccacccttgtcatcagacatagtaataaggtcttttgaatgcacaaaattggtatacattgatgaacgtgtattatttaattatgaagtattatctagatttaaattttattaatcaattaaatgaatatttgttttctataaattttcctctacattctgaagtctgttttccccttttaatatcaatctatacattgctgtatattgaggagaaaatgcattccttttgcgctctactgtttttaaattgggacattcagttcagcatacaattaagccacattcaggtttctcttaacagactcttcacctctgactaatttacatttttatctccatcatggccaattatttttaaacttcattttatgttgagaatattttgataatgtagtccttaaaatctacttttaaatttttcatgggaaactgctggggcaccttaggctgatgaaagcatggatcagttttaaacatctatcttcaataagaggagcatttattagcagattaagaaagacaatatagtcctcttgaacttcttccctctgaaagcactctgaaatacactactattggaaagacgtcttacctgcaaactagggatgtgtttagagaaggaaaaattttgtttgtataaaaattgttctcaaatgatttgacaaaatgtagatactttaatcacttaaaatatctttgaggacagtggaaaatctcaaaacctggattgctcaactatttagcaattgcaacatatacttgggttactgtatttgcctgatcaatatgtgtacaaactaggtaataaaacacttgcttttctttttgagaaaaattaggttctttttcatctatttaattattgcccatgtcaaatgcttggttttgaaaactgaggaattctatctgacaaagatgaaaccagctatagttgcttgtaaatcatcctttctagtgatcacataaaatgaacagtagacagcaaataatttaggaattgaacctatacatttatcttataattttgctgacttaagtttccctttcttggtttatgatgccagcagaacttctgtgtaaaattatagtctgttctactgttctcagtttcaggcaactgatttcaaatgcctatgaaaccactccaattaagccacatgggggtgctagaaacttatagtatgccagtcacagcagtggaaaagacctggggtggaaaatagcagatgttattgtgatttaaatttccacttgacatacgttctgatttttggacaaattcaatgttttaattgaatagttttcgttacaaccagaaggcaggttgagattctaactaagcataaataagggtatattgatagtgaaaaaggtccttggaggattaaaacaacacactgttacagatcatttataatatttttctgacttccacattctgttgcatttatttgccgacaatttgacattttcaatctccattttctggcataaatatatttgtaaatagggatattttctattgttcataatgatctacatttaaaactctttatgtaaagctttatatcatttcaaaaatttcaaaaacttacacttaaaatcatctctactgtataaatttgtttttgatccagggaggttgaagtgtctattatatagcaaaagctaaagtaaacctgaagtggaactcacagatgatccacggcgttagcaaacctaaaccctgaactcattatctgagtgtcactttatggtttaattcctttctttttgaagtgtcattgatgcacgcatagcaatttgataatgattgttatttagcggtattagataaataacaagaatagatggccactaaagctacctgtctccatcattttgtggcacataggggtctgaagttgaaagaatacgacagctgatggaatgaatgttaagtatgtaaggccttgagtttccttgccctattttaattatactcaccattagtctgggtctgagtcctctgctttttctcggcccctcaatatccagggaggcttagtcatcaaggtacgtactgctccaacagtaacaagagctccctattaatgacctatagctgacttacatattgcgagtttggagagaggctgagaagattagttgttctttttcatttgtatttatttatggtttactttgaagatctcaactgcttctgtgttagaatggctgtctttagctgtaggcctaggagctagcgatttatttggtgtgcgttcagagaactccaaaattctcctgcctcaacatctatctctgctgccaatgtaccgcactccctttgtacttttcatagagatccttgagaagacaggcagtggggctctcacttgggaaaagagaagtaaattaagagaaaaaatatagaatgctagacgtgggttttctggttccacccttgtgcattggaaggagcagactatggagccagagattggtgcgcagtcctccccactgtagaatcagacgtacatcacctctttcatttctccagattcatgttctttctcttaatctctgcttctagtttttttgtgaagcttaatttatataagtataaatgacatctgacatattgtgagggcccaagaaaatttttcctcttttcccctgaaaataaaaatgctacttgttgtaataaaggttactttatgattttagatatgtattatatattatgattttagatatgtagatatgatagttaaatatttaaagattcattttcagactcacaatttttatttgcttttatattttgcaatgtatcatttcttaatttcctttatgatgcatcacttattttaatatcagacctattttttaaaggaagcaattgatagctacgatgcaaatgctattcttattaaaagataaatagctttcccttatgctaatgaataaaaattcctactctacagttgttaatcaatctcgagttctaaagtccgataaacacatttaatagcagaggatgagcatatcattaaattgatggtcagtctctgacttgtgtttacatatagtcatctgaaatgaagttcagaatttgagtcccaaatagactatacccacgcatggacacagggaggggaacatcacacaccggggcctgttggggggtggggggctaagggagggatagcattaggaaaaatacctaatgtagatgacgggttgatgggtgcaacaaatcaccatggcacgtgtatacctatgtaacaagcctgcatgttctgtacatgtatcccagaacttaaagtataatataaaaaaagaaatataaaaacaagaacatagtttatgtttgaaatgtaaacaataaatgtgcttatttatgcaatagcttcaaacaatatattttaagataaaatacaatggaaattattaaaaaagatatactcacatatttagtatatataaatattcacagactgagatggggaaaacaaaacaatgattgtaactaggtagatattatggaaataactgatgagttttccatgcctgtgagatagtagaaattataatcagaaacccttctctttgaaggggagagataaacatgtttcatgttcatgattacgtatgaagtctcatctttctgcagggtgatgagacaagagggataggtgtattaggccattcttgcattgctatgaagaaatatctgagactgggtagtttatgaagaggtttaattggctcacagttctgtaaacttcacaggaagtgtggtgctagcatctgcttggcttctagggaggcctcagaaatcttacaatcatggcggaaggcaaaaggaaagcagccgtgtcctatggaaaaagcaggagccagccagagagagggagtcggtgggggaggtgccacatactttcagacaaccagattatgcaagaattcactcactattgccaggagagcaccagggggttggtgctacatcattcatgagaaatctgctcccattatccagtcacctcccaccagtccccatctccaacactggggattaaatatcaatctgagatttgggcagggacaaacataaaaactatatcaacaggtatcagaataatcaactcagcatcctagctttgagtgcttgccccctcagaactcagtatgctgtctctaatacctgaatatagtagcaatggcaaccctcacaagacttctgaagcaatatctattcttaccagcttaggtaataaccattatttagacagcttcagccaaaaaaagatctctttcctgtttacgctcactgactttctccttttccacttaaactgcttattgctacccaagggcatggtagggaagctgactgttctaggcagttccccaaatttataggctggtgtagtagcattaactgacctagggtgataacatatttacagtggatttctttaggatttgagaagtttctttttactcagtacgatataagttgtgtcatgtaggattcgaatacttgttatgtgtatgctttggaatttagatgtttaatggtcaccaaaggtcttttaacttcacattgtcagatcaccctgcaaggagtttgaggaaaatgaagtctatataaatttttagtggaaccacaacatgtgcataatctctgtccattagctttcactgctaagctattgatattttagtctatttttcccatactcactctcccaatgccgacgctttcacatattgtgctcttcccatgtagtattttaataaataccaaaagaaaaatatccttactccgatctgtaagaaattataaaaatctcacctatagttcttttttccattagtgcatagattcaattttggtcatgtaaagatctcctgcctggagagaggaaatgcaggtaccataaatcaaataaagatgtcaaatgtcttcaccaactaggttcttctgatatagcctattccttattgtaaccaaataatgaatttataactcttaatactgaaacttgaattttgattcagtttaataattctgaatgccttccaagggtaagataataatcacaaaaatttttggactacatattaagcactgttctaagcacattattttgtttaattcctaacacaacattaagaaatcagtgattgtcctaattttattgatagtaaactgaggcactgagagattcagcagtttcctctacatcacatactaataaataacagaattgggatcaagtctaagcaggactccagaacccaggatacttgctatttaaccccttatatttgatatataattatattcttatatactttttactttagtaaaaagtaaacattgtttttatgtacaatgttgctatttatgtgagcaatattgtggatgaagcttagaaagaatacttacatgtaagtatatacctacatacttaaatatcaaatataatatatttatatttgtgtataccatagatgactgcttaaaaataatacatatatgtgtatgcttatatacttacatatcaagtatatggtatgtaagtgtgcatgtaaatatattaaatatatgtaaacataagcatatatatacacacacagaaacaggtttgcttggggtatagaaacagatttgtttagaggtgtagataacatctagaggaaataagaagtaagactacctaaaatagacagcttcagtttagaaacagtagccaataaaggggtgatagtcctatcatggtagaatcagcatatataatgaaggtttctactatattattaataaacaagcacaggtacaaatatccttcagttggactccccttgctataagtatgtaaggaattcaactataatagaacttgtgagaaagaactatttcaggactttacacccccaagcattattatttataataccaatttggattggcaattttatattgaaagacaatcatgatacttaaaaaaaaaaaaaagacacatgaacaggcaagaaaaaaaaagtgagagtacaattaccagctttaagcatctgcttatccctctggctgtaactgtttttaatttttttatttccttattttgtttttttggtttctttagctatttctgactgacatatccagcttggagattttattatacctgcctaaattgtataatttcgctcttttactggctaaaactaagctgaattaagttttgaatccttgcttcaagtgattatcttaaagaagatggccagcctctgcttttgctataccatgttaaatcatcaaagtgaaggttttctaccatttatgatgattgcttgttcttgtgcattccattcattttgggcaattttccttcaatggtccattttgctctcttgtttttatgtacaatgccgctatttatgttagcaatgttgtagatgactacttaaaaagaatctattttcattcattttacacgttcaaaagtaggagatataaccattgtgatacaatttataccatacgagtattggaagctaaaatttgtatttgtttccctattgttgacataaactttactatggatttatttacaaattatccagatattgcttttgtctaatattctgtaggtttcatgtggtttttttttgctatcttcactctaataactttaatattctctttcctctttactgcttatagtcaatatagttttaaaaaaaagagtaaagtgcacttttcaagggtccaatttccatccgaaatcactatgttcaatgtgataaactatgtccattggtgagtggtgaaaaatcataggcgtgcctattgcttaggaaaacaatctaggacaaccctggtgagttccacttgggcattcaagtgctaaattgagctcagtaaagttggccatttccctgcagccacaaacttctggcagatgtaataatgcaggtgtcacgttagctggaacactccctttgaatgtcctctcctacacatgctaacttctattgactttttatttaacttgctcatgaggcatggcaaaaatcaggcaagaacgttttgtgcttatgcttgattgaagtttctgggggaaaagtgtcacctaagagttgttggaacttagatataagaaacagaagggtcagtactttactttctgatgacaatgtatattttctggtagaaaaaaatcaacaactttcatcttaaactactaaatatacaagtaatttaaagaaagataatataacatataatcacattataatttttgtgatactttactatgacatgtttttgtgatagcatctattattttggatatagaaatgagaatggagatgattgaacactttagtggaacccattaatttgatttgcagaaaatggtcttatgtcttctcatattactactaactcacacgatattctaagcctcagtttcaccctagtaaaaacaaaacaaaaagaaacaacacaaactcccttcttattttactggtcagtcatgcagctagctgaatatatactatatgtgaagtaacaaactttaaagaaaaacagtcttaccagttattacatattaccattctatgctttcagtcttcatactccaagccatttatataatgaacctcttcaggtgtactaaaaaatggggcttatatatacaagtacttatttctttgtaagagaagagtaataccatgggaaattttataactctgtgaactaatgccaaaaatacattttatttttaatttgcttttatgttccatgtaataaaaggatattttaggtgatgtcataggtttgataggactccactaatttttaaagtaataatttattgagatagatataaaattttacatcaaatatttaatgttctgagagtcttcatttgttatttaaatagtgttttcatagttttggcaaatgattgtgcatttttgaatttgtgagagagtacttccgagtctggcatggacaagatgaatgttttgcttaaaaggttttcagagtaatattcagatgactcataaagtgcctattatgtttctgtatattaattattgtatgtttgctagttcataagaatatacaacttaaaaattttaagttgatttaaaataacacatactcagaatatgtgtatatatatctataaatagtcaataattaatacattattcctgtgttaatgtctctgaactaagcgtgatgggatatatatttacttgatggcatttctttttattaggagctggtattagaccaaatggtatttgttcttctattcagtcattatgtattgggtacctactatgtgtaaggttttgtgctagttccaaagccatttgttgatgaataatcactagttattagaccaaatggtatttgttcttctattcagtcattatttattgggtatctactatgtgtaaggctttgtgctagttccaaagccatttgttgatgaataatcaccagtcattgaatctataatataggtttataacctatacaaagagctatatatagacaggacacattaatggacatgtgagaagcagaaatatgaattcatgaaagtttagtggaggttagaaacaaaagctcttagctaactttacacatgttatctcatacaagtctcgatgtacagtttttaggaggtatgtgtctctatcccatattttatgaaagaaatgatgactcagaatgtttaagtaaattctccttactccatattggagccaggttttgagttcagaaatctctcagtccaaggacaatattctttccttcaatatatcccactgtcatgggagccaaaggaagaaggaagagagaatttaaaataaatgaaatagaaagacactttcaagaggattgcatggtttagagagagaagagagaaacagaattaagtcctcatttgatgttgggtaggtaggagtggaagctaggctataaggtccaaacacatagtgagaaacaggtaggtaaaggtatgaattctactcaggaactgacaaattgtgtttgctctttatcctatttatgctatttttcataacagtgaaaatctgactatgaagaaattaagatagtataagaagaaaaactaaagtggatattagctacctgtttgttcattgggtgaaatagttgacgccacacagtcttacttcattgttccgtaaatattgcatatatcctaatatcatcccccaattaaattgtgattttcattagggaaagtatccaataccataatgtcttaatatgtttttattataggtctttcttagcaaaaaattgtgttaatttgtatgaatgcagaatagagttcactgtggcataaggtataagtcataatttctgaaacagatacaaatggtttccaattctttatttaccatatattttcttgggaattgatatatggtgctttgtataaacactcaacaatatttgtatgataatataacaaataaactttcttggtagaaagtgaaaatcatcatttcttagtgatggcaaaggagggggaattgtagtggagcaaaatgcatatgattcctggttgttcaaagggattgaattcacaaaattcacaaaattattaattagaaaatacatagcccaagatataaactgactgtgttgggaaatattgtaaaccaacatctctaggttttaatttcttaaagtagttatgtatctactaattagctaggaaggctctgaataaactgttttttaataaaaagagatttatctaattgttttatattgtcaaagattatatacatgtaggcagtataggtatatcgtgaaatctctaactcctggtgagaactaaccagtgtttgtgtattcttgatcttcaaaaattattcacgttttcaaatttttgcattttctgagaagtttttgtgagaaatattcacagacattttcaactatatgaagggatatgattttattaaccagtgaagaaggttaaggcaaaaataaatacttatttaaaatacaggcatctactgtatatctccggtgaccttaaagtacatttctattataataaaggtgaaaaatatcactatcctatttttatggatggtgaaactgaatcacacgaggtgtgtgtcatactttatgtcacaccaatcagaggaaaacaaggaatctagcccagggctcccactttcagttttagtcactaacccttttcaaaagcttcttttgcgagatatgacttttaaatcagacagctggagatcagttcctgcttagcggtcaagttgtgagccacctgcattgttgaccccacttagagaggagacattgtgaggaatttgcccttttccaaaactcttgggggaaaacacaggaagtctggcagggagaaagccccagcaagtcacctttgaaaaatgtaaacaggattttcaagggtacaaagacccaggataataattttctttttaagttttgctttatttataataaaagatttgtatatatttatacacaatatatgtctataggtatcttttctttaaagtacaaataccttgccttccatgtttagggaggtgtgagtaaaacaactcttgagcgtagaatggaattaaatttacgcaaaataggctgccagagctataattacagaagctagataattagttgctgaccccagaatttcttcagctgctaatttatacttgagatgcctttatggggcataaagcctttgagtctgaccttaggatagagtcatgcacttcgtatccaaagactataaggcagcgaccatgcctcctaacagtggagtaaatacccgagagcactctctctctagaagatcaattttgacttgcagggagtcgtaagtatggtggccctcaccacctcaaagtgtgagtacagaaatactacacaggagaggaaagaaaacaaagggagctgaggtgctgggccaaatgtaggtgacttgctagttttgctcttctaaacttctcctcctgcttcttctcttctttctcttcctctttctcctccctgttggtctggttctttcccttcctccttttcctccagcaattgtatctattaagcacttattaccttcttggtgttgtgctgaacacttgccacatttattattttatctggctgatgagtctttttctcaggatggtggagcatgactacaggttttgggcaaaggtatttgcctatctaaggttgaagtaggtattttgacaccatttgcctatataactataatgatgataatgtaatggccatcacagcaatatccacctggcagtattaaattgcagttacttcttctacccctccccttctacccactcttcagctgataaactgacaagtatacagttgtagtgtcaagtggatggtaatttttgctttcatggattttaatgtgcattttctatgtcttcttatgaaaaaccccagataataaagatatctgctttccatgtaggtagtaagcctcatatcaacatagactgaatatgacatgtcaccaggaatttaattctagcattttcccacatcctcctaaaaataacttctccttttcctcctttctaaaaatggcttacattttttccttcaagaactagaaaaatgtagtcaaaaattattcttatatatcttacatttttctaggaaaaaaataagcagtagttattagtagataggcttctgttaagtttttaggaggctgagacaggcagatcacaaggtcaggagtttgagaccagcctggccaacatagtgaaatactgtctctactaaaaatacaaaaattagctgggcgtggtggcaggcgcctgcagttccagctacttcggagactgaggcaggagaatcgcctgaactggggaggtggaggttgcagtgagccaagatcacgccactgcacttcagcctgggcaacagagtgagactctatctcaaaaaaaaaaaaagttatttattttaacaaggctctaagtaattctttctagaagtcaaagaaagatatattgaaatatatttatatatttgttgcttggtacaacctaagtgatgtttggaaaactgctctgtggaaacatgatgatttaaacaaagatgatggagatgttttaaaatataggagtttcaaataaatttatttgcaataacaaattgtaaaacatcaaagagtgcccattcaatccctattttctatgaggccttataaagtgtttcttcttatctgttagatttaaattctgtacacataaaaatcttatattcaggggaaaatccagagttttgcttactgaatacatcttctttattttggggaaggcatacattgaatagatttaaaattataaataaatgtattcatcagaaataacagaagcaacatttcatagtatggacttaacccgttaatccaattggctcaagcaaaagctatttgattggtatcagcatcctttttttttctttttttttgagacggagtctcgctctgtcgcccaggctggagtgcagtggcgcgatctcggctcactgcaaggtccgcctcccgggttcacgccattctcctgcctcagcctcccgagtagctcggactacaggcgcctgccaccacgcccagctaatttttttgtatttttagtagagacggggtttcaccgtgttagccaggacggtcttgatctcctgacctcgtgatccgcccgcctcggcctctcaaagtgctgggattacaggcgtgagccaccgcgcccagccagaacactttcttatatacgaattgacataacttactactttggttaggcagtttccatttgtttttcatcttggtaaagacgaatggtaaaattcaaatttggtaaaatcaagggcagagagagagtcattgcatcttaaattaagaaccatgggccgggctcggtggctcacgcctgtgatcccagcactttgggaggctgaggcgggcagatcatgaggtcaggagatcgagaccatcctggctaacacggtgaaaccccgactctaataaaaatacaaaaaaaaaattaaattaaaaaaataaaattagccgggcgtggtggcaggcgcctgtagtcccagctactcgagaggctgaggcaggagaatggtgtgaacctgggaggcggagtttgcagtgagccgagatcctgccactgcactccagcctgggagagagagcgagactatgtctcaaaaaacaaaaaaacaaaacaaaaaaaaaaaacaaaaccatgaaaaaacaaaatgtggtttattatggctcaaaaattgcaattaacctacattaagcgtttttcttcatcattattccttgtattcatagagcataattatgacattatattcaatactaaatgagtggctttaccagattaagagtaatatcatgatatttctggattattagggtcattaaagattagcaaaaaagaacaggaaattcagaaaattaaaacttgcctatttaaagatatctacattatcagtttctcataaggtttcctttttaatgttgattttactgttattattactagcctttaaggtgaaatatagttttaagtatgccattttttgaaaactattacttgtaacattttagcattattgtgatagaatctgggtccacttagcactattagataattttcttgatgccatactgtcacgtgaacattggatctaggtattatttgctctgtacaagaaatataaagattcaagtcttcttaaattccttcaaagacctcattcctgtatagaaacagccatggtactcaaaaattaagacaaaatagtagtgcctacccaattgcctgggtttttatactttgcttttctaaatgccacttctatttttgaaaattgtcttttgcatttctcgtaaggaaacacatagcaacttgtctccttgaatgaagagaggtgacaaataatttctccactgatggcattattgtgattgtggcatggtcttgaacccgtgaaacgccaaaaataataagtgaagcagtaaaaaactcaagagagaggctagtgagggttcatgagtcagagaacatatatcttactcaattctcttattaaagcagatgtcattactgaacgtcaggcttagtttttttctgccttttggagtgttttttttttttttttaaagaggataataataaaattgcaaacccattccataattgtaggccaggtggagtgctcattttcacattagagcttgtgcaatctggagggaaatttggtttagtattactcgtgagttggtggatcagatgaaagccagtcaagtggaagagaggactgtgtgaagtgcgctggctcccctgataattagaatgctgcaggcgttcctccagtcagctaatagatttccccagctcctctgtgccaggtgaaaatttcctcattaaggggaatttattccatttccttttatcatttattattgaagactaagtgtgagtggaggaaatttcagagatgacagggaggaattttaaacaacaacaacaatatctacattggaagtcttagagaatgaggagaaaggcttgtattgtttgtaaaccagagaacacaccagagactttttgctatagaagccgagccatgctgtctcaccattaaaagattatggcagagtgtgtaaaagtctgatggtctggttttaagacatttttttcaccttctaaaatttcagtcattttgtgctgctaagtagaaagaaactgaagattatgaaaaggccagcatcacagccatttggtgtgttgttttattgtatagattctattatgcaatgatgaaagtctaaccttttgtaaagtttgcccttgaactctcaaagcaaggcaaactggcacgggaaagaatagttgtatatataatagcatattttagaggacacagttctgaaatatggatttaatgtgtatatgttcaaaagagtaaaaattaacataaaatactagtacatacaaatatatatcaaagaacagaaggataatttattatgcatattttaaaattgtgtgcttttgtgcaatatgctttcttcagctgatcacatttctagctgggcataaagctgtcttgatttacaacataatataaatggagtattccctattgaggtttcaaaaagcagtgttgaattataaattcagtatttatatttcttttagtaattattctgttttgagtttgtttcaaattaaggtttttattttccttcagaaaaataaaaatgttatagccttgttttgaaaataagcttttacctagtttgatcaaaaaaacaaaaacaaaaacccaccatgatggaaattggttttggcaaacaaaatggagggagcataatgtgggcagataaagatgaggaacatctatctgagtctccacattgttaaatgagctttatgtttgcttaagattatgcatcttgtatttatttgactctgaggagatttaacctgatctaaatcactgccccacaactaatgaattgtgtctttgaactgtctttttttttctttgattataatgggacacacaatacaattttgtatcagaataagctgggactaaagtcaattttctactgtgtataatgacatctcagccagcctggtgttacaccaaagagagaaaacagaggagaggaaaggtgaggacaatacagagaattgacctgcttccattaggagtaccttgtggaattaggcagcactgactgtgggaagggatctaacttgcctgtgcctctctaatggccctggtgggtcagtatcaacaatgatttctcagtgaggaggattgctaagtgttttgcactatttcatgatcatgtctaaagagcagaaataaccagagagaccatgaacaaaatactatagaaattacattactttggacatccaatgatcacacatacccaatatctgtattcaagttaaggtagatgaacatgaatgtactaatataccatttcaatttaatacattctaatttttaagacatttaaaaatattgtattctgttattgatctagttatttgaaaattgggcagaagttgaagcagtttttggctcaccaagaaaatgtcctaagaatcaactagtgagattaaaatatgcaaggtgcaggtctagcttgatacatctgtttcaaaattctcacctagtatgatttaaagggatgcctatgtagaaagttttcactcccattctgaagtatcattcacaatcattattttgtgttactgttgctcttctcagacattttctttaaattatgaaaactctctggtgtgggaaatgctatgggcaggggagcagtaacagttgagttagtcttagtgacagatggcttttttttttcgtcaccagagctgagtacaaaattaactcacttcactttttaatgcacaaggccaattcttatcaatcaacctttttcttttctctcttctttctcgttctcccttctttcttattatttttatttctttgctgataagtgttcagttttattagtaggtagaggcagaagactttgtatatttgctagagatgtctacatacattctgttagactcttgtggtgaaaaagaacaagagaaattatgcatattccagaaatgaaaatactacattcctgaatgaaaatactgcattgctgaatgtagacgacacaaatgcaaatttattgcatccctaatagaaatgtgaggaatctaattttttcttatttaataccattatttataattttcattttaaacaacatagcgacctttgaaaacctgactggtattccatgtaagaaggaatgcaaacaaataattaaagaccctctaaaaattgcaacaacaaacaaatagaaaaacctgactgaaaaagctaaagataactacatgacttctgcttatcttagcatttgaagaacccgcacttatggtgctgccgtgttagcccatggtcacaattatagatgtgatggttcttttcaaggcatgtgttttaagtgtatctggatgactgttcttcagagttaggattttagtcatttaagtaaaagtggttattgttctaatttagaaaaatcgcttatttgtcaagcacttccaccgaaaggctgagtgcatacttgcacataaacaaatgagcaattggtttgggagcatattcttggcaaggaaagtggaaacatacctttctaaaacaaataacaacaataacaaaaaaaaatcttcgccaggcgcggtggctcacgcctgtaatcccagcactttgggaggccgaggcaggcggatcacaaggtcaggagatcaagaccatcctggctaagacggtgaaactccgtctctactaaaaatacaaaaaattagccaggcgtgatggcggacacctgtcgtcccagctactcgggaggctgaggcagcagaatggtgtgagcccgggaggcggagcttgcagtgagccgagatcttgctactgcacttcagcctgggcgacagagcgagactccgtctcaaaagaaaaaaaaaatgtttcctctactttcaaaattaatttctctctctctctctttttcttgaaagtaaaagtaaccacaaactttggtgtttccaaggctctctgaagctctaaagtcacctctggggtaaagcctttccagacttctccattggcagctggggtcccctgccctgagccacggcttcaacttgtgcacacttctcccacagcacctctcatgatgtagacatatcattggctatttgtgcttcctaacatactctgacctcctaaatgtaagagtacaatatttcatcttccatcattaatacaggcaggacaggtctgatacagagcacgtactcactaaatgttaaagcagtaatgacaatgaatgtggctaccctcaccatccagtttcctcagtatgtttcccatacgtgccatgtccactgctgctctcaaacaatagccaatactgttgccattgcctattgtacacctgtcaactcctttatctacataaagttgaactttgttttttcttttttgaggtggagtctccgttgtctgagctggagtgcagtggcgtgatctcggctcactgcaacccccacctcctgggttcaagtgattctcttgtctcagcctcttgagtagctgggattacaggcacctgccactatgcccagctagctttttgtattttttgtagagacggggtttcaccatgttggccaggctggtctcaaactcctgacctcgtgattcaccctcctcagcctcccgaagtgctggtattacaggtgtgagccaccacacccggccaagttgaactttatttatagctctgttctcatccctccactgctgtagtgtttctcaagtacaacctttcacactattatctttctctggcctcacgtagcaccacatagcttatccctccataaagtgttttgaatcactatcatttcattgtctcaaatattgtttccttatcttctggggcagcactgttcagtagaaatttctgtgatgatgaaatattctgtaatctgcactgtctgacactggagccactgaccatgtgtggctgttgagcacttgaaacctggctttggtgactgtagctctaaatttttggtcttaaaagatttaattagtttttcaatttaaataaccacatgtggctaggggctgctatgttggatggcacagttctaaagcacagggcttggcacacatactaagtcagcaataatacttaatattggattgcattcaagaatttgacaggaaaatgcattgctctgagagaatgcttatcaaatacttgggaaaactaaattcaaaataagaataaaaagagaagaaattaaattcaatgggagatttaacacactgatttgagacagaagagaatttaggtgcaatagaaaaagcaaattgactaggaagagctgtagctgcaaaaatttaaactaatactgacactggaaatccagggaaatagccattatatacaccagcttgattttttcttctccaaactcagaatatgaattaattaaagcagattcatgattagaatgaacaaaatgcaatagatttaatccaattacattttattaacagcatttcatgaaaatgttttcttaaggcaagttagatcttctggcaatacactattttaatttcattgtattgactatcaaactattataattgaattgtattgtattaacaattacatgaaatagctggcccacaggtatctggttaaagatgcttttacagtagtattttattcttctgtcccttagctctttacaaattatttttgcatgcattttgaaatctagttatgagctaatttcaatcacttctttgtcttttctataaaataaaaacctagggaattgaagtttttatatttatccttcatttatttataatttatattcataaattatatttacatttaatttataaaatatatgcattttatttatatgtttatattacttatatttatccttcatttatttattttcataaatatttattgaatgctgtctgtgggccagataatgtggtagatttggggagtaatctggtaaataagccaaatgtattctttgcctttatggaacttaaatccagcaggaaaaagcctgattgacgaataaaagttaggagacattaaaagtatcaggtgataatggacatgctaaactgtatgattctatgtccatcgttccaagcaaaagaggcagtaaaaagcacaagaagttcagtgtggatgacagcaaaccaaaaggcttcacaaatgaggcttggctttagttggactttgaagggctgctgagggtcagggagaagttgagaaggtaaaaggaatgttaaaggtattacagatgagagaaacaacacaaataaagtctacgctatggaaaggagtagggggaaaataagacaaatctagtttgagtggaaaacaattataaaatgacaaaactgtcttctcaacatagacagatgggtgatattagtaagtagaggtaatttagggagaggatatccaaactgatgcaatgttgggacacctaggtgaagatgattctcaaagttcatatgcataaagacctggagcacaggtcagatgttggagaaccggccatggatttgggaattgtcaaccagtcatgctacttgcacccatgacagtggctaaatttagagagggagagagggaagacaaaagcaggtaacaaagggtagagccgtgggtaggggtagggggaaacccaaaactagtaaatggtagttttgagtaataaagtagagcgagaagccacttagtagaagccagaatatctttttaaaaaatagatcatcaaaagggtcttgtgatgacaggttgaggaaaatgaaaactgaaaaagggctcctggatttagagagtgaggtctctgattattactaatgagcacatttattagaacagtaaatgcacttgccattttttataaaagcagcagggaagaggtcgcatagagtgtgaaagcaggagatcagagattgtcagctttgcaaatagaagacttcatagaggctagaagattgagtgggttagttatttgtgtatttttaaaagataacaagacttaaatatgtttgaaggtggaaaataagaagcccttggtgttcttgaaattgaacttgtcaccgctttttattgtttttggtctaaacttgaatctctcttttctattaaatcctagtgagtccatgacagaagaaaccctgaaaagggcaaaggagattgggttctcagataagcagatttcaaaatgccttgggctcactgaggcccagacaagggagctgaggttaaagaaaaacatccacccttgggttaaacaggtaaaggagtttcccttttcccccatcccccactgacaggatttctgtggtaaaacgtaggcacccattcaaaaggccattgttaataaaaagaggagtggaattaagaagtgacaatactcatccggttgatgctcataatgtcaccaattttattcagcaagtgattaatttttacttaaaagggaaagaaggaaaggacactaggatgtaaagataagagtgagtacctgattttcttggcctaactgaacaaaacaaaacaaaaatttaaactctcctctgctttttgacctgtgttcaaatatgtaagtagttaagaaatccttagtgtaattgaaggacttgaaatttcctagcatggtggctgaccctcttgaaaataatagttatctcctttggcagtaactttttacagggtaatactttatattaagtgccccatgattatggttcatttagtattcattgtgatagggctgggcataatgagctcatctagtattcatgacaatcacgcatgaacattcataggtgtgctgttgtgattttttttcctttggcctttaatggaagggatgtcttagtttaaagtaccaccagctggtttttgtcctttaaaatcattgacttttcactgtgtgctcaaggggcacgtgcatacccttaggtctcaagctttttgctaaatattttccactcagcgattattatctttcttccttctcacctgccttacaccagcttgccctgtcggccccaaattcttgctcactaagctgagttactggcccttgagagtggaattgatttccaaatatgttcaatgagatcttgttctccccccgttcatcccctatggctttatggtagttgtgtcatcccaccgctcagtgccacaggccacttaaatcctgcgcattaatttgcaagccaaagagatccttacgtataggtcattttgctcagattttagatttcatatacagctgcttttagagagctggtggggtaagtcttcctagtaaccagttgactataggaccactttgcgatgttcatgagagttactattactactagtgatccaatgccctgtttctcaggtgataactagaccacatcactattttctctctcttattttcagaattagaaagcaattccacgggtcatacattttcctgtttgcatactttacagtaataggaattaaaggaatatgtatataaagcacaaaaaatttagtcttgaaaaaattataataacattcttatttgtttattttatttgttttctcttacagattgatacactggctgcagaatacccatcagtaacaaactatctctatgttacctacaatggtcaggtaggaatgggcaaattggcctatccagaaagctctagatttcatagacagttcacattagggaatatatattttttacctctttggatatctaggtaataaaaaaaggcatcatggccgggcgcggtggctcacgcctgtaatcccagcactttgggaggccgaggcgggtggatcatgaggtcaggagatcgagaccatcctggctaacaaggtgaaaccccgtctctactaaaaatacaaaaaattagccgggcgcggtggcgggcgcctgtagtcccagctactcgggaggctgaggcaggagaatggcgtgaacccgggaagcggagcttgcagtgagccgagattgcgccactgcagtccgcagtccggcctgggcgacagagcgagactccgtctcaaaaaaaaaaaaaaaaaaaaaaaaaaggcatcatgtgtgtcaggtatgatgatatgtttctgtactcagtcttttaagaactgccttaagataatgaaatcaaacaaatgaaaaattaaggacaatgactacatgatcatacaattatgctatgttctcatgactatttaatttaaaaaattctgccatatctattttttataaataagtagggcttgtataacactttatacttatgggtttccagagactaatagagaatacatgttaacaagaggaagatgagaaatacatacttaatgataggacaactagtttaattaaatggaataataacacttaatgatttctgcatcttccttttcttatttcctcaggagcatgatgtcaattttgatgaccatggaatgatggtgctaggctgtggtccatatcacattggtaaaataataaattatgtgtatataggactttacacaatttatatagttttcttcatacatgttaattccattattccaagaactatatcaaataaatgctgtaatatatgttttgcaaattaggaagctggggttcagaaaaataaaacccaaatatatacagctatttagtggtagagtgggactcaaatgcaggtctcaactacaaattctatctcctctcatttcactgtgtaacttaattttcatcctttttaactgaattgagcctttcactggagttgggaatggattagattttgacctgttatcttctagcatagtttttcataaggatctacatttactcaaggactttatacattagccagaaattacattgcagataccacctctgacctcatcctacgtaacatatatgactttcgtttacctcaaatgcaaaaatcttgtctgtttggtgcatgggtagagcattatgtaggtgaattaaaacataatcaccagagatatgacatttctctccagtcaattaaataaccactaaagattattacagatgcaagtatgtattttaatggacagtgatattagtcaacatatggatttaatatttaatctccacaaagcattataatatggaaatgataaaaatctatgatttgaatatatttaaatcttattctattactttaagcatagtttatttagtttttacaatgaactaagagcttcaggatatgttagtttaccaatctttggacaaatcttgaagtaggacaaaaatgttatatctttaccaccttagtcattgtcttagtccatttgtgctgctgtaacaaaatacctgagattgggtaatttataaataaattctcacagttctaggggctgggaagtccaaaatcaagtgccaggaagttcagttgtctggtgagacataggtctctgcttctaagatggcgccttaaaccttgtgcctcctataaggaaggaatgctgtctttacatggcagaaggcacaacagcacaaagggaacaaattccctccatcaaaccctcacccccagttttttctgagacaaggtcttactatgtcacctaggctggaatgcagtggtatgatcatggctcactgtagccttgatgtcccaggctcaagcactcctcccacctcagcctccctagaagctgggcctataggcatgtgccatcatgcttggcttatttttatttttattttttgtagagatggaatttttctgtgttggccaggctagtctcacacttctggactcaagcgatcctcctgcctcagcctcccaaagtgctggtattacaggcaggagccactacagctagcaagcttttctataacagcattaatctattcatgagggatctgcacttatgaactaaaaccctcctaaaaggccccacctcccagcactgttgcattggtgactaagtgttctaacacatggatttcaggagacacgttcaggccatggcagttatcttatggtgaaatagcctgaccatttcaccagcatctacctgtctactctctggagtactttttcttccttttcaaattttacctattcatgcagtaattctgcattatatcaggatccaaagaagactagtcaagctaataatcaagtgtgtgcttacttgatagttgccattaatatgccagtatatttgaataacgtgttttcacaagaatttttagaagacaatatcttaatgcaaagaattagtacaagtctgtggactttcaattctatggcatcccagtagacgtgatattttgaggtgtttaggccattattacacttcagatttctttatagaaggtcactcactctgcatgggtggccttgccaagtttaaaaggatatgcttggaaaagataggactcttcaatcaatcaggatatgtcagagctgcaaggcacctcagggatcattaggttcagccctcagacagcagattaagtggaaaggctgaaaaaagagcacaggtatcctcatcactggattaactatttttgtgtattgaggtcaatatattcactttgaatttcttttcagtaagtgagggttatttttatcattaaaattacctcccattaacattgaagttctaaatacttcaaatattgagattttctattgcagaatttagcatatatgacaagcccaatatttccttgctgtttaattagtacccatttttcctactactaatacagtatgcatcatgggtttgaaatttatatcttggagtttaaaaaattgaattgaaaatcattagcttccttagcctggactgactggtgatacatttctgcttctctttgtattgtaacttcgtgcttctcttatcccttttgccaatctcattgtctctgcaggcagcagtgtggaatttgattggtgtgctgtctctagtatccgcacactgcgtcaacttggcaagaagacggtggtggtgaattgcaatcctgagactgtgagcacagactttgatgagtgtgacaaactgtactttgaagagttgtccttggagagaatcctagacatctaccatcaggaggtaagaaaagaaaaacagaaaaaaaagaaaaaagaagacagatatatgtagtatacactttatatatatgcattctggtatatagatgtatatagtaattcctcttagaagaaagggctgccagtggcatccattgtcttattttgtagtaaaactctaaaaaaaatcactccattcttatatttttgagcccctggcccagagtgattatttttcacataaagtttttatttacattttctttctaagggtttcagctagattgaaaactctacttggtaacatgtgccagatacatattaactaatacaagatgatccctcataaatatcttgcagagtgattgaattggtcatctagacatacaataaacagcctctttctagtttgtgtgatgtggtttaatgataaacagttccagttccctgaaaatagtcaattgctcacaaaagaccagttaattccttgttccatcagatgaagccattagtcttcagtttaagatcaatgagttcattgtgaataattttgcttcctttatagctttcacttacagttgttcctccattcccatcccaatattactgagtatcttcactgtgaattcatgtgattgcagattactataagactgtagaacaaaataaattatcttataattaaaataaaagctactggaaaattttagtgatgtccagtagttaggcctttgatattattacagttattattactttttaccagaaaatcatctctatgtggaaaatatggtcaattagaaggaaaaaagtactaaattggaaccaaaatacttaaattttagttttgactgacaacctcattgatttctttaagttacataaattctccgtgctttatctttattttaaatgaatcgtctgagtataaacacatgctacttgcaaatactgtgaagttaacatagagtttatggccgaagtcagattgtaaagtataaagtatagtgctagaataatgttattattttactattacaaaagaaagtagacaagtttaggaaggatgtataattatagttgtctacttgggcctggcctactaatcctttaataaaattgatccattaaatagaatatatagcattttttagacctctctctgacatggttgtttttaaatcactccttaatattcatttgagatagacaggtggggatcaaaataagtgcatcccacaaatatttctcgaacaccttgtaaatccaggttcagtatgatagacagctggaaaaacaggttcttatcttcaagacattaacaataaaactagtatctgtgatataaatgtgaaaagtcaaatactaatttaaaaatattaaaaaacattacagatgatagcagcaggcattttgcatataattaattatgtcctcatgaaatggtttaaagaaagatgaaaaacttctatgactgcttttggatacaattatacatggctattaatgagatttgtttattaaaactgaagtcagtattatagaaagaaagaagttggcccttctttgaaactaattggtatttaaaatatagtattactatatattaggaggtaatttaaaatatgttggcggacataatatgatgtacatatgtaaatgtagacaatggtacttctgtcacaaaacaagttaaatgaatgaattaatgacagacattaattagtgataggcaaaacccattagagaatgcatgactcgagacagaattgaggttcatttatatcatttggtttaattgtaattaaatgtaatcctaaaatactgcctaaactataaatcatttttactaacatgtaaattagtaaaatataaagcatcatccttctcattggcaggtgtacagatagtagaattttataaattggagataattcataaaattccaaaaaccatggccatttgtaatgaggcaaatactacttctgttagaaaaattttctcacatgacattctttccataatacatctaatttgtgcataaaaataaggactaaccaaagtgattagtggccaggataagttaagatgttctcaaataagcttgaagtatttccttttcatgtttttctattgaaaataagtttctggttcagaaatattcttgtgctatggtaagttagtgatatcaggttttaaaaaacagaaaactaagatgggtaaaaaggatgcaaacagatctaggtatgattaatggaattttgggagcttaatggaattttgggcctaaatattttagaaatctattaaacaatatttgaaatttagaatattttatttcagtagatttcttgaaactattcaggcctgatggctatgataaggatgatgatttacctgtgtgggttaccaggttctcatccctttgttcctacatgtcccgtgatatttggtgttggatcaatttgagattggattattccataaaactgtgctatattaacattttacaaacatgttctcatactgaattccttttgccctgtgggaaaacctgcacgacaccatcacactgttactctaaaagattcctgaggccgtgatttgtcttcccattgatggtctctgattctagtcgtcaatgatgagaatttggttttgtgctgaaagcttttctactactttccaaaaaaaaaaagtagttttttaaaaatagcttttctcttattctttaacattaactacacctgaaatgagccagaaaagtagagttaacttaagattctaatatttggtctattacttcagcatagctgaaagtgtattagtttcagcatagttgaaattacaatctatagagttgagttcaggccggggatggtggctcacgcctgtaatcccaggatttggggaggctaaggagggtagatcacttgaggccaggagttcaagaccagcctggaccccatctctactaaaaataaaaaaaattagctgggcgtggtggtgcatgcctgtaatcccagctactagggaagctgaggcacgagaattccttgaacctgggaggcggagattgcagtgagctgagatcatgccactgcactccagcgttcatgtacaagctctatacatgtatttgctagataagggatatgggtgagtcacttcacctttactgagcctcagtttctttagctgtaaaatggggacagtaataatcacctcagaaggatagtgtgaaagtcaaaacagatagtccaggatacatagtagaatctttattaaagagtagcagctattatcttactattgttttgaatttattgcaaaacagaatttttaattccttaaaaagcagaaatttctttaaaaacaagtcaatttaatacagctaagttgaaaaatattgatgtgtttattaaagccttttattacactttaagctcctatttagtctaattgactcaaacttttgctataagttgctacttctccctcagtttaaaaaaattattctaaaatccttcatataagagattttttgtgtccatttaatggagtaatttgtttttaagtctctaaaacattaacaacactgctgataaacccaacataataaggaaataaaaagattatagccaagagagtattttaaaggtttttgcaaaaatttatattgaacatattttaaaataaaaatagtttaagtacacttataaatatgcaaaatggtggattattattttcagtactgtttacaatgcctttaagcactcaattgcagggtgtttgtttagttacacagtaccgtaattgctctcatcagacagaaattagcctcatcccttataagagtatttcagaacaattttaaataatgacaaaatatatttggcacatatctatcattttggcagttctactaatattcattagtgggtcattaggacacacacaaattatgctaagctcaatggcctatcagatatatgatttttgatattaataatcatgtcttatttatttatacacttacggtatataggacctttaatgtttagtgtttaggcaggtattatcctaattttatacacaagaagactaaacgttgggggaaagttcagtcttgttgtctataaaattagacaagaaggggtgggtggtacacagaaggaaccaagttaggaagggacttcgactggaaatctatttcctcaccgtctcacgctggtttaccctcactgctacaacaacacctgtcttgagaaactttgagatttagtggactatttttttttttcttgaagttttgactgctaataggagatttggacttatggaagaaaatcttacacaaatgtctgaaataaggctaaagattctggcactgtttgtaaagcaagtagtgaggcagtaggaactaaaatcagttactaggtactgttgacaggtaccaaggctgcagccaaggagaggggaaggtggaaggtcatcaaagtggaaggacatcaaagtgggacctgagatctaggctggaactaaggggtagctaaaggttagataagctggaagagaagagaaaggaaacaacagccagggaagtttcagtggtgcagagaatttgttagtgggaaaatacctagttggagctaatgagtagtcttttgagctgagaggggtgataatagataagactggaaagtcttaagtgccctgggggtcaaaagtttatgctttattctctaggcagtggaaacctttggagaactctgagtgtaggagcaatttgatgaagcagacttgcttaatctgaatgtgaagtgctgagatggaggtgtacaggagaagggagtgttaaaagaagaaatctgtattcagttaggaatttccagcagtagtccaggaattaattgattatagcatagagtacatagcaaacatttattgacttgattttcctttccatttgccacacatgtgagtgtcacaaatgatattcacgtgtacttgtatggaaatcttgcacagattttagcatctaagtgccagaaagtaaaaattttgtggcatcatttaacagtattcattggtaggagagatgtaaatatcacagtcaggttaagaattatcagtaaggaaatagacacaatattagcatagttgtccattcataatgaagttattccaatggctgatattgtgagtgtattttccaggcatgtggtggctgcatcatatcagttggaggccagattccaaacaacctggcagttcctctatacaagaatggtgtcaagatcatgggcacaagccccctgcagatcgacagggctgaggatcgctccatcttctcagctgtcttggatgagctgaaggtggctcaggcaccttggaaagctgttaatactttggtaaggagagaaacaagtatctgtttctaatgttctattttgaagagctgcaacctgaatgttgactgaatgttgactattggatatgttaactacagggcagatagaatgcatacacttagtgaatttaaagttgttgtatatccatgattgcagttaatgctgattatgagttgatagcagtattctcattaagattcagacaatgaaaataatttcaaaccagttttgaacaagatttgatatttagaatcagaagctaggaattttatgtatttcagtgtccaatttacatttaatggtgcctttagagaataaagaagctgggctaccactcgagctaatgatacattctgtaattttattgcatattttaaactactcatacatttttattgttgtttctattaattagaatgaagcactggaatttgcaaagtctgtggactacccctgcttgttgaggccttcctatgttttgaggtaacactgtatattgttttccaaaacaatgattcaaaaattgggagatacagaaatgcatgctgtatgctaatagcactagggttctatatgtagtaatttataaatccattaacaatttccaaaccatcacagccagtttaaggaccaatgtgtggtcttctagtttaatgctttcccttcagggagtggccataggaagactacagttcttcatctagaagtgtagtgtaaggcatctccttaccaaacagagagggtagctttatattaaagaacaggacaatttaaaaaagacacacaaattgaggtatctctcgccagcgtgttttctgatacccagaaatgacagcttatctttgactattgtcagcaccttctgatagtgcctttgttttaaaattttcagtttttgagatccgattgtttaatagataaattataagggtgaggaacaggaacagtgaggatcttttatattaaactttaaaacaaagttttatcataaaagaagaagttgtgaattatcacttactttcttcagatgttaccacatgtaaggaacaacttcaccaaacaagggataataaaagaaacacaatttgctttgcacaatttgaaagtgtaaatggaatttgagatgggttcctttaaaatgatgaaaatgaaaaatttcaaacgaggtggaaatctttttatttaaatgtcattttgtgtaaaccatagtctaataatactacctgtttgaggagttaatgtaaactaatttaaacatgcacacatttaaggaaggatggaaaataaaacagctttgactatcacacttctttttccttttttgcaatctatatctttgttccagtttcacatactctgaatgataagcattattgctctagccttcctctcttaaacaaatgaagcaactgaaagccctttaggcagaaatttgtaataggataaactggtgaggtgatggatatataaataacttgattgactttctataatgtatacatagatcaaaacatcacacaatacctcataaatatatgcaattactatttgccaattaaaaatacattttaacattaaaagataaatttgtagtagtgtaaaagaggtaaatgctgctgtttaaaagcaaagtaatatttttcttatttttatttttgctttctgttactcctcctctcctaccctcccaacccattttgcaaatgtcaaaattcagagtaaattgatttcagatagcattttttctcaagcatttaaaaagaaaggatatagttgaaaaggttttattcacatactgcacattgtattagcaaatattactttaaaaattgattcatttgcaatctggttgagggagtagcataacctgctttgacaacagagcagtaggctaagatcagctgttgataatgaactctgaagaaacaggttagggaaatcaggttctgggctgaatcctgttaaggcttaagaattacctggaaccagcagagtgttaatgtagcaaatcagaaagggcaaactttggagaagtataatttctagagctaccaggattccctttgggaattaatacaggtttactgaccccctacactttaccttcttccatcctcagcttcgtcagttttatactttggttgattgtcctggtgattaaatggagaaaagtctcaatttagcaagaggcaccttcttattcagccccgactggaactataggttgtctggaactgttctgagaaccagtcaagtctagtattagcataaacctgacctgctttttttccccttccttttccagtgggtctgctatgaatgtggtattctctgaggatgagatgaaaaaattcctagaagaggcgactagagtttctcaggtagtgtccaatttctttgtagtgactgttatctcttaataaacatgtagtgacatttatctcttaataaaatgtagtgacatttatctcttaatgcaaccttactttgtatgttttcttttcacacaatgtgttagaatgagttttcttttttcctcttctaccctctagtctcctaaaagaatgagaaaccttgaaggcattaaattataactagacttttaaggttggtggaaaaagaggaatacctgtgcatattttatcaaaacagattttagactccaggagtctaaaaggacaatgatttttgtttttctcatgaattagatgctggtcagggtatttctggaattcccagtctcaagggctgctcaaccatgctcaccattaacaagtgaaagctttcctgatttttaattttcacatctgggaactttgcctagtcaaacatgcaactttaatagtaagtccctcactcaactattttttattttttcctgttggcacattcagtttgtgagttaatacaagcatttcttattttgtggcaactcagccaccttcctccactgccccccagcctttaccttctccttcagtgttacctcagcatgatccatttaagatttacccagtggggttattgatcttgtattgtagaggataaaagtaatgttttccttttaaaagctttcaaaagcttgttggggcttttttttttaagggggaacaattcatagagaagagtttgatgttaggcaagtggaatttggagggaggaagagtgaaatcaggagcatttcaaagaggaataaagtgcgtggactgtttctgcacacatgacgctggatcgctcttctgtgtatgatagctgctccccaaggatgtttgagtggtaagagtagataagaataaagagtgagaagaggcaaagagtgtaaaagaagaaaaccaggtagactttgaattcatgtttgtgtgcaaatcagatagcttagaagggaatctttccagtgggccagttttcactaatggagtgagacaccaactgtcttctctattttattcctggccaggggtcctgccatgcggcccttttcagaggctggctactgtactcagctggtctcatgtgagtgatgaggcaggtgtcccctcttgtctgcctcgaacactccttataggatctcagtacaatatttttaaagtatttttcctttagcgtatggatagaatccatatgggaccaaagtttaataatagagatgttgtgattgagtactttacagttcaatgttccctatcaaactacagcagcatctgggatactgaattcaatgactctagagtaaaaccagccccaatcaatcagtaatctatgtatgtattcatttatttatagcacctgttatatggtggcattgttctcagtatcaggaattgtaatcgtgaaaagaaagatatggtctctactgtcacataggacttctttttgctaggctcaacagacttcaaataattacaattaaatatgatgagcaatgaacatcgcaatagagaaaatacaggatgttgagggagagtgtgaaagtcttgggctccagtccctgaggaagggacttttaaattgatacctgatggttgattcagaattaactgggcaaatggcttacattgtgggagtaggaggaagaaaggaacagcatttatgaaggtctgaagatgagaaagagtagggagtttctcaaaactgataaagcattccttatatggctaggacatcaaacatgatgctgattattaatgatggtgcagaagtagtcagggaccagataaaggagactttattggtcattataatgagtttgaattttagtcatattttttattttaaaaagatgagtgtgctgtagtacacagagtgaattatggggcaagaccaaattcatggaaagaggtgagtgagttgttgctatagctcagggtagagatgacagtgcctcggattagagtaatgacactaaagatggagagaaatagtaagaacatgcattgaaaagaattagtgaatgaatggaggtggagggtgaaagaggataaaggataactcctgagttttctgccttggataactgggtagacagtgatgccatttattgagatagggaacactgaggaaggagaaaagtatagagggaggaattatatatttattttttaaccttttgaatgtgaactgcctgtgaggaatccaagtggatatgatttaaaggcaagggttattataataggtttggaattgaggaccaagatcatggctagagatagagaaggaaatatagattttgaaatgaatagcatatcactttaatggaagatttgagaatgaaagcaatcactgagggagagagtatagaagaaaaggaacagctaagacagacactggaggaatactggcatttaaggcagagaggagaagaaagaaccacgaatgagctgaagaaagaagcacagaaatgtagtttacagataccaaaggaagaaagtgtttttcagaaggccagccttgtataatgctgcatttcatgatagtggtcagaaggagtttgtgttcagaggcaaaagggatattcagagaaggattcagggaggagatagcatatgacctaggccttgaagggtgagttgagatttgaaagatgaagctgaggagaaaagatagaatacacgtggggaagagacacatggaagcaagtgaatgcagggcctggtaaaaagacagtggcccaggttgttttagcctatggtacagaggagaagatatctaaaccctggagatcttccctcaacctcttcatttagtatggagaaaagcaagtggggattatgttgtggagggcatcccgaccctgacatggaggaaatgagtgtgggaagcacttcaagatgagaagtgtctgaaacagccaagaaaggaaggacttttgaagattaataaataaaaatacttgattttacagttacaaatgtcatactctagaagtggcataagacaaatcaactcgaggtaaaggatttcatctttggcccaataagaccaaaagaaaatgtcactctcattctgagttctcccacaattctcaaagagaaatatgatttagggagttgtagtgcttagaaaagataagggtagaaagaaagaaatattctgaaccaataataatatgtcattataaagtagagaaatattcatgattctgacagcagagaaagaagccatattctgcttcctccttagtcccctcttttctctaattgacctggatgcctatacttgaggattcagaactcatggtcagtttgctgagcactcaaagttggagaaagaccctctgcctcactacaagcaaagaacaaccttgttcttacagcacagattaggtaatgagtttatgtagttatgttcagccttgagtattttgcaagtattgccctgatacttataatacttaaagtacatggcttattgacactatatacatagcgttagctaaatgttcggctcctctgttttccttcgtgacaggagcacccagtggtgctgacaaaatttgttgaaggggcccgagaagtagaaatggacgctgttggcaaagatggaagggtaagtgctttattctcatctccttcattcctgccttctcatcatttttttctttaacaattttgaaatattgacaggttagaattcataatatctataaaacaggtctccagtaatagtggagaagctgtaaaaaaaatcaaattctctgacaattcagttgatgtgtcatgggtatcatatttcctatgtttcatactgttagaatttctctgatgatattcaaaagtaattatcatcctgtactcatcattccttttgaatagattttctctctcattttcttttgtctgtgtctttccttttatgtttcaatggctattatgaaaacatctaatacttttctttctgaagttcccaatcgaatcctggtttttcttctttcttcatttcccatcctcctccctttttattgggttaataaaggcaaagtcaaacagagtaaagtggataaggataataatattaaattggcttaccatatcacatcttgtatttctaatacaatgaatacctccaacttcaaggagaaatgaaaatgtgaagaatattttactttagttttatagttgtattaataatgcatttgtgacttctcttaaaatgtagtaagttatgttgtagggagtctatgccattttacttgctttaaggaaaaatacaaacttagcattcatcttctgctttgcaaatacttcaaaacactactgaagatgttaaatctttttctctttttccttccagattagcatttcagagtagatcttgttaataaaaatggtaatggtatctacttacaacagaatcacataatcttgagttgaaacacctttagagataatttattccagccctccaccctccaagtcagatattttctttacagcatccctggaaggtggtcatctgttttcttttaaacactttggtgatacaaagctcaacacattgtaagattatatattgtggtcacttttttttgacatctcaggtattctttatcttgaactaaggtctgtttccttggaagtcttatccctgattttctgagtttcagagcaaaaacttaatctatttccttttcaacatcttaagtatttgaaggttgagatataaaataagaggaacgtgatacctatatatggaagtggagaatgtaagactggcctagagacatttgtactttttcaaatactgtactggtaaaataatgctggtttgttggctttatttggctctaggtttgccagcatatgtgctttccctaaggttttctcagatatcaactattgcacatcgtcctgtactccctcttttggaaatgttccaggttattcacatagtttttaaattgccatgttaagaaatggacatagaactgcaggttgctgagctcagtggggtggggtgcctgagctcagtggggtgaatgcctccccttttccagacacttcaccaaaaaatgagctcttattattttataaataagctcttgtaaaaaatgagctcttacttatatgtggtctgttttatccttacaaacattctatgagcaggtaccattgttattcttatcttatcagaaaccaagactaagtaagtaaagcactttgcccaggtcacagaacagaaggatggaaactcaaatgtcactgttttaagacgttgctaaatctgataagcaaatctcttatgtaatttatttaagtcttttatacctacccaattattctcccttactctcagctgcatcatttcccaaggacacacatattattaacatataggttatagtgattgagaccacagactttggaatctgacagataatattcaaaatcctaactcagtcacataccagtcacctgaacctgggttatttattattacattacttttatttccttacttctaaaaaaggactagaatatttttcctttcgactccttcctctttcaaacttccatttaatgatctcttgatgagatctttgagacttatttttggtccacctaagttataccatttacctagatagatattgagctctcccaccttcttttctttcccagtgcctaaaagataaagatattttaagtgcttttcaaatgctttagcttcctatcctgttcttaaaagtcaatatgaattggtttagttttactcttttcctattacttatacccatgctaatcagtggatgagggaggtaggctctcagccactcttagctgcctctacaggaaatctgttactgcacagagaggcagcattttctactgctctcatcaggaatgtagcaagggaactacttagtgctcagtgcatctgttaggaccaaaggggaggatgagggagtagcttccttgaaggaagtacctgaaaactttttctaaaatcctttttttttttttttggccaggttatctctcatgccatctctgaacatgttgaagatgcaggtgtccactcgggagatgccactctgatgctgcccacacaaaccatcagccaaggggccattgaaaaggtcatcatttataaataaaagtggaagggaaaaggcaacactcagaaaaaaacacctaaggttttttttttttttttaaagctaggtagcaatgtaagatatgctgcaggttaaatttaatgatgaggctaacttccttgctctgagtcacctgggtattctaaagataacaattttcttcactgtccttttgagcccctttggttgtatgcgagtacaggggttctcaaacttgaatgtgcatcacagacacctggagagcttgttaaacacattgctggactccatcccccagtttctgatttcatatttctggatcgggctccagaatttgcgtttttcacaagtcctaaggtgatgctattgctgctagtctggggatggcagttagagaactgctactcctggggattctaatgtttcagggccacacacaggtgagcggcatctgaagcaatgcttctcagttaggagtggtgaaacaggtgtggaccagtcacttgagaactttctggaatctatgctttcccttctcacccttgacttcacctccaaacagcactttttgatatctcttttgagctccgagagccagccgtataaagaacttaacaaaaataatgactctgccttagtactcaatatgcactgctaggtgtacatttagaacctatcatctttttttttttttttttggagacggagtctcgctctttcacccgggtgggactgcagtggcgcgatctcggctgactgcaagctccgccttccgggttcacgccattctcctgcctcagcctcccgagtagctgggactacaggcacccgccactgcgcccagctaatgttttgtatttttagtagagacggggtttcaccatgttagccaggatggtctcgatcctgacgtcgtgatccgcccgcctcggcctcccaaagtgctgggattgcaggcgtgagccaccgcgcccagccgaacctatcatcttaaataagctttgaggaggtcccattagtctttaggtatattagatcaggctcaggctcagctctttttagtgagcttttccagtgaccctgccatcagaattcaggcagacctgtctctctggttgtacattgggctggattctgaaggtctttgttctagaaggtagaggtagcaggatactttgtaatagcagaagcattaaagaaaaaagtccttggatctcaaatgtacttcagtttctcatgtcaggataaatgatcctcagaactcaggattttccaaatctctcagagctcaatgtgtcatagactctacttcgttttatacccaattacattgctgaaccactcttgtgagcataatgagtgaggagctcttgctctttgtaatcaatgccccctcttggtatagggacattctggctctggttgaatacagggattcctgtatgtgacatgcagggcttccctgcagggaaacactgtttccttctgaacataatatctaaccttgtagagtccagggcaacagaaaagcaacacaaaagaaatctctctggtttctttgcagtaccatgtaatttcagggcctgtacctcccagcaggtaggtcattacattgatatagaggttggactgcagtttctggtgctaaggcaactagactgaaaggatttcatttaaccctcaatgtaaaaccaggttatataattgtaggtagataggggaatttggcagagagataatcgtgtacaattatttgttcttttcctattattttgtgtgtatttattgcatattattttgttaatagaaacctaatagtgccctccattataattattaatgtagatatatagctgtctgtgaagagaaattaaagacatccaaatttaaggtactgtgccttttagaaagttttcaaaaactaagatatgctctttagcacactatacgattatgctttttaattcaggtgaaggatgctacccggaagattgcaaaggcttttgccatctctggtccattcaacgtccaatttcttgtcaaaggaaatgatgtcttggtaagaaatgccaaggtgcctgagaggacaccaccactgtgttacgtcatgttggtttgcatctctctggtaatcttctctgtgaacaccagacaaagagcaactgagacccctggatctgtttgtgtctgagtgtggaatgatgcatagcatataatgtctaccttatttgaaggcccaggctattggtggcactgataagtcagttacagctttgtaaagcacactgatccactgggaaggtcactgtatgccacctacagtatagtatagatggatacggtgagacagactatcataaataaatggaatgtgtagagtagtcataaattctgtgtactgaaattctgctttactccttacccagagacgataccatttgcaaaaatgataaatgaactagattagtcctaattaatttagtctacttagtttaactaatcggtaactgccttagtctgttttgtgttgctataacagaatacttgagtctgggtaacttgtagagaaaaggggtttacttggcttatgattctggtggctagatagtctaagattggaaagctgaatctggtaagggtctcaggctgcttccattcatggtggagagtggcaagggagtgggcaggtgcagaggaatcagatggtgagagagaaagtaggggagagaaactgaagaaaccagactttttaacagcccactgttgtgggaattaatttactcctaccagactctgattatcctttttaatttaggtgaaggatgctaccccaacaggatagcattaatttattcatgaaaaatccacccctcggacccaaacacctcccactagtctccagcttccatcatggccacactggggaccaaatttcaacatgagttttgatggggacaaaccacatccagaccatagtagtaaccagcattgatttacctcctactcgcagtcatttggtggctgcaaaaatgtattaagcaagcctctgctctcaaaaaatactgtaatttagtgaaggttgggaagaaggtaaatttgtagaaaactataaagtagagtatcacagttgctagaggggatgtacaaataaaatggtattggaattatagagcagagagaacgtatttgccagtgtgtgtgcatgagcatgtatttgagcatcctatgcttggttaggggtagatcataaaagacttcaaggtagattttgtattgtgaactggatctcgcaaaacggttggaattttgacaagttaacgatggtagagagattattacacatagatagaacatcatctgtaaaggtgagaaaagagcatatttggagagagtaaatagttcagttgagtgagatgattttactgagtaaaatgggtgaactgggaaagtaagattgaggccaggagggtagtataagataaagacagtgaggtctccaatgaagcaagaggacagaaggccttcagggactagactttaatctgaagccagtggacatccagtgaaggttttcaggaggggtatggcattatttgagctctgcattaaactaaacctgtcagcagtgcatgggaatgcaatttggaaaaaggcatgaaagaaagttagagttcaaagatactgactgaaagtatcaggaaaaatccaagcagtaaggagaaaagagacaagattagcaaaacaagagctggtccccagttaataacagctggaaaccagtggtagagagaatattaatattgttgttactggctctcaatgtcctctttctcattttgaattttatctcttcaggtgattgagtgtaacttgagagcttctcgatccttcccctttgtttccaagactcttggggttgacttcattgatgtggccaccaaggtgatgattggagagaatgttgatgagaaacatcttccaacattggaccatcccataattcctgctgactatgttgcaattaaggtaacattttcaaaaatttattagtcattttatgagttctagtgaaattaaaagaacaatttgtcatcaaaaatcttgttacttttaaaaccttctaactaaagggttggactagggatttacatttcctttcaataatgtactgcagttgtactataggcaactttatgtgaactgttgtacatttcaaaaaaatttttaaaaccatctagaattgtataacttcaaaatcaattagctgagtgaattataagctttttgtgcagctgacacatgatggtgctagtttagctggtaaatagaaatccaggacacaccttgttaggataaagcttgaattgtgccaactcttacatgacttttgtaaaaagggttagcctgtggggttgattaaattcctaccacattgaccacctttgcttagtatatattttcttcagtggcatgatttttccatttgaaaaattgagacagctgttgctgtatatggtgctgtgcggttgttgaaattgatgacacctttataaagagtgaccaggaaaatttaaagtttgttcactaatttccaatacatatgtatattttaaataataccttaataataaagccattgtgatctcctagctgcatcagtatgatggtgcacagaattatgacctttaactacttggctggacaggcatgaggattagtgatatataaacgtatttgaattacgtagatgaagagcacaatgaaattaatatatttatgtaacattaatattgatatatttatgtaaaattgacaaatttctgatgttttcaaaaggtttccgttcctatatgtactagtgacttcaaccataattgtgttacagctcagacttggacttttgacttttatgatgggaactttaagttgaagttgtgaattaaaaatcttgtttaagctgataatgtaggatgccttgaattttatagtgcattgagatggaatgtgactttttatgttgggaggagaggtggcattttattcatggagactgtgacaaacatatattgttaaatcttttagtagaaaaatagagaaattttttttgagaccaacgattagtagccactgaaaaatatttttttccactggagattctatatatggattttaagttcatgtttctttattcatagttataggagtatgcttatttcttttagtaaattgatatatgaatttttaactaaaaataatattgatggatagatatgcttttttttttttttttttttgagacggagtcttgctctgtcaccctggctggagtgcagtgccatgatctcagctcactgcaacctctgccttccgggttcaagcaattctccccctcagccccccaagtagcccccaggtagctgggattataagcacatgccaccacgcccagctaatttttgcatttttagtagagatggggttttgccatgttggcaaagttggtcttaaactcctgacctcaggtgatccacctgcctcggcctcccaaagtgctgggattacaggtagatatgcattttttaaatgcactgtatcttctagcttactcattccctagttagctttgtatataaatcttagtttttttcaaattacttagtaattgtcaatcttaatagccctagtgaggctaattggtatcaacagatggggaaatagggaagctgaaatgcagaaatatgtaacttgaccaagatgatccagtgaaatgactcccaagctagaattcccatcataatttagaatgggtgccagaatcaatggagcaattgataaaattcctccatgtaccagataagtggacacatagcgagaaacaagaacttagtttttcatgaattgcatcagtaaaataaatgaaaaggaggcactcctatactctagttcatatgaaagttctgcacaaaggtgtttccaagcagaatgtttttcaaagcttttaagaggtgtcaacaacagtttaatgcctcagaaactggcttacagacagccatttctggcaaggtggcttgttgcaagttcaaatgatcagaacaagaagaggaatgtttccaaagcctatcaaagagaaaaaaatgtgtttgaactctgtctggagagaccaatgcccagtggactttgaaatcattccaataggaatatgcatgggccagattagaaacactggtccagactggtctcaggcgccctatttacagaattaatttgtgattatttaacctaaagttttggccaagagctcaagaaattcttggaatggagttttaaagccatctttcaagtcggatgcttggacccaagagattttttacatgtctactgtagcctaagtgaactctgtgagagatgatttgctaatatatttatcctctcttattcattttctacttttccctcacataatttttctccctgttttttttttttccaacaggctcccatgttttcctggccccggttgagggatgctgaccccattctgagatgtgagatggcttccactggagaggtaactagttaataatccatggaagctttcattaaatctactttgaaatctatggttttatgatttgaatacagtaaaataaagggaataaaaacatctgctatcagagtaagactcaaagagcttatgaattttgaatttaaaaaatattttacttctattttgaatagggtctaaattcttatttatattttaacatgggaatataatacatgtgttactaattcattttcacatgagaacatcttccaggtatttatctagacatccaagtaaatatcttctgtgtcttactttttatttaaaggttctcgggtctctctgtaacaacacctcattccctgccttgctgccatgaaattagatcatttgatttttactagtaatatggagaatgacagcattataaagatcatagacctaaacattgtggaatctgcagatacatgcaaaattttaggactacttttaacctcctggggattatctaaaaactataatggaatcggccactggatgtccctcttcacttgtgttggggctgtgtcagctgaaggtttctttaggattgtgaaatgtgtttcttgtaaagagctgtcagattctagaaagttctctccatgtcagtgtcaggacattttatgaatcacctagcccttgacagacttactagatacaaacttcagattctcatcagtgcatatccgagtggcaatatcagactgtgagccatcattgtttcctcttggtattaaggaaaacctaaaaggataaaatacttaattgcaacaaagtacgtgatgttttatatggttgcctggttacaagcaagatctgtgatgagaagccaagtgagacaagaaggcaggcagtcaggaataaatggctgtcctgtttgtatttggactcttagaaaggggactctttgcctctttgttgcttcttttaatttaagggcaaaaaaaaccttacttttaaatgaaggcactatgtacgtttcatctccagtcggtttaaggagacagtcttcaggttcttcttgatcccatggtcgctactactagtaatgctgattttagatggcccagggttcagatcagagagagatctattttccttcatactgttttatttttctttcttccttttttttttgaaacggagttttgctcgctcttgttgcccaggctggagtgcaacggcatgatctcagctcattgcagcctccacttcctgggttcaagcgattctcctgcctcaacctcctgagtagctgggattacaagcatgcaccaccacgcccggctaattttgtatttttagtagagatggcgtttctccatgtgggtcaggctggtctcgaactcctgacctcaggtgatccgcccgctacagacatgagccaccgcagccggcccatgctgttttctttagcatggcaaatttgttttcagtggttatgttcattctgcatccatacatatgttatgggagttattgaaatataaaaataagaaagaatgagaaattcagctcccctttgttatatctgtttctcaagtataaagagaatttttcttccattatttgaaagagtcgttaattccaagtgtcatacagtataatattacgaggtctgttttattactgacatcagaattctagcttagtaaaatcttaattatgcttcaaagagacattttcagtgtccaaatggcttgttgtaggattaaataaacattcagctactgatataagtaaggggcattttatgttcctagtggtaaagtggggatattagtcctaatctttaatggcacatttaactactttctatggttctgtagaaaatttttaaaacctcgtctgtgttgttgcatctgcactatgatgggattacccaattcttttcaatagaatttgagactcattaacttaggttgaccttatttaagttagttgcccagtacttgactgagtaaaatgttcactgtggagagaaaagcagcaaccacatgtactggtgaccagctgaaggttatagtcataagaacttttcttgcacagaaattgtaatttgcttaagaaatgaatttagccatcagtggttttttttttcttttttttcttttttattattattatactttaagttttagggtacatgtgcacaatgtgcaggttagttacatatgtatacatgtgccatgctggtgtgctgcagccattaactcatcatttagcattaggtatatctcctaatgctatccctcccccctccccccactccacaacagtccccagagtgtgatattccccttcctgtgtccatgtgttcccattgttcaattcccacctatgagtgagaacatgcggtgtttggttttttgtccttgcaatagtttactgagaatgacgatttccaatatcatccatgtccctacaaaggacatgaactcatcattttttatggctgcatagtattccatggtatatatgtgccacattttcttaatccagtctatcattgttggacatttgggttggttccaagtctttgctattgtgaatagtgccgtaataaacatacgtgtgcatgtgtctttatagcagcatgatttatagtcctttgggtatatacccagtaatgggatggctgggtcaaatggtatttctagttctagatccctgaggaatggccacactgacttccacaatggttgaactagtttacagtcccaccaacagtgtcaaagtgttcctatttctccacatcctctccagcacctgttgtttcctgactttttaatgattgccattctaactggtgtgagatggtatctcattgtggtttagatttgcatttctctgatggccagtgatgatgagcattttttcatgtgtcttttggctgcataaatgtcttcttttgagaagtgtctgttcatatcctttgctcactttttgatggggttgtttgtttttttcttgtaaatttgtttgagttcattgtagattctggatattagccctttgtcagatgagtaggttgtgaaaattttctcccattttgtaggttgcctgttcactctgatggtagtttcttttgctgtgcagaagctctttagtttaattagatcccatttgtcaattttggcttttgttgccattgcttttggtgttttggacatgaagtccttgcccatgcctatgtcctgaatggtaatgcctaggttttcttctagggtttttatggttttaggtctaacgtttaagtctttaatccatcttgaattaatttttgtataaggtgtaaggaagggatccagttgcagctttctacgtatggttagccagttttcccagcaccatttattaaatagggaatcctttccccattgcttgtttttctcaggtttgtcaaagatcagatagttgtagatatgcggcgttatttctgagggctctgttccgttctattgatctatatctctgttttggtaccagtaccacgctgttttggttactgtagtcttatagtgtagtttgaagtcaggtagggtgatgcctccagctttgttcttttgacttaggattgacttggcaatgcgggctcttttttggttccatatgaactttaaagtagttttttccaattctgtgaagaaaatcactggtagcttgatggggatggcattgaatctataaattaccttgggcagtatggccattttcacaatattgattcttcctacccatgagcatggaatgttcttccatttgcttgtatcctcttttatttcattgagctgtggtttgtagttctccttgaagaggtccttcatgtcccttgtaagttggattcctaagtattttattctctttgaagcaattgtgaatgggagttccctcatgatttggctctctgtttgtctgttattgctgtataagaatgcttgtgatttttgtacattgattttgtatcctgagactttgctgaagttgcttatcagcttaaggagattttgggctgagacagtggggttttctagatatacaatcatgtcgtctgcaaacagggacaatttgacttcctcttttcctaactgaatactctttatttccttctcctgcctaattgccctgtatttactctaatggtggttctgtacctgtgccaaatgatgatatacatggcagaattgactcctatcaggttcaaatataccacttgttctataattatgttggctatttgacttgtagttatattgtagcacaattaccgtaaacctaaatggaacttctgtatactctaacattactatatatgttagtttgtttggaattgttttttccccatatggctgtggtattcaggactagtagcaggatattttgtttcactttatgaaaatgatgtttttaaaaaacaggttcctttgaggttttcatggagttattaaatttctcagaaggctgtctcataagctctatgaaatggctccaaaccaattcagcagttacgcatttctgctactgaccggtaaattcatgcacggctgcatagtatatatgacacatactgttatttaaacagtaagtcatattaacattcggaaacttaccacattatggaccagaagctgtgatttgtatccaaataactctcagtagaatccagttatgttgctccattgagtgttgttggatagaaaaagaattgcttattcattcattatgcttaattaaaaacataagatacatctgccctggccagccttttaatccctggattcagattgcacaggctttgggcaacattaataaaatctacagaaggagtctatgagtaaagtactttccatttgtgcgtgcatgtgtgtgtgtgtgtgtgtgtgtgtgtgtattttaattttaatttttggtaggagtggttgactattctttgcatcctctattttaattttttatttatttctaaacaggtggcttgctttggtgaaggtattcatacagccttcctaaaggcaatgctttccacaggatttaagataccccagaaaggcatcctgataggcatccaggtaagtggtttgtggctgtgtgcttgcccatggtcatacatggtgagtggggaggggcaggatagaatgttaattgtggtatagaggaagggagatttgttttacgtttccgtttatggcaacttccaggaagaagggacatttgttctctatttgcttcctgattttgccttctgttgtatcagcccgtgcaaaaataaaatacagacagaaagaaaatgtttctagtgaagggatatttgttctaaatgggatgcagggtactttaaaaaatgaatctcttattctttggttttgtcttttctatatgttttactcttagctctccatccttagttcctgaacataggcattatatgaggttggatctcacttcctctgtttctcttgatatttctctgtctcttgattttcccccttgccaattcatccatgtctatagtacctactcttctatctatagctaccacctgtaaatttacatcctcagccatcccatatttccaacaatctgctggatacctccacttgaatatctcaaatccaacgtttctcaaactgaagtcatatctgttctctcctgaccatctccccttccttcctttcattcattcagtccttcacatttcaatcacttctaaatgccaaggattcaaagttgaatacattgatgttatttgattaaatttctcaacttaacactccagattgaaagtttttgaagggtagtgacttaatgggcctaatacagtcagtttatttcatagtatactgtagaagttcttgaaatattattcattggtaagccttctaggtcaaagtagggtgaaatgaatatctttatgcaataaaaaatgcactgtcaatttattgatgtaagttaaatataaatcttagggcaaaatgataggaaacttctattactatttggaatgctttttattactattcagaactacttttattactattactaattgcaagagtgtacaaactgtcctgtttataaatttcctgaaaaaatactagaggcttcccaactggtcattcatttttatttgagattagtaattcttgggtcctatgaaaaacaacaaatggtcttatataatatccctgctgtgcttttaataagctcaaactctgcatggctacataaaaatcaataaaaatataattagaacagtaccaggtattctcaagccagtgggtgattattttagattccatctcattagggtgtcttaatattagcaaattagactctggagactttacaggtagtggctttggagaagtttctgcaaagagtaacttgggattttgctttataaaggtaccagaaggacgacggtgaatagttagagcagaggctaacaagatgacttgcaattgtgaagcttaatggcagtttagagacaaatcacaccatatgatagactcatcatgttataaatgggtattaagtattattaagtcccaagtaggagaatatttgcccaacttccagttatggcttaaagtttaatgtgagacttgggggcattcagaggagaccatgcccttagtccacatcttcacatctaatcataatagtgctaacattttaaaatgccactttaagaaggcagtgatgtataaaattgtgccttgtttggttctagtgctgcagggaaatgtgaagcaaaaattaatttgatccctatgaagtatttgcgtaattttggcattagtggacagaattttgctttgtaggggaaaaaagggtttgttagaaaaaataatgttttcttaaagtagtgagagctggctattgaaaatctacctttcaatactttccttttaaaagaaataaatgttctagcagctacatgagttgttgcgaagaactttctgcacatgagagcatacggacacagatttaaaaatatattaaaaagtacttaaaggaacttaataaaattatacttaagaaaatatttacagccatggcaaaattgatcagctaatgcatagtttcttcattactatatgtaggattttcattcatggtgtttttaaaaatgcttagtctgataaactgaaaaagcgtgacagaatatactaaatggagagttaatagctataaaacttacttgactacttcttagttagtatggggccaaatctaatctcaactttttaccacagcttcatagcaattgcagataaagtaattagggttccatattttaggatacattgtacttttaaaaaacattttatttaacgtgatcctacttggtcagaagaactcatataaacacttttggatatattaagttagaactgaaaaatagcacaaaaaagactgctaatatataaatgggggttagggatagtaaatccaatggaaggcatctagttgaaggtgagttattatgaagttccaagagaacttgttatatggcagtctttctaacttttaaatttcttctctctttcccaccctactcctttacacatacagactctctgtttctggtcttccaaagttaaatccaataggtcaaagtatctgggaagtttgaaatattcataacatcaatcttataactaggacttaggataaaagaatcaagatgtagattttgtcaaaggattcttctcaatctattacattccctgtgtctctaccaaggcatttctaacataagaaaggcataacacaggtttatatggcaacaaaaatcatctttgattttcctgtaatatttctagccacctttcatcgcattaggatttatttttagttgctgtgagtaggcaatctgccttgttttgaagttttctggaagaccctttaacattaaatgatttactctagagtagatcaagagcactcactgtgttttcctctctgattgggctattcagtgatgcttgtggagtggcaagtaccaatctgacatctgcgcttcagcatcgctcagaaacacaaagcaagcattttatttgaaaagacaactccaagtgacatgaataaccttttatctttaatatggaatcattaggaacaaccatagagttgtcaatccagaggtccccgtagaatccacaggcatcacatagtattaacttggctttcttttctgtagccaggagttggataaatgtgaaaatgatcattggaggaaatatatatatttttcacttttaaaggactgtcttctttataaacatttccaagaaaataaatcagcttgtacttttcacctttcgtaacaaatggtttcttacacaggtattttcaatcagcttttaaatctgaggctactcagatgcaagctgacagctgtaatttctttttgtagagaggctgttttatgtgtcacaagtgttcaatacatgtttgatagaagtttataatgtgcctatggaagccaacacccagaccagaaggtagagtggtttcctggctgggaactgtcgatactgtcatgttggatatttatcttttccacctgggggacaacactgaaacagctccataatgaggttctgcctggtgtctgcaggtcttagaggacttgctgacttattttactttaaaatggcaaagaaaaaaattacattctagtactcctcccttaatgtttttcgtggtgattttagccaaggttaatgcaatcttgacttcatattacacaatgagtgaacgatagtcttcctatcccctattcccccctttctcaagcttaagtatgcatcaaaatcacctggagggtttgtaaaacaacaaattgctaggatccactcccagagttcctgattcaatagatctggggtggggttcaaattttcatatttttaataaattcccaggtaatgctgatgctgctctgccagggaccacagtttgagaaccactctacttgagcgatggtactttagaaacctggttaaaagttatgttagcacttattattgtcaaacatattatcagggaatttttgctaggggaaagtataaaagattgaggaaagttgagtgcatgattaatgtatcaattagcaagtgttggagatcattatgctgagccttctaatgtgatttggtacttactgaagtctattctgtgtttagcagagggtcacaatgtaatgttccatattaggggtatttaacaacatttggaagttcattttggacatttcatatatatttgttatataccaaggaatcttaaaacatgaaaaaaaatttatatgccatcaaatttagccctttgccttttctgaggagaatgaaacttgaattgtcttattcttctgtctaaccaattgtcctgatgtcactaagagttattctctaattttttacttgtttttttcttttacgtctaaccatgagcttcttgcatctaagctcatttctttctgtttggtcctaagtggaaatgaaaagctactttcctgggcatggttaaaattcatgttctataaggcagtcatgaataaccactgagcctgcctcagctgaaattcatccagttacatttatctattctatttaccaatagtttcctcttataaaactgcagttctgggattgagggggccagaatctgaaagaattttatatttgaacatagtctttggggtcttttcttaggatttagatctgtgctcagaaatactctgcaagtaaatattagggggtgttatgggctaaacattatcaaaattgtgcaaggatcacatgtgttttattgtcacagttcctagtttctgactctgaaataagatcatttgattttttccagccatcactaatatggtttataaacaggttacaagacatttgctgaagtaactagctcatgtcatctgtttaaaacctttttacaagggaaaccaacaagaatgttcctatttaaagaagaatggatatgtttttaacagtgtgtgattttaaatacgccagctcagttactcagacactcatgttaatgaagtcaaggtcagggtttgatctttgggtaggtcacctagtgttgttttctttcattctgaccactatcttgcaaacactagctcttgatcacaggaagtatgttcagaaatagggaactcctgatggcaatggtcaggaatccagggaaggtaggggctggacactagacaggtccacctggggtcctaggaaagacacagcaatggactacaggaaaatatctgaacagtgagatggagcattagggaagcctgtgtggaaatgaaatgcgtataaatgagggggcagtcagtttgggttgtaagtgtaatcgtgggtagaggaacccatgcttggaaactaggatgtaagggcaggaatctagtttttaggggggctgaaaaaacaattattgtaattataataatatttattaagaactattaataggcaagtaactgtgctaaattatagtagtaacacttaagtagtgcttacttctaaattagtttattgaacactcatactaatgtaagaactgttactattcctgttcaacagatgaggaaactgcatcttagagttgttaagtaagatattcaaggtaacacagtttaataaggtgtggagcctcaaaaaaaaaagttgaaatactactattgtcatcactgtttttgagtgaagaaatgaaggcaaagacattaactttttgaagctcataccactagtgaatggtgaaagccaggatttgaaatgcagctaactgactttagagctcattctttagctacaactttttattgcctcagagtaaatgaaaaaagagttccaaagattgagttattgcagggactagtgcataagctactaggaaaatggcctagttattgaagagcagtacaaaattagaacttagaaataagagcaagttgagcctgggtgcagtggctcatgcctgtaatcccagcactttgggaggccgaggtgggtggatcacctgaggtcgggagtttgagaccagcctgaccaacatggagaaaccctgtctctactaaaaatacaaaattagctgggcatggtggtggatgcctgtaatcccagctactcgggaggctgaggcaggagaatcgcttgaacccagaaggcattgcagtgagccaagatcgtgccattgcactccagcctgggcaacaagagcaaaaaaccccatctcaaaaaaaaaaaccaaaaaaaaaaaaaagaaataagagcaggttgaataggcaaaacagctagcctgactcggtactggctcctaacccgcatatcttttaagtcctccctgaccaggaaaaggatccttgtagaaccgaagtggatctgaacttacaaagaccaagtagattaaatagagaataaaaggagataagaacaaggtgaaaagcagggatcaagattatgtggatggaatttcattgacattgggatatagctaaaactcacactcaccatagaaggataaaaggataaaacttgtcattttttaatataaagcatccggcaacatgtaacattgtcttttaagatgttgtaaggaaataccatattgcataaatgaagagcatgtatatctagaaagtgaattttgtgaaattccttttcagcaatcattccggccaagattccttggtgtggctgaacaattacacaatgaaggtttcaaggtatgttcattagttttaagttgttttctgtcagcatggaatctgtccacaaatcaaaatattgcagaatattggaaaagaaatagcccaaaatatgtccttttgatatgaaaggtttaactaacttggtagtttcaaaacttagagtcaaatcattaaaaagactggtattaacttttaacaaaattaccacaaattcaatagaagttgccagctaaaaactgagaaagtttagcttaagcacaattgagacaaagtcccaacacatttccatatgtttttcctttttttgttttcatatgaggttatagattctagctgtgacagttacaggcaaaacttctttgcagtgaatacctccacacaaagcctggttgagtaaaacaaaattattcccaaggcttatgatgggcctgtggccatggggattttttgacctgctaacaaggaattagccatgaataattgagaaattattaaatttatgagaaattgtcattgaattattaaattcaaattaaacatataattattaaaatggaaatgcaaataaaattgaggttcttaagttttttaaatcactgcaaatatataaaaaatgtttaaagtgcccatgcctctggactgtgagtccaagtctctatccatggcactatactacttctcatgttcagcaatttcttcttctttatgttttaaattacatgttccataaaaataagaaatcactgtgatacggtaattgattttttcattttaaatgcagctgtttgccacggaagccacatcagactggctcaacgccaacaatgtccctgccaccccagtggcatggccgtctcaagaaggacagaatcccagcctctcttccatcagaaagtaagaactaggcatactgttttctgaaataatttagaggattaactttgagaaccagtatatgaatatttcaccttacttgattgcaagtcttttaaaacaaatttaaaaatgaatacatttgtggatgattgtcaagtttcactctccatcactatggaatacataacgtcatgtgtacatggtgatatgaaacgtgtttcaaaatacttcttagtaaggatactttccttgacggaaacaagtgagagcatgaagaatgtaatgcagcactttatatttcatgtcaaacttatattgtgtatagataagtacatcgagtataagatgaccagctatatttcactaaggttgtgcataataaatcaatttgttgagcacttactacatacaggaacctatgttgagtactatgatgatgtcatccattggattacctaattggtcattccttgaccaggttttcatgccttagaccatgtcatcattagattttgtacgacattttatttcagcagattgtgtgaatcttcaggaataccattgcatcaacccttaaagatctatgtggcataagtacataggagataattctctgctgttttaagatagtgcagcctacagaatggctgtgccattctatgcaatatgttatttgttagcgttcttgagaaaccaacacataaattattatcactttaataaaataatggcattgtgttcaaaccttagcaggcctccaaggatgtaatagctccgtgtttggggcattgtaaaacaataattagcactactaaggaggcaatagagttaatgtgggagtgggaacatgggggtgaaagggcattcaatggtggagggatcacctctttttaaaaaataagtatctatcaaattaccaattcttaatgagtgaacagatagcattttaaagagaaaacaaacatctgcattccattagacttgcactagaattccttcaagaacacaatataatccctatataagtgtaatttaaacatctacttagcaatagaggagggcagatggcagtcaactcagcatggcattgacttgaatggctaagagagcaatttatgttagtattttataaactaactataaaatatgccttgttgtctataagtttttgtttatttttccagattgattagagatggcagcattgacctagtgattaaccttcccaacaacaacactaaatttgtccatgataattatgtgattcggaggacagctgttgatagtggaatccctctcctcactaattttcaggtatagtcttttccttggatatagactggatgggagttttatttctgtgcctcccttaagagtgtaatcagtagatgcacatctctcttttcccctctttgtaactttcagaatagagaggaatttttaataatctaaaataatgatgctaacatggtaggtcatggcttaaatgggacagttggtgatcaagcaattgagataatcaaaggccatgaatggccatggctctctccttacaattatcctttgaataaaaagtgacagcatgacatggaataaagatacaaacttttatttcattgtttctaaatgaaagccaccatataaaagcaacaggttaatgatggtccagatgtagcacaagtgcttgttcaattcacagaaaatgattgcatgaggcatgttcagtttcacttggacatgacccatcgaatttatcacagggagaaacagagtggagactcattaactttctgcctatcatatttattttttatgcagaatcagttttaatccctatgggaggagaaataagcgtattcacagtgacatctgagatataaaagaaagtccccatggtgaggtctgagacatgggagaaagtctccattacataaaaaacttttatgccttttatcccatacccctttgaaaactggggacagacacttgtgacttttgtcttcattcattaaaaattcacttttatctcatggagggtgctgattcctaccattatattttcaggtgaccaaactttttgctgaagctgtgcagaaatctcgcaaggtggactccaagagtcttttccactacaggcagtacagtgctggaaaagcagcatagagatgcagacaccccagccccattattaaatcaacctgagccacatgttatctaaaggaactgattcacaactttctcagagatgaatattgataactaaacttcatttcagtttactttgttatgccttaatattctgtgtcttttgcaattaaattgtcagtcacttcttcaaaaccttacagtccttcctaagttactcttcatgagatttcatccatttactaatactgtatttttggtggactaggcttgcctatgtgcttatgtgtagctttttactttttatggtgctgattaatggtgatcaaggtaggaaaagttgctgttctattttctgaactctttctatactttaagatactctatttttaaaacactatctgcaaactcaggacactttaacagggcagaatactctaaaaacttgataaaattaaatatagatttaatttatgaaccttccatcatgatgtttgtgtattgcttctttttggatcctcattctcacccatttggctaatccaggaatattgttatcccttcccattatattgaagttgagaaatgtgacagaggcatttagagtatggacttttcttttctttttctttttctttttttctttttgagatggagtcacactctccaggctggagtgcagtggcacaatctcggctcactgcaatttccgtctcccaagttcaagcgattctcctgctttagactatggatttctttaaggaatactggtttgcagttttgttttctggactatatcagcagatggtagacagtgtttatgtagatgtgttgttgtttttatcattggattttaacttggcccgagtgaaataatcagatttttgtcattcacactctcccccagttttggaataacttggaagtaaggttcattcccttaagacgatggattctgttgaactatggggtcccacactgcactattaattccacccactgtaagggcaaggacaccattccttctacatataagaaaaaagtctctccccaagggcagcctttgttacttttaaatattttctgttattacaagtgctctaattgtgaacttttaaataaaatactattaagaggtaa

SEQ ID NO: 44 - DNA, 201422 bp, Homo sapiens; identical to SEQ ID NO: 42
  source 1..201422: mol_type = genomic DNA

SEQ ID NO: 45 - DNA, 122508 bp, Homo sapiens
  source 1..122508: mol_type = genomic DNA
aagatcgctgtgcagtcagccttaaacactgactgcacccctcccagatttcttttacattaactaaaaagtcttatcacacaatctcataaaatttatgtaatttcatttaattttagccacaaatcatcaaaatgacgaggattttgacagctttcaaagtggtgaggacactgaagactggttttggctttaccaatgtgactgcacaccaaaaatggaaattttcaagacctggcatcaggctcctttctgtcaaggtaatacccatattgattgtttctgataaaatactatggggtatagtttagcagtgaagcaaaggtgtcccttacaaggcaaatacagttttgaatgtagctctgaagtactaatgtattaatgtttcctttactgtggaacctactgacttagcaaatgctaatttttatcttatctgagtaacatgacagtaatttttacccaacataaagaatgatgacaattcttgtgaacatgtaaaatgtaagtacactgcttgaaaaagaaacatcttttctttcatagatagctttctgtgactagatactattgcttacagtttggatttaaaaaatggagctgcttatatgtgtgtgagccacattatggtacacagtgtgttaaggtctgttctataaatagggcttactgaaaagttctcttttgaaatatcatttaaacattttaaaaacataattagaaaatatgtgtttttgagatttgcaggtcatcatgtagacactgctttagctttttccttttccttctggctgtttttttgggcaggctaaacttattattttcattttgtagagtaatacatagaggcagatagcagctgataattctgtccctccacaggtatctataattgagagggcaagcccaggaaagaaacattaattgcccttcttcctgccccccagcattgaattatgaaattcctgtaggaacctctgctccttcctgcaactttatgaagacgttcattatcagagaagcctgaagttactccataggaactttgccaatgaaaataatctttagtgactataagtttaagtaattatattagctttagatatattgcttctttagcagcaaaagctgtaaaatttgaaatagaaaaaacaaaagaaaacctctgtctgttgatgtgaaaatgggaactcacagtttggagtgttctgcttatactttgcatgctcattgagttgactaagcttctattgtttcagttgctcaagtcaggattcagtggggttttggtcctgacacctgcaaggccaaggaatattcatagattcctgtggctgccagggatagggatgggaaaggaatgggagtaaaagaaaaggaagagagatggagacagggggaggggaaggggagaagtgtgagggatgggagggagagagagagagaaagagagagaaactagctcaagatcccaggagaaaagaggaaatacatatagtagccttagtggtgtgttaacaacttcagcctttaacattgagaagattctaacaagagtataggaaattaccattttaaattaagaaaaccagaaaggaaaatgtcttttatgttgttacatattccaatgtatccaattttactctttttaaatggacatcatgttttaaagatagttaaaatcattaggatgtagttacataatggccataaagggcactgggagcagtcactaaaggttagtggcattatgtctagttatatatattttcttgaatttagcttaattatagcaaaagaatgggaaaggagaatattctaaactaacatcaaagacattgtaactagatgtaaactatgagaatttattgttagtaatacctcaaggtactcatgtatcagttcagagaaaatcaatagtaatgaaagttatcccctatgattatatgtgccatctaatacttcaaagttgggtgacttggaatatcttcttctcactctgtgagaaggtaggtatgtaggtaaggataggtgcatcttcatcagaccccagaaaccgcgaaattgagtacttacttaaaatggcacagatatgattgaaattagaatccaattctccaagatcacaataagtgctccatacaaccaccaccacaatcacaaccacgacaaaatggtctaattatgtggatggattactgtgaaagcagttctagctcatggtgacagatctgtttcaagggtctgtcacagtgcacagctaagaatgacaaatttgtaggagcactaagccatcatttcatggtgtaaaagccattactcacactcaatcattactggccagagttttggaggaatgccaagcacaaaaaatagaagttcttgaacttcacaatagtgaattaaaattccatagaacagcccaaggggacttgtgttattattcagttattgtgaaatagtcctctatctacttttcttcctgccttcactttaaaaactcaactgtcttagaaaaatatatccaaatttactatttttagatggacatcatattttaaagatagttaaaatcattaggatgtagttacataatggtcagtgaagggcactgagaacagtcactttaaaggttagtagcattatgtccagttatagatggtaaatggattgggaaagacaccctgtagtcacatctataatcattgccctgtaaattgggttgctttttcgacatatttagaggtttgcttttcctctctctttgatgacagagacggtgggtttgacgacagcaatgacgcacttataattttatgtggcccttccctgggtatttgtcagcggctaatatttatagagtgctttgccaatcggcacagttgtattttacttacaggaaagaggaaagaatttcaaggtgctctatattttaaagaaagttgatatcaagggtataaatgatcaacaaccataaaatactaaatactaaaaagttttagataccataatctttttccattagtactgaaaatgttcagcactcattattacattcagcaggctgtaacagtgtaatagtgggatatactctggattgggcacaaaaagatctggaatctaacccctgttatgcatttcctaatgccctgttcttggacaagtcacatattctctgaacctaagttttgtcatctgtatagtgcaaatgatgactgatttacttgacaaattatgtgattgtcacacatgaacaattctcaaaaatctttaaagttttaaatttaaaccattaaactgaacattttaaagcaaaaactggatatttaaaaaaaaattccattctatacattttagtagaaggacttagtagagggttagatcaaagagtccttatgttttttatggactacaagttgttgcaatgacaaggtatttgataagaattctcaaatatttataataatgatttgttcacctttgccttaatattaaacatctctaagaagatatttcttataataaatcagactcaaggaaaatgaagcaaataatctttttttttcagtatggcaaatttaattccaaaaggcagaatagacaccataataacctatttcattcattcattcatttattctttaataaacacggaacctctaccatgggagtatacaggaagaatgataaatagaaataagtggatcataagagtatagtctctgatttcaagaaacttacagacttcagaattctgagttcacaagtctgggaaagtcatcaaagctaaatagttttatttttacttgcaaatgaatttggaaatcaaaagtattaaattgtaaagcttaagttccctatgaatagaaaagtgttcaataagtactccttctaacattaatccactcattttttaacaatggtgacctgtgttataattaagctaggaacctaacaatccaagtgtcctctctgatacttcagctacgaatgagcactggtagtcattatttcttttgaaaggcattcatttttaagattttatattctgattttcacatagaagtatctatttagttccgtcttgaggagctattgtcatttgattagaaattggcaactataaaaactcctacaattagaataatttacttacattgtagtagctttaaagatagtcacaggaaatataactcattatcatattggagcctctgtacacgttagatgtaagagtggggatggggttatcacacacttttaagaataactattttattggacttttactacatatagacacattttaggacggatttcatctatggcaaactacatttttgaaatattaattgtgttcagtcccaaatgagctgttgcagaattagtttgcctgatggacaactttacatacttttggcatgcaatacttctctaattgggagatggcctttcttttgaacattttaattttttccattttttatatccccaattttctaaaatatagattcatttattagtcaccaacaacgccttgacattatgagcttcttgacataaaactcttgaaaaaactatagtttaaatgtcctagactaggttaagtgagtgaggtacctgagatgcaaaatttaaggaggctgtcactgttagtgtcatggtgtatctctttgagagttaggccctaagcacatcactcagtaccctagtcccagctttgggtcagaagctaagcattctggctgtagaactgcccaagggactagtactaatcttgacctgtgctttcctctccctcattccaatttgctcatgtctagccagactttctgacgatctagaggtgacattaggtcttattgctatggaaatggagactattcctctgcctttacatctgtattagactttcttcatatttccaacctgttccaaaaattgaggggtgctgtagaaagttttcagtatctcttaggcaatgggcatgctagaattcacttcaagccttcaggaggagtttggtatgctacgctgactgcccttgatgggatttgtatttcctggggcatttgcaatgacggaggcccgaaaaaagctgcgcgggccaaggtcaaagtttgtgttaggctccttagccctagggatctttagcttccatttgattttcttcatgtgatctaaatgagttgaacttataaaaatattttcaaggctactctgtttgctttttatttttttcaacttgttaaatgctatacattgatcttttaaatttcatagggaggtaactgactaatttgaagttctcataaatgaatcaatagggttgctacattatgaaagaattttactaagtttcttctataatgcagactgaaatataagaccattttaatttatcaccaccatacagtaaaaattagcttatgatatgtaggttcctccaggattctgaacaacttgccacatagcagatgctcagtaaggcatattaataaacctacactttatgaacatactttgtaatgaaatttttataaatgctgtattttatttacaatgagaaaccttattagaataaaaatgattcataaatcttaatcttttgtttataaatgttcaaacataaaagtacttaagtaaattaaccttttgattttgtccccttaacattggcttatgtttaaccaaagaccgatgacttaatattaacttggaatgttgtaagattattaactgagaatgtggtaaggcctaattgattactgctgttacagtgcttcagaattttgaagtgttaggccttgtaactgcagagaagtctcatgaaatatttcaaagacaaattgtgctgaaattctaaatttcaaaaatccatatcttaatagtgtaattccaagaataaaagaataagatttcatttacttgattttaactttttaccatattatctacacaataattacctgaaataaattctggctttaggctttctacttttcagtgcttagttcagatttattttttaagaggatgagtactgaggcgaactaatagcttagaaacatcaggtaagccagaaagcacgtatgttatatagccttaggccttggtgaaaatggaaaaaaaacatgtggggcctctactttttctgaagtgcaaatagtttacgtagataaatgattcaacagcaataccataatcccagagtaaattattttcatttttactactagctcaagggaattactgacttttaaatggtgtttttttttttttttcaaaccttttatggaatctattgctgaattagcttaaggctttacaggcagaacattttagtggtggagtctcatatctaggagaagaaacatttctgttcctcccatttcacagatatgtaagtgctgaagttaaaacaaggacacatggatgcctgtttttgtacgtaaaacaaaatatacattagcaaatttggttagaattttaattaggcttcaaacaacagatggatctttttaatttgaagttttgttattgtacttatatacccgatgccatagttgtgtttaacctggcttcagaatgttctaagtcatttcttctgctgttattttattgcttactcaagggctcatttacatactgaatgttatggcaatacgacacaaatttgatttttccttttctttttttgagaataggttgtttaaatcaaagcataaggaaggattcttgctttatatggctgtcaacaattatataaataggacattttagggcaatgctgtttacagttgacgtatttcttccatttcaacctaaatattgtcatgtgtttgtaacaaaacatgctgtttttcagtttcaatgtgtttcttcctcttatagtcctgtaagctccacatatacaaaagcctaatgcaattttaggctgcaagaaaagtctcattttgacttgttttccatcttgatataaaagacccgaagaaaactggttcgaagtaaaggatcgatgtccttagaattagttcagaatgctgatgggttgtgaaacaatacatgagcaatgagtagatgatttttaataacataatactgaatgcaaaggagaacctaacaataatgataaacactaggctgcttcaaaaacttttatagattaaattacaaattatgtttgaattttgactgttacttcctaagactaagccctctcaatcagtttagcatagcaccagggacagatgctcaaacctttttcaaggggaatgtagctgtgtgactctcattaatagctgttgcattattctgattctggaaaacactttgaaacatctacccttttaaactgaatctcagactgagtattaaagggtaaaattgcagtcacttatttgtggtcccataaagtttatgaatcatcttactaagaaatgaaaatatatccataaatgtaggcttacaatgaattttaattgtgaggaaaatttaaaacccctaaaagagatgagatttttagagaaatttcagagcttgcagtattctatcttgtaacatcattagaacattgaaatattgtttgacaatggtgaaacaataatatcaacatccacggcagacaaaccaaaacaattgagagtttattggaatttctacttatatgtaaccccccctcacaaaaatgtattttcattaaaaattacttataacctgtgaaagaaatctcagactttacaaatattaagaattgcaacattaaatttagttaacaatgatttttttttttttgagatggagtctcgctctgtcgcccaggctggagtgcagtgctgcgatctcggctcactgcaaggtccgcctccggggttcacgccattctcctgcctcagcctcccgagtagctgggactacaggtgcctgccaccacgcctggctaatttttttgtatttttagtagagacggggtttcaccgtgttagccaggatggtctcgatctcctgaccttgtgatccgcccgcctcggcctcccaaagtgctgggattacaggcgtgagccaccgcgcccggcctagaatgctcattttaaaagtaatataggaatgggggccggacttggtggctcacacctgtaattccagcactttggaaagccaaagcaggcagatctcttgaggtcaggagtttgagaccagcatggccaacatggtgaaaccccatctctactaaaaatacaaaattagctgggtgtggtggcgcaaagtgcctgtaatctcagctactcgggaggctgaaacaggagaattgcttgaacctaggaggcagaggttgcagtgagccaagatcatgccactgcactccagcttggtcgacagagagatttcatctcaaaaaataaataaataaaaataaaaataaataaataaataaaaaataaaagtaatatgagaatggagatcatatagctatttttgtaattcagtttaatttagaaataggagtactaaataaaattataaagtaagattaaacatggagcaattacatatacataggaaaattccgttttagtccttctaaatattgtgtgtgaaaaaatctgcagtcttatgaatcttcctccaataaattttctaacaaaggaaacatttagtattactaggccgtagagactagtaatttaatctttaatttttaaatttatatgaagtaacaagagaacacaatttttcaccgcttattttataacctgattggctcccagattcacaatacgtgtaggctccagactaaaaaatgccaaactgttagtggaaagtaaccttaaggcatttttcttgatatccatattagctacaatccttggcctatttctttggagtatgtttacatgttttatgaatataattacataggtgggagaagaaaaacatacaaacataatttcaaaaagatggaaataatgttaataattgcagccacaatttaaacatattggttcaaaagtttaaacgtatttctttgttttatgagattcaaacaaaatctcataaaaacatgagatttttagaaagtacagaaaaatctctctctctgtatgaattttattttaggcagttgcatgctaaacttgtgcttggttgttcaaataaagtgaatgttcacatgtggactccactcttgaacatcaggcaacttggaagtaacattaactttggcataaggactttgactgatcatttggtttaagtgcctagcatgacttaggttctctgtaaacaaatgctgagatgatgtttggggagcatgctctctattagggatcagcatctgtgaagcttcaggaagtagaactggacagagaactaaactgtaatgcagttttgataaagccttggccaacgggataggaagctgctgcccaccagactttcctggatgtggcctgaacctttctatccaggcctaacttagacactggtcatggggtattccaagaaagtcatggggcaatgcagccctctacagctgagatagaccctgaaaaatttgacagcaggagatggtttgctgacctcactcctcacagcagggcagcaagtttttccattattaatatgaataattatctatgttatctagaaattgaatcctccatcactggggaaaagggaggggggactgagaggtggatctccttattcatcacagcatctagggttccaacaatcttcagtgcttgagaactcaagggcctaggatcagtgcaaattgttctcgaaacctgctgattctcctcagattataatgactcaggtaattcatgacttgacatttcactttgacaatttacagatttatagataggtagttcttggttgacctgggcctgttgtggcttatccatggcaattttgaattaaggctcttataaataaatttaaatagagttcatgcttaaatttcttttaatcctcacttacgaaattggaaagcagaaataaaagtaagcttagaaaaagaaaaagaggttataagtcaaacagactgggttcagaaaccgctgctcttccagttgctaatagaatgatctttacttctctgaggctcagttagttcaagtgtaaaatggagatttcaatattacctacatcattattttttgtgaagattagatgagaaaacccactaatggctttaaagatagtattcagtacgttcatgttaactgttattaaggatgtcatagggaattgatcagaatggagttctcggtgacacaacatgctcccaaaccttacttttccaacatagcttcataattctgtttgaagtaagatacctttcccagaacagtataaatttattattcaaatccaaattctcaacttatttgtacaactgcatatagactttaataaacatagataattatatatgcaacccagtttatgttttaataggttatcagtaaagtaatggcagaaggtagaaataggatagtgacaggtcaatctacgtctaccagacatgcttaagaagtgttaacgctttactttatccaaatatcagtattacagcttttttaagggaggtattttaacatttgaactcacactagtgtaagtttaaagtatacgttatctttaattactatttccaaaattaattataccaacatttactgaatgccaaagatgtaccaggattatacatagatctcaacaacaaaaaacagtaaaaatataatagcctcagtatttttaatagagggagaattattattagttataacatagttggggacttggtatagaaatgtaatattgtaagcatgagaccacatcagtgaattaaaacaaacaaattttttgctgacatacagtaaaatttggcaagcattttagatgaaaagtaaaggaagaaaaagagaatgtttgggttatatatactgaatgcagctttattcttttccctagtgatggaggattagatttctacataacataggtaattattaatattaatgatagaaacaattcatgaggaaacctaaagaatgacatttagaaatcacctttttgggtcttcttctgaaggcattacttatatgacacctgaatggtagaagaaagcctaagggtactttttgggcagcaattgccacccagccttaactcattccttactttcatcttctatcttttagcatgaactatacctatgtgaaatatttgtctttgctttcaagaggagaagatgaaaattagtaaaatgaccagaagtcagtgagcatcaaataactattttgaaaacaccatagtgtcagcattgtaacatgctaatatcacataatgaagtacatttctatgcattcaccaactgtgtagtgagaacattactgtgtggacaacagtgggctatttcagtggggatacagcatggaattaggcattgtgttttccagatgtaacattgagaagttaaaatctagtacggtagataaatacctttagcaattaaaaggtaacacacaacagtatacaccaaatgcagtcagtggaagcacaagaaaatcagtgattaattctgatttagtacacaccatgggtactaggaagcagtaccaggatgtaaaaggcaacgaggaagacatttatgcacaaaggactgacagagaggtggggaatctaaggtattccatatagagagcgagccagatgagaggactttgaatgtgaattgaggaatttggggaatggtgtcacccaattaatgtttaagaaagccttaactatatttcataggacaggtagaagtaaggagagactggaggcaggcagaacaagtaggaggcaatagcaggtgatgatgggatttttgtcttgggtggccatgcaatttcatatagtgtgaagttaattctaaaaaccaataggtaactatttattagttagagccattattattattagatactatgtgatgaggtagaactatttttaattggagtattatttaaataactagcctgtaggaccagatgtgacttgacagttgtgactccaagatacactaggaaaatatgacaaagggagagaggttgagactccaagaaacttaatatttaaggttttaaaatattcgtaagactaaccactgctagaaaaaacgttgcattagatatctacattttagataagttccaccaataataaaacaagtgaattaagaatttgaaacatggttaaaataaaaaattatatgcagtgtaagatgaaaaaattactgtttaatattttcagaattaaaagaaataatcaggaggatgggtgtggggtaggagagcatatgctttttttttctactataacttttcctctcttatcaaattcactatttaatcatttagaaacattctgctaaatactcagttgattatctgactaaagtaatttcactaaagtgtgaacaaagcttagtgacttgtctactctgtgctagccactggtataggctggaggtgcactagtgcaagaagcagacccaatactctgcctgcatgaagttcactttctaatgtgatgaaatagataataaaaaaatcactagatggtatgttaaaaggtaatgagtattatgaagaaagagcagaccaaggagaaagagggctggggaacatactgtaattttaaatgaggccatcaaggcagacctctccgagaaaatgacatctaagccaagaggaaggaatctttaaattttggatttttaatacaaaatttggcaagtttttttattgaaattttaatttttattgcttaaaacatcagtggaaaagaaagggcaaattctttggttaaagcttaatctctcaagggaaaaatatttatctttgtatttccacgtatttcagtgacgcctcagtgatatccttattgaagttttctctgttttgtaatccattcccttatctagccttttactaaacgagaagactggagacattcatccatttatctacagagcctagcaaggtgcttgacacctggtaggagttcagtgtctgagacttgaatgtctaaatggtcttattggcatatacatttttattaaacacatagggatcatgtcatgataaggtcctttattttatagaactcacatttatataatcctttggttacttttcctgacattctacaagaatacactcttcttttcattaagatttcctttgtacttccccttttcaaagtaagacgtgctctggcagtaggcacttaaattatacttaaatgttataatctaattcctagcctgtggacctctgtcaacgaggactgaggatactaaaatatcttatgatagtaacaaggtgatttcttttatactccttggaatgaaatagcatttggggaactgttagttagaagaaaggattccaaataatagctctttgttcagtgtttgtccatcaattcatagataagtcaattggcactcatcattttaaatgcatcaggggccagtgtagttaggagatatatagagagtactttaggcagtaaacagaggctttgtaacaatataatgtgtagtgggaaagaggattggaagatctataaaaactgccaaaagaaccaaaaatataattaaagcagcaaaaagacatattgaacacaatctcagggactatttcacgcaatagcaaatgtctcttcaactacagagatggaaagcaaaatagaaaactagtttcatgaagggagtgagaaaaataccaaacagaattgtaggaataggctcacaagtgttgattttcttatgctaatttttacccttctttaaaatgatcagaaagtgtctaacccagatatgggataatttgaaattctcagatgagaaaagagaaaagcaaaataaaaatataaacaaaggtaatattttaagcaagcatgtctcagagtagcacagataaactgatatgtagaaaactattgaaatttacagtctacactcaaattttgccaactaaatacagttggtttaggttctatcaaagttacatattatctaaatttttttctttttcttttcattttgtaaaagcatggaggtttacacacgatttcctcaagaacaaaaaaaacaatatttccagtagaaaatatttttcgatggcaaattttcattacttagacgagaggtttcacctaataaaacacatcagagttacctggggagttttcctaataaacacacttctattcagacccattagcagagatatttgcatagcttataataatctttagaaatacactgaatactatcactcttactttctaaaatcttcaacttctgtcttgaattgtaattagacaaaaactagcaaattaaaacaaaatttagaatcagaatagcacattatcagaagaaacatgcgaagctgatttcctggatacagaagcagaattcagacttctgtattaagatcatttcttccatagaagtctggtttcactcataataaataataaataaataaattattgtggtttcctttgtgctgagtaactctaaagtatttttaaatttagtgaagacaaactccaactatttaaagtgtcaagcttgagatttcaaacactgggtcgaaggaaatagataaatctttaactcaaagataatttgataagcctagtaaaggacaaaatatttttggctaatcttgcccaggaacacacgcatatgctcactcacacacatacaaacacacataaaatgtacagtagagtacattgttcaatctttctcagaaatacaaacttgaaattcacatatcgtacctctgatttaaaaaaactaataaaattatctgttgagaggaacatcttaaacatatcctatcaattttaatggaaaacactaacatagttttgtgtgtaaatgtaagttaataggtatacacactcacacataaacaagacgtcggaatatagtatattggtttaaaggtaatcaagacattattttacattgcagaacacaatcattctaatgacaagagacttgggtgctttggatctaaaagaggcatcttatttctacagagagaattattatagaaaaataacgggctttcttcattttaacatttgaaaaattgagtgcatgttataaagcaagaggaacatagaaacaaaggtctagaaatcatttatggagttcctgctgcctactaaagtttgtgtgtgtgtgtgtgtgtgtgtgtgtgtgtgtgtgtgtgtgtgtgtgtgtgtgtatgtgtaatgggagtggaggtggggtggcaagatttaaaaggattaggcactttggcctcagtcctaaaactgtaagggaagtaaaatgaagaattagtatttttttttgtcttcgatgactacacttaaaccttgcagaaagaatagcacaatgaactcctttacttcaggaaattcgactcatggccagacttcttttctctatatgcctgtctatccccctgactgctgattactttgaaggaaatctcagatatcatactattttatccttgaatattacagtgtatatcttttaaaaggcaacaacttaaaaatgtaactacaatcctaagaagatcaatcttaaaaaattacttagtataatcaaatatcaatttatgattctaatttcctcaattattgcagatatgtttttctttatactttaatttttaaaaaccacattctaattagtttgtcctatagagtttcttagagaatctgtattttgtctcctaaggtgtagttgaaaacatttctctctcccttgaattttacggaaattgagagttagatttaaatggtttcaacaacagaatttagagtatttataaggagtagatgatgtctgcttcttaaatgtttttccagttgtccctcttcttagctaagaatttggtagacactggctcaaagattattatggcaaagttatcaaattccgaatgccatagtatagagaaggaagtagacatggatataattaactctaataaaaaagcaaaatacaatatacttctagaatgttccacagtgcttggttttgtgtcagcattaagagagtgataaagtttcagtttcttcatgaacataattctggcatggaaagggcaacccttgggacaactccatcaaacacaagagctctgtggaacacagtttgatagataatcttgaagattccttctggctctaaatctcagagtgatgatgagctgtatggtacaattcacaatgtttttgcaaactcatgaactttccttaaagctattcttgagcaaagctagggaatgataaaggggaaaagacagatacataacatttcagctaaagtgaagtatttctggcttgttaacaactctacaagtaaacttagaatagacaatgtatctgcatgcttcagttcctcttccaagaaaacaaaacaaaacatctgccagttacaagagctatatatttgaagaaaagtgacaagtaataggaaagcaactggaaatctgggcattatggtttcattaaatatactgtgcctttatttaatatgtctgtgtattttacctttggaatatttttgtgtgttttgtattatgtattctgctaagattcatgcaactgtttcttcaggcacagacagcacacattgtcctggaagatggaactaagatgaaaggttactcctttggccatccatcctctgttgctggtgaagtggtttttaatactggcctgggagggtgagtaatgcttttccaaggctttatttttcctctagtagagaaataactggaagatctcactcatggtggtaagttgaaatcactgcatcgtagtaagactacgtattgtcctgaagttgcaccatgccttgtgcatagcctactgctgccgtccttgaaagaaagttagacatgaacttcctgctactgtaaatgaaagacaacatgggcacactggtggtcccctggataaaaagaacaaaatgaattctagaaacttaggttgtgaggacacaggttatgtgagattaccaaatggtttctgtaaggggaggtatgggtctgattaaggtgaaaatcggagcaaggaaaagaatagatagtatattctagtgctatttcattaggaaagaatcaattttgcacatctaatatgaaatactataagaagattagaaagtccttgggtattttatataattttgcactctagtaagaaagttgaaataacagatacatttattatctttaatcaatgagggagcatctgtgtagatctaatattttcaataattatcaactgtgacctgccttagtatttaagacctgctaacatgtacagcaatgaaaacgagagttgctacagaaattaagtggctgcttttacctagttaataaatgtttgttcacctgggaatcaggaggctgaagttctagtctcaattctaaggataactaattatataatattgggaacatcacttaagctttttgagttctagtttcttcatataaaaagtgagggggttggattaaatactaatttacagctggggatttaaacaattatgtgtcttaaaaacatgactagattgattgaaggggtttccaatacagattcaatccaactagtattctatgaaatatttgataaattctttagagaaattcaagttagtctcataaagacaagggggcattaggttcactgatactgaatatactaattgaccaaacttccattatattattaatttatattctttcttaaactcttgcctccctgtgtgaaatgaagaatattagaggggtttttaaatagttccactggtgagaacattaaattacagtgtatgaaatctgtttgcaaagttttgcttcaccaggcaattatttaaacttttcgacagcactaattactagctgtgttaatatacctgccaacaaacaactgtttaatatagatcagcatgatggagggcactagagttttcttctctgtgatagtttacaggtaataaatcttgtcacatcacaaaagtcaaacaggagctgatggattaatttgctcccaacactgtagttctctaaaacaaagtatatttattcatttactgaagagtattgtaagcatatgtttaaagggaatggtaagttcttttatggaaagaaagaagaaagagaagtaaaatcaaattaattaaagtttttttttgatgtaggaaaaggtattcatctataagattagtccatagaccctattttccattgagaaatgcttctttcattcattacgtgcctcactcagtaaggtggttgataattaaaggggttattttgtttttcatctttaagcaatgcatttatattgtgggcaagccttggttaaaaaattatcagttcctgacagataagagacatctgagaaattagctgatggaagctgcggaaaaacaccacagccctcgagtcaccttagggattgcagagctgaaagactatgtattttgttgacaaggttagttctggtaggcgttagtctggatggtgttgaagaatttatgttgactactgcctgcgttaaactttattggtttcaaagtcgttgattctgtgcccctgagcacctaaattcactttcagttgtaatccacaaaaaaggatttagcttaactcattttgcagaaagtggacatggaagagagcaggaaaaaaacctcaattgcagtgtattccagtgcatggaaaaagtgtagatagctcctggtattcatgggaataacgtttcttcttcttaagaataagaaatatgtgtgtgtgtgtatatacacacacgatatgtatatgcacacacacacacacacacacacacacgatatatttgtatttttcctctcacccaaacttaaaaatatagccctcctgcattcctccctaattccatatcagtactttaaaatagttagttggcatcttttaacttagaagtcagaaatccctcaagtcaagtctgcgagatgaatttttttctaagcagataataactttcaaacttatatgcttctttctaaaattaaaatattttaaaaatcaactttattgagttattctttcatataaattaactcacttattctaaatattcattgaattttaataatcatatatactcatgcaaccaccactaacacaatcaggctactcttcagtatcctaaaaaatatcaagaaaaacttttcaatgtttcgatggttactatcttggtgaaactggcagccctcaacagtaaatatcagtttgggctcaatgatatctggtaggccagggaaatctttagagtatctgcaaactttaaatagagcagggatattttaaaaattaagatgctagcaagggatttttaaaggaattaaaaaatttaaagaaattgagggaataaaacttatatgaaaatataccttggtactcacgagttggtttttctttatatcaatgacatcgtggtataaatttttatattctgtcataacatttccccaggtacgttaaaatctagagacattcttgttggattcttctcattttcaagggttaaataattcagagcatgtatgcagattatagctttgtagttacatacattatttgctgataattttttggcatgtttacccaggtacccagaagctattactgaccctgcctacaaaggacagattctcacaatggccaaccctattattgggaatggtggagctcctgatactactgctctggatgaactgggacttagcaaatatttggagtctaatggaatcaaggtagtaccagtggtggccatttaaaaagtctcaatttgagggagtatagttgacttattcttaagaattaggatggccaaactttcttcctcaatacggtagtacaaatcattaagctcatgtattcaatcttattcctaggtacatgagaataatctttaacttgacagtattttgagtttcatttctcagggcactttgaattttaatgcgttggatgaaacttggcttaacttgaaaaaaatgttataagttcaaataacaactatgctataaaaggattggggaagaatcaccttttaaaaggaatttggtaatgaattctgtatcaattatttgctttttaatcttagcctctaggggatgatttaaagatagcttttatgccagtctaaaagtaaacatattaagatttcctaaacaaggtaattttggatactctcttaggaatatatatcatataaacaattcaaaaatttatattccaaattcaatactattttttcaccattccatttttgaatgacttcaactgatcatttaacttagttttcactatttctcacaatttcccatcaattttttctctgctttaagtataaattaaaaatgattttgttcatcatgtgcattaagccagtaattattaattaaattcttgataaatgccatgcatgtcagaagggggacctagtttagtctcaggatttaccaagccaggtaagcctgctccctctcaggataattaatgcaacaattacatattttaaaagaagggcattgatttttttttttttgcctcttgtttttaaaaatcctaagtctcatgtcagtggatatcataaaacttaaaaacaaatgcaaattgactcacaagagttggataatatcttgtgataacctctttaaaatgactgtctgtctttctaggtttcaggtttgctggtgctggattatagtaaagactacaaccactggctggctaccaagagtttagggcaatggctacaggaagaaaaggtaagaaatgtaatagggcatccatcatcacctaaggaaggttgagaaggtgcctgtagattcagaagtgccaagcagacagaggaagatcatgtagtttgggatctttgcatttcagagagggattccttctcttactacataaaggctgaaatgtctgaattcctccttaaatgctgatgagcacatattttcagtttatccactaggtggcactcatacatgcttggtagcacttcacatttgggaagggaggggtaagataaaattttagcattttctcttctctttagcaattgagtcttttactctccttcaccgttttatctagaatgtagtaatggaacttgcttcatgggttctagtgttctagtaccagctctactgttaactggttgtgtaactttgtgcaggtcacataatcattctatgcaatacttgcatcatctctcattcttatgagtataagcagattaccatcaagtctcgttgggcttcaacattatgacatgtaattatatataatttcatttgacatattaataatgtaagaaaagggttataaaactttatcttacacttttagtttaaatattaatttcttttcttttttttgagatggactttcactcttgttgcccaggctggagtgcaatggggcaatctcagctcactgcaacctccacctccagggttcaagctattcacctgcttcagcctccccagtagctgggagtacaggagcctgccaccatgcccggctaattttttgtatttttagtagagacggggtttcaccatgttggccaggctggtctcaaactcctgacttcatgtgatccacccgactcagcctcccaaagtgctgggattacaggctcacatgagccaccgcgcccagccataaatattaatttccaatgaaaaaagagcatttgccttgtttggatgttagaagtacttaagttaatggacctgcttcaattaacttcatctccagtgttgctgtagctgctttttgttcaactgctgggcctgtaattgacagaattttattctacgaaagtgctgcctctccaatgagtgtctatctatgggggctaaacattgctgctttctgaaaaataaaaaaaatcttgatcctggctctttagatctcattctttctaaattttaaaagggagaagaaggcatccatatcatatcctgggccatagccattttcttctcaactattatctgaatttatcttccttatccaggcagctaatttctgtaatcgtcatttgggagacacttctctccccccagcccccaacaacccaagctttccttttcctttttgttatttaggacacttgttctcatagcttttctatgtcagaactaatagttttagtgtaagcctaaccaacggcttgtaagttcgttttttaaatgtgctttgaaccttcttccatgatcacagacatgtagagtagaaaagaatccaagataataaccagttcacctccttcaatttaccggtgagaacaaatacattgcttaaacatttctcagataattagtggaagaaaaaaaaactagaacatgttttcattttttaacctctttttaaaaaaatcttattttagtaaaaagcctcccgtgggatagaacctgttttcttgattcctaactcattactctttcattataccacatgtgtctctatccaacgtagtcaaagaaccttaaaacaaatggtggtcctgcctgatggactaacaggatgatcatgttttagtacaacatgactactcaacatggcccttcagaaaaatgtgttgagtgcctactctgtgccaggaacatttggctcaaaacatggatttgcatattattgcttatgaagttcaccaatgtgatttaacttacttaacatcctgggttaaaagcaatagaagtgtagcagaagattgatgttcagaatttctcatttttttactctgagaaagaacctgggtattaagagtcctatgcctaactgtagcaacaatttactgtgttctgacaatacagtcaccctgggtcagagaaaagaaagagtggagaaattatttactgctcaagaagatagatgaggccaagtttgtaacttgaaaacaatatgctggatttaatctcctccaatttcactgtcactacaatttttttcttataggttcctgcaatttatggagtggacacaagaatgctgactaaaataattcgggataaggtataatcatcatctttagccaaatctatgtttcttcgggtgtgtgtgtgtgtgtgtgtgtgtggtgtttccctcagtgcctaagggatccattaatatgtaaaggagtgaatctggccagcttctgctatctgggtctctgttattttgttttactattttcactgtaattttcaagattgaatacttgattggtatgtttttaactgaatggacttgagattcattcacctggcagcttattgagtgcccactatgtgttcattataccaacaagtcaaggaatttataattcagctcatgtgatagaactttagtgaaacaagtggagaaggtaacaaattgcataacaattttgcctgaagtgaaaacctacatgctgaaaaatacactccaggaagtgtacagcattgttactgttatttgttttgtccttgtgaaagagttatttgtaaaattaatgcattatctttcatgaatgtgccaaataagccttgcatgcattacttcaattatatagtctttgttgagaccatatcaataaccaaggtgataaaagggaaggttatcttttgctttcagtgaagtctgattgctacaacatctgacccctcctctgagaatatctcatcaccatctgcttgttgagtttattattattttacttgaaatttccatattccaaatctgaaagaaacattacgtcactaacgttaactaaattccccaaatgcaactaaagttttcttactaaatataattacataaaaataaaaagataaatgacacaatttgaaactacacatgtgggctgggtgcagtgggtcatgcctgtaatcccagcactttgggaggctgaggcaaacggatcacttgaggtcaggagttcgagaccagcctagccaacatggtgaaacccatctctactaaatatacaaaaactagccagttatagtggtgcacacctgtaatcccagctacttaggaggctgaggcagaagaatcacttgaacccgggaggcggaggttgcagtgagctgagatcatgccactgcactccaacctgggcgactacaggaccctgtctcaaaaaaaaaaaaaaaaagtacatatgggaaaaggagtcttcaaaaaatttttttgtagatttcttgttaggatatatacatatatatattgacacaggctttctgtaaacagaaggaaaaaacagctttgaaaataaaaacatggccaaatacccatgaccagaaggaagacagtgagagtttatgccatcattctatcccacctctgattttattcactctaccacgattttcctgagaataggtgttagtgaaattatatatcccagggagattcttgtgttctctcagcctaatgatgtgtgtgagcagtaagcaatgacgaggctatgagggcgggaaaggaatacagttgggaaaatcaattcagatggcagaattggcaggttgaataaaatatagtcaggcctaatgattcaggaaaactttacaagaccgcacttgtctttcatgtgatatgttaggttaaaacgagccctccttttatcataggcagttaggttttcaaaattggcggaatagattggcacagacaaaacagtattgcctcatatttctttatcagtgatggtggttcatattaaaaatgtatattatggctttcacttctattaaccttaatttgaaaagtaagatcgtatttcattcagcatgttttaagaaaaggggaaggagaactaaaaaccaattttcaaaattagggatccataaatatagacaaggggttatgcgacttggattataaaagtaaatacaggccaccatgaaatgtagtaatctactatggaagtgaaaggtggtttttaggtagtgttcccagacttagaggcagcactctgaatttaataacagcactgaaacatccatcatgcttgcatgacacataggtactttctactctcacttacccccaagtgacttctccttcaaggaatacatttaaaagggaaatgaaagcttccttctatttccttccatgcaataatttcatcagagaagggcatatcaatgaattattttgaatttttacccctcaatagaatcttgattactaaatatagcatgccatttttctaagtagttcaaagcagacttactaacaaataagtaaatctcaagatacagctgaaaaaaggtgacattgtcgtgttcaagctagcaaggatagtttgtgaaaactttacagagggttgaacattctttcaattcaggcccataggaacacttggatatgaacatgcctaaacagtgaatattttcatttcaaattctagaagtttatgacttatgttgcatttcatcttctttgtgaattaatattactatcataatgaatgaattcccgctttttttgtgatttttagattccttattgtctcaatagattttttttgtccatttctctcatgaaatgtctttaggtcatatacgctgagtagtgtaagtttactaaatatcccgatttgcatcagcctggagcctggagacctgaattctgatgccttttgactttgccttcatcaggcaatggtgtcagccctagaagaactaattgtatttccaagagtatttcccaaaatgtatgtgcaaattgcttaatcttttcagtttgagaagatgaagatcttccatgatggttacgagtagttataaagacatctaagtcttgcagcagctgtttaaagtccctgtgagtttatcttgtcaacacctttatcgttgcttccttttaactgtctaatttttttaatttgatagggtaccatgcttgggaagattgaatttgaaggtcagcctgtggattttgtggatccaaataaacagaatttgattgctgaggtttcaaccaaggtgaggggttttcctttatattttgtagttttatttgatcccatttagaccttcttgaaatatcaaaatctttatttaggcagagtttatcttccagaagcaccagtgttcaggggtagaaagggatctcatagcagctaaaatacaccttacaaaatcagtgcatttaaagctggttttacttacaggcttacatgggaaacttcatgccccaatttagaggatttttactaaatttagtgttccttccaccttttctgattcttcagcttaggattttaacaatgtaaaataaaggaagcactgaattgccaaagataggtccagtgatgatgaggagtcagagctagtaacctgccagagagccaagagaattttacagaaatcaggcacagtaatcagaatctgggggcattttgtgcaggaaaaatatttattcatacactaaagatttattgtgttatagctttgtttcaaaattaatgttcgtaacgatgactgagtcaccctaaagtgaaatatctttagtatacatttataaaaaggtaaagaatacattttagaaagaagtccattggttttgattgaatatctactaatgtaggtgtgagtgagtttcttgagctacagtctctgtccttggggagcatagagcctggtggaacaaacaagcaagtaaatcaccatgtgcagaatcctgtgataaatgctgtccttggagtgttcatagcatgctgcaagggcatgcatggggcagcattgaaatgggataggtggatcagagaaggccctgtagaaatgtgagtcctgttttgagacacaaagagcgggtagtaacagtaaggtagatgaagaaccaggagaactttgtttcaggcagaaggaatggcttgccaagaggcatagaggtacagaacaacatagtatatttgaagagttacgcacagtttgggatggctgaaccaaggggttcacacctattggtttacacacttgggcaaggataagtggagatggactgactgaagctaggtctagaaggtttcatatcattggctaatcagcacttccagaaactattgtcaactcatttggtgtcattttggagcaaagtaaagctgaataaaagagcaagcaactagaaggttattgtaacttatcagaacaaaactcacgagagcctgaactgagcagtagtagcaagaacagatacggcaacctaggccgcttatacaaatgggaggaagaggggctgaatgaggtcaggtaaaagatcaccttactttctcagctaaggatttcaactagttaggttgagcatagtgattatgtcatttgatatctgagatgtttatgggatactgctatgaaatttttttaaagaaaagtttttgatccgctttgaaacttaaaggaagaattgctaccttctgtttttactacatacaatgggagttaaaaatagagcttctctttcctaggactatgtatttggttaccatggggctttacatgtggagaatttagccctgtggaagcctatgtggcatcacagctattggctggttctaccttggggtttatttatactatagcagagatggctacaaacttctcttccatcaccagtgtggcaatggaatttctcagagaaactctactttatccaagtagaaagtgagtgttattttgacaaaggcgattgaaattcttagaaaggaaggagtagaaaatgtacatgtggacgcaaaatttgattttaaatagatgtattcaccacaacattttatttctagatataacatacacttttttgcccatgatatttcataattatcgtggtccattcaatgtggcagctctggtcttcaaggaaaataataacaaccaagcttttttgaacactcagttaattttcataaaaactccatgtcatagatgaagaaactgaggcttagcaagtaagtctatttaaaatcaaatgtaacttgcccaagtttagtgtcaatttgaattcaagtgactccagagtctctgtggctaacctcatgctatttttctttccattttgatgggagtttgacggaaaagctttaaaaagctcaatttctagatttatgttccatgaattcaagaaacctcttcaagactccctgtgaaccaattttctatttggcctgcttcttacaaggcctgaatatgtttgtttgcttctctacgtagaaatcttttcccatgctttctccttccccttctcgcctgaagaagtcagtttcaagagtcagctcattgttcctttgtgaagcttccatgactcatctcacctttggatcccatgtcatttaataaatagcttcagtataacaaggatcaaattgcatttaactctttgaaaggattgtctctttcacttgtcttggttggctctttgaggggagaggccatggtttacttatttgaatccccagcactgcctatagtacctttcacatagtacatggtcaacaaataatgaataaataaaggaatatacaaagccagtaaatggtagttacagttggtggtaaagaaattgcacattcttattttcccttcaaatcctttaatcagtgtttcttatggttctatgacctccattattaatataataaaattatcattattactaataactgtaagtcttattaataaaaaataggcacgatctattgagtacttattatctgctaggtttcttctcaatgctttacactgattaatttattccatcttcagtgtaattatatgagatgggtattattaggaactcatttactgatgaagaaactagggtgtagagagattaaataccttcttcagtgtgaatggccataggattatacataggaaggcttggtctagtgtctgtctctcagaaaacatcatcccatactgcctttcaacatagtagaaataatagttatgcaactaacagttatactattagtaaccatccttatactaccatgtgataatattcaaataagtttacattgtttcactccttataccttttacatatgcagagtaaggattcaagaattttaaatcagaaatggtaaaatatgtgaatatgtgaatagactggaaactgactctgcttgtatgggtatcctacccgctcctgtgacaaaaccttgtcattgagagtctttagaaaggatgttcccatgcccttcctgacacctgttcatctgggaaatgattcatgttgtgatacagcaccaatcagaaggcgtatagaggacatttcataaggaagagttccagcgtgagagtttttaaaggctttaaaaaaagttattaaaagagtaaaacagtctgatcagtaacatgtaagactcagagaaaacacacattgatattatctggtattccggctcctgtcacgtgaaaatgagagacaaggattttgggttcctagaaattagtactgagtcgtgatgttcatgtcgggcagggatgtgcattcaaaacatgctgaagcctaagaagtatgtgttgttaaagaaaatcaattttaaattagatatgtaattacttatatgtatggaatttgatcatggtgtttgcaatactcacttctgatttttaattttaaaattggtcccattcatatgacttccccttgttttacatatttccctgtgaaatgatttagtttgaaacacagcatgatagagggtgatgatagatgatagaatgttagaattgagaactgccttggtggtttagtctagcatttcctaaactggaaaacagtggtgtggagcaattcatcttaaaaaattctgtggtcaagcaaggttgcaaaatgctgcataagatattcctctctgttaagtccaagcacaaatccatatatgcaagtatccatgaggtcttgtgtaacttctgttattcttatggacagtatttaatgtgtttgtgtagagaccagcaaaaatgagcatatctgtgtttttatctgtgtccaatcaagggagatgctgcagtggtgaaagctggctcctttgtttcttaatgtcagtgcaattaaataatattactatagctatgataaaatgcgtatttgtatcaggagattacatatattttgtgagttttgtttgactacatgccttggaaatgttgataacttcattcattatcttgtaattacaattttctgtagctacaactagatggtaatattgctttattttacatcagaagcctaaggttaagaaaagatctatactttttcaaattatttgatgagaaagattacctgtgacattcaattcagcaataactccccccagatcttgaaaggattagggtatttttttttccttcagaatagtcagtgggagaaaaaaaaccccagatatagtttatatattttttcctcaactacagtctaaggattataatttcacattctatacagacttagtggagaggtagatatttcagtcaaaataaactgttctttcaaatactcagtttgtacttttcatctgaaaattttcacaaacgatgaaatcatcctaaattcatagcgtgctagctaactctcaaagcaggaaccggtgtgtgtgcccacccttctaggctttctctctattatttctccttttatgactttggggagctgcttcttgggttaatgcctgtgaaaatagatctgcctcccagccgtgcttcagacatagataatgattatgatatgctctgggatctttttatgaaatctaccatttaaatgcaaacaattgcacggcaacctaaagggactggtggtctatacctgcttagcaattcctgtgactcttatactgattttatccattaggcccaactgcagaagccttatgtacagtaattcagctttaccccatttgatctttactgcaagttgaggatcaagtggtatttaaagcatgatgtatctattgccacatctgtctagtgctgaatcaggcaataatgcttaaacatttcattgctaccagttgttaatgaggcaaaacatgagaaagatggttaactatgcatgcaaccagtttcttagagatcattgttattactataatcaaccgtttatataaaacagcaaagtctttttttctcataaaaaagatacagtctgtggcacttgttgtgcctttcttacaaactgtttgttaactgccagtcactccctagtagttaacaatcaatctgttaccaatctaagttcaaaacattgtcagatgtgtttatgattttggtctgttgcccatagctgggacttccctctcattctctggtttttaaaatggcaggatgtcaaagtgtacggcaaaggaaaccccacaaaagtggtagctgtagactgtgggattaaaaacaatgtaatccgcctgctagtaaaggtaagtaatttgttcatttcaaaggtgagggtttgtcatattgaccattagtgttcagctaatttcctctgtcacagagaaacttatgcattctttcagaatgtcaggggtctacattcttcttgttgcttttgatttacaaaataacacatttatccctgttcaaattaaaaatatagactgctatgttttttctttaaaaaaaaaacctcaagggccactaaaacatggaagaaaatgatgactgttcttgtcattaattgactgacagtctgagatgcatcatgttcactttctttgtggtatagagatgaccaaaaagctagagtctgtctgatagcatctcctttgggcttacatttattttgtaccacacgtttgtaggaatcatgccctgacagagtacgaactttcacattgtttttatatcaactcttagacaaccagttaaaattaaaccttaaaaattctcaaggagaacttaaccatcataataatgtttcttaaataaagttttgttaggatttttccttctcctcactcctctctcagtctgtctctgtctacacatctcccctccatacacatacacacacatacacacatatttgcataacaccaaattagcatgcgtattgggagactcttcatcgtacctccttattagagaataccagcaatattcaaatcatgatttcaaattcttgtcaattttattaacaaacatttgcatggatagcatgcatggtagcagatgctgtggatggcctgtgtatatctcaatctcaagttaccattttaattcatgttgcccatcttccaattgcaaatatctatatctctttgcctgatggctggagcctactggcaggcagtaaatggcatagaattaatgatctctggagtagcccccaaccaaagcacagaaaaagccagtgtttaaccaccctggctcctttgtcccatggataggcagtctctaaggtaactattccacacgggctctcagagttccctactgggcttaaacttcacttatccctagtggtaactacttgctaatgcataatttattggggtgtttcatgatgtcacttcctctctgtttagtatggaagtaccttccaaataagcttttgttctcttaaatccttgtttcaggaaatgcttcatgggaaaccctcaaagacaccttcctatgtgcttttatattaaaagaaatttctaagttttccattcgaatataaatcttacagaaaatgagaaaaccctaggaaagaaggctgattaaaatttgataagactaaaaggcaagactgaaaaaggtctgacgtgggccaacttaacattttcagaaaatggatttatatctttttgcaactggtcgtgtgaaggtaacctactctcctgtcagtccagtcatggcatttgtaggcactgaaacttctcttgagtgcaggagagtgcattatccattttttcaggatcaaaacttttaatggtgtttatttttatttttatttttattttgagacagggtcttactttgttgtccagcctagagtgcaatggtgtgatcttggctcgctggaacctgtgactcctggactcgggtgatcctcccacctcagttttctgggtagctgggaccatacctggctaatttttgttttatcttttttggtagagatagggttttgccctgtttcccaggctagtcttgacttcctgggctcaagcaattcccccctatcttgagcttccctatgtgctaggatcaccggcatgagccaccaagcccggccccaaagaaatttttgctcagcattatttattttaaatgtttacaaatttttccttccctttaaggaatggttagtcaagagaaagtctagcaaaattatactttggcaaagaaacatgttattaaattcatcattcttgtgtctcttttccagcgaggagctgaagtgcacttagttccctggaaccatgatttcaccaagatggagtatgatgggattttgatcgcgggaggaccggggaacccagctcttgcagaaccactaattcagaatgtcagaaaggtgcaatgaaccttgaattcatgtgtatctgtgtgggaggtgggggcttccgctctataccctcaaagggctgtgatacattttatttattcaggcatttttcaatgctggtatttgtgacttctgaggcagtgtcagtagagatattctgtaggggaaccaatgaggagagaatatcagagaaaatagggtttttcttcaggcaaagtaacttggggatcatgtccttgagttaaaagaactggagtccaatggccaaatgtattttgctttacagttttaaaccgacaactcatggttccttatcatgaccttgggacccataagacctgcaggtctctaaagaaatattaaattagatttagtttagtttgaatgtaaagtacatcttaatgaattataatgctacaaatttgtcaattatgtccttttttatattcttctttaattcagttactattctctttaccttcttaagaaaaaaggatacctcatttttgttcattcagaagcaacattttttggaactgtactaattggttaataaaaattctccctgatttagattttggagagtgatcgcaaggagccattgtttggaatcagtacaggaaacttaataacaggattggctgctggtgccaaaacctacaagatgtccatggccaacaggtgaggtattttcacttttgcttacagtaaaccagctctgacatactaactaaatacaaagaactcagagcacttacctgccatttctttagagtaaataaatgcacatgtaccctaaaacttaaagtataataaaaataaataaataaataaataaataaataaaataaaaaataaaataaataaccataccttacgtggttgacagttgtttgactacctgataccacttttgttgcatttttggaaagcagccttctctaatgataaccttgctataatttaaagttattttccttcccttggcataaattgaggttataatactcaatcaaatgatattccaagggaaattgttctgattttaagcttgatttcagaacattgtaacattttaagaaggtaagtgtgacttaagagccgaggaacctttagatcctcttggtttctcttttttgcctcaaacaatattaatttattaaacatcaggctttttcccatggcccaccctctacataaattataattcaggtctgagcagtcatctctttgttatctccctataactctcgggctttaaaattattgtagttctcttaaagtaagtcacttatatttcttagtttctgttaagccggtgagcaaccctttttgttatgagtgcaatgcccccctttctaaaaccgattatagaatttaatagacctgcgtatttaacacacaacaaagcttcctgaattgatttttgttgggaaaattactgggattaacaatctgtgacttttctcacagagtgattttcactaagcaattgaaattttgaattttaataggctttacttgttcactactttataaggaatacatttatattattctcttcacttttccttttccctattctttttctccttttctctccagagggcagaatcagcctgttttgaatatcacaaacaaacaggctttcattactgctcagaatcatggctatgccttggacaacaccctccctgctggctggaaaccactttttgtgaatgtcaacgatcaaacaaatgaggtaaatgatgtcaataaacctgttcagttggtgatgagaaacgcagggcttttaaaaataattgatacataagcattgtatatatttatgagatacatgtgatattttgatacatgcatatcatatgtaatgatcaaatcacactaggataaccatcacctcattttttatttctttgtattgagaacatttcaaatcttctcttctagctgttttgaaatatgcaataaattattcactcagaatattcacccagagtttttaaatacactatgatgcaaatacctttctcctgtttgtttgtgatttttttggggttgagtgttgaaaaacagctataggttttctcccatagccctctgtgttttaaaacgtcatttctctctcttattctctcatcagttgacttgttaagattcactatttgagttattaatcaacaactatctcatatattcaatgttagtgggctgttggtccaaatctgtttgagccccatctgggtgggtctctgggacttacttggcactggtgtagtgtttgagaagacccttggaaaagtaatttcggacttggggataagatgaggacttgagtttactctgaacagaacccagaggggtcccaaagactatagaccaaattttttatttatttatttattttaaaggaaaacacattcagttgagtcttcattgacccattttccatacttaatcaaaaaggtcagatatgtaagtccttaagatatcggaccatgttacttaatagtactgttagttacaaaaattttgttaagcatctaactcagtttttaaatttgagctttattgttccctgaataatacatagccacacttgacattcattgttacagaaggaatttcttcctgtttcttattcctttaggggattatgcatgagagcaaacccttcttcgctgtgcagttccacccagaggtcaccccggggccaatagacactgaggtacgtcaaaaagatgaggcctattatgtatgcaaaaaaaaaatgtatttgtgtggaaattcgagaaaccaaaataatcaccccagatgatcttgagcagaacattctcaagaagagtgctttggtaacacacattttgtattaaaatctccccatgaatgtcacagaggaaatttttatcttttttaaaatttaaagtgggaaagcccttaagaaacccgaagcgatggtatttttatttaaacccattatcattctaatatatttagttctgaaatttacaattgttgtactatgcaaatgaattcccttttgctctctctcgttctcatgactgaaatgaaattttaatcccccatctgtgacttcacaaaaatccctatggcaactggttgtgtagccactaagggagaataaacagcagcaggagaaggaggggaagggtgttggaggggagagagggcatgcatgcacatacatagatgattcagacggcttcagaaaagaaccacaaggaatgcttagaggagttttgtatttaatctaaatatttttacttttttgtgtgtgagctcttagttcattgttcaaacccatctttccaaataaattcttctggtgatatccagaaaaatctgaagtctattgtgacttccccacacccaggggcctccagtagcaaatcttcattgtcagaactctcagaaaagacttcgaggtaaaatggggaagagaataagagctttctttctgcaagctctgctctactctctcatgtctgaattgccgttttagatatttatattttgttcttgttttaatattattaggaaatattggttcttaatagccaaaatcagtattatattaccaacccatgatgaaactcataaatcaaatttagttatgtgtatcatctaacacatgctaagtagttttttaatttaaaatttaaattagcatatattagtacttcggattaggaacattgcaattaagatgtaataatatccactgtcacataattctccttttttgtctttccaataattgcaaaatgaatattctttgttgtaatttgtcatatctagtgaaacaacagaagtaaatcctttggcaaagattaagaataatcttcagaaactgttttttagagccgatagaaatttaaatttaaattagtatttctaattttctatatcataagtgatatagcttcaattgttatatccacctagaatttgatttagaagaaacaaatgatatacaatttactaaaaacttggcattctcagaaggtatctgatatgtttactgcttgttggaaacttcttttttataagacttgaagtgaacagaagtgtttatttgattaaattctcacactaacagatatttagttattgacaaaaaagcaaaaaaagctgaaatgctataataaaaattatttgttgcttatctgaagttcaaatttaactgggtatattgtgttttatctggtgaacttaggaattttgaagcttctaactagttggttgtatttttttctagtacctgtttgattcctttttctcactgataaagaaaggaaaagctaccaccattacatcagtcttaccgaagccagcactagttgcatctcgggttgaggtcagtatgtgggcttatttttggtttatgaattttggattgtccctatcacatgaagatttttaaaaactaagtgatgtaaggcatactagtgtttaataaaagatgactggtaatattgtaatagactgtcattttgtaactaattatttggttccttcttgatgatgtctagtggaacttctcatgttttgatttaaaataatgtcttttaaagtttacttcttccagagtatttgtaataacataacaaagaatagtgtttagtttagaatttatttcccattatccaaaaagccatagctctatgtaaacatgagatacatttcagactacagaatcattatagatgatagaattctttttgtttcaactagaataactgttattcaacatcatgtactgagtattattttacctctaaaaagcaaatggacaagaatataacacttaaatccttaatttgaatatgtatgttagtgtgataaagtttttacccatttccttcataaactacacattcatatcattatttaaaatttagaaggatatatgtgtatttgaaaaaataccacacatagatatatttacatatatgtatatatttttggatatttatatatgtttaaataaaatgtaaacctctgccaaaaattttttacttaagagaaaaaccttaataaactttggaagtcacattgaaatcagagatgttttaagttattagtctttttccctatatattacatatttttcattacattagaccttagatgaccacataaactcagacaatgtggtttgtcttctccaatcttgaaaatgccttatttcccccattttagcagtaataacagtgtctttttcttattgcttataggtttccaaagtccttattctaggatcaggaggtctgtccattggtcaggctggagaatttgattactcaggatctcaagctgtaaaagccatgaaggtgagagaatatgatccttactagaattaatatgcttcctttaatgagtctaattagtattttataatttagatttatgacactacctcttttcaaagttgctataattattttccttaactgtgcctttataaatcttgtattaaagaagcttgatcacgagcaagaatttcaactttctgtaatgtgcacatctgtaaattgaggaggttaatctccaaaattatttaggttattgcctccttatagtgaaaacatataaagccacatttatttatgctgtttatttcttttgaggcagtgagtttttcaaatatacttatcttttatgtgaaagagaaattttgggcatctttggtgctttaaagtatttcaagtgctctacaggatgcttcgggcatctctgtggttgaaatgggaaactccagttggagaagcaagggcaacagtacattttgttcaggtgttataaattattatctgtcactgggggacacagttctcccatcagtgcctgggaaacgggatgatatggcaacattttcaagtagaaaaaaagatttgatacacaggtgtggaaggacatccttcctgtttctttaaactctctggagatctcccaacacttactgtagtaaaataaaactttagaaaaattccgttgtatatttaatgtatttctcttgaggagttcagttggtacccctcgttgtgctaatcaggccattcggaggcaatgtgagctcttggtgacattgcctcaggctttgcagtgtaatgccattcaccagagaccaggctagtagagtcagcatagaatggcaacagaagactaggacagcaaacctgggaaaaatagttggccaaaggttttcttatttttctttttgttagtattctatagtcaaagattttcacctgatgggcgtctgttgaagaggtagaacacagtctcaatgactttactctttttcccatttgtttttattttttaatactctcctccattcatgtgcatgcatactcacatattttttggaataaattttcaaaacgatgttttacttctttgtattatgctttaatttctcattagataattggagactgtccagtggtttagattagttagtacacaatctaagtgtgttcagagtttagaatacatttaactgtatacagtttttattctatttgggagttttgcaaataattagaatttctatagttttgtattttaatgtgttttacatcaattgggtaaagttatatagttttaactaaagaacaggaattattagattagattgtgatcacttagaaggttaataactagaggtggatttttaaactaaaaaaataattggtgcatatattgcaacaagaattagaaaaatcagaatgatttaaaattaagattgcaataaggtttaaaataaatgaacactcatcatgtgtatgtataggatcttttcctgtataatttgacttataaaaaatcgccatattcattgtatagaacattcagaaaaatacttaaatatactaaagtttgttggtacttttctttagttgtgaggctttctataacttctgttgctggtatgttctcagttgggactcaattattaaaattcatcacatattataaaagcatttgcttacctgtttgtatcttcctgacattttgttaataatattactcttaaaatcttgagagatgactcgtattgaggaaagagcataggatttgaatcataacatttgaattagagccctaatattgccacttattagctatgtgacctttagcaaaccatttaaccttactgaatctcaatttcttcatccaaaaggttgaaatctctttcatagtcttggtataaaaatcaaatacattactaaaaagtacattacaagcattaagtcactatttgaatttaaagcagcataaaatatatttaatgttttattcagatcctccccaaagatatgtggggttttcaataataatttctatacttttatctgaatattttgttgactttttaggagaatttaaaattgacatgctaatgtatgaaataattagaaccatctggctgtatgttataataattattttgctaagtgtcaccctcatcttggtttataaaacaattatccttagtagcctacataaagaattattttgaaggtctctcccgatgtaaggaatgagatagagctatgaataccttcatatatatacacacacacacaaacatacacacacacatgcatgcatacacatagttttatttcttttaccatatggttttttaaatatgtacaaacagttgtataatgctttttgttaaagcactatagcaagcatgaatctagaaaataaatagaaaccagcagaaggctctcagtgcttccagcaagaagggagcacattattctgcattttaaatgtacattcaatgttcttcttagacaaataaatacaagggggagcagcttttttttttaacttttattttaggtctgggggttaacatgtgaaggataaataagatcctttttgaataagcaaatattgagggaattcattaccaccagactagccttacaaaatatcttgaaaggaacactaagtatagaaagaccactaccagctaatacaaaaatgcacgtagacacacagaccagtgtcactgtaaagtaactacacaaacaaaccaacataataaccagctaatagcacaatggcaggatcaaatccacatatcaatactaaccttgaatataaacaggctaaatgtcccacttaaaaggaatggagtggcaagctggataaaaaagcaaaacccaatggtatgctgtcttcaagatacccatctcacatgtagtgacacccatgcgctcaaaataaagggatagaggaaaatctaccaagcaaatggaaaacagaaaaaaaaaggggatacaatcctaatttcagaaaaaacagatttcaaatgaacgaggatttaaaaacagacaaagaagggcattatgtaatagtaatgggttcaattcaagaagaagatctaactatcctaaatatatatgcacccaacacaggagcacccagtttcataaagcaagttcttagagacctgcaaagagacttagactcccacacaataatagtgggaggtatcaacactccactgatagtattaaacaaatcattgaggcagaaatttaacaaagatattcaggacctaaacttgacattggaccaaatggatctgatagacctttgtaagaactctccaccccaaaacaacagaatatacatttttctcattgccacatgacacatactctaaaattgaccacataattataagcagctttcgtattgcctctagttccattttatatttactaatttaaaatttttggaatatgttattcttttaaggttgattgaactacagggttcagtaatatttgtggctctctagaccaattatatagaaatggtctccagctttgccaacagtggcaaagatcacctcatggcgatcttcatgagacagccaattcttttggatagtttcattttcaagaatttcttcatttctttgaccaaatgcttgtcttcctttaacttccattcactagtcctgttacggatctctacggcccacagataacctaaaagcttagttaccccatgtctttttatttaagtgtggtcattctcttctttagaccatatattcatgtactggattcttttgtttctttcaggaagaaaatgtcaaaactgttctgatgaacccaaacattgcatcagtccagaccaatgaggtgggcttaaagcaagcggatactgtctactttcttcccatcacccctcagtttgtcacagaggtcatcaaggcagaacagccagatgggttaattctgggcatgggtggccagacagctctgaactgtggtgagttcttataagcttaattgcagagttttgacatatgcactgctgtgtaatgtattttatttgagctcatctaacaattgtgctttgtgtgttcataaaacctttcctctactgtgtgagaaagcagttagcaaacagccacttaatatagtcatatgatgaatactactagttaatttcacaaaatagctgatagacaaagaaacctttcactttaatgctccagagtggccagtaggtttcttgcatttctctactctatcgcaggatattgcttttctctgttgctattgaggtcttgagaactattatgaatgaaaaatgagaattaacattggttaagtgctcttaggtatcagccctgcagcaatttcctctcaaacacattttcatgatagcatagatcagtctttctactattacttcatacttctgctgagtctactgctttgttctctttaaaattcttcaaatctttggaactggatcatgaataagagtctctttagctagtttgggtaagcaattggtgatataacttgtatgtcaaaaaaaaaaaaaggactaaggcaaaattaggtggctaggtagtggaaacacaaaccattttgaggataattttttagcccaggtaggtactcatatatttgggattttttaaattatagaatctcattatagaaatggactttaggaggaaagggaatatattgaaatcttaaggctcagtataatactatgacttttattaataaggataaaaatgattttcagaagatggtaatataagtaaaagtagcatcagtaacatattttgtcagaccgtcttcagaatttttatttcaatttttttccctaagtgcaattctattgtagacagtggtaacttctcggattttaagattaaaaaagtagttgtattcagttgtctattaaaaaaggcacaaaattcaagattttaaaaactaatcctatttggttcttctttaggagtggaactattcaagagaggtgtgctcaaggaatatggtgtgaaagtcctgggaacttcagttgagtccattatggctacggaagacaggcagctgttttcagataaactaaatgagatcaatgaaaagattgctccaagttttgcagtggaatcggtaaggattctttgctttggaaaaacaagggcattatttgtcttgtgttgtagggagaatgatttttcatgcctaataataatagttaagattattatacttgcatgcattttcttctagaattgtgttaatagtttagaaatattgtgtattacagcactcaatgctgaaattataggtattaacattttactttatgcaaagagaaacagaagtccagagatgaagtggtttatcaaggcttgaagtgccaatgaatctcagatctcctgaactgaaactaagaaccataccaacttgcaataacaaagcaatttttaccttgtttctgggatcaatcacatattttgcatgtgtgaattccctgcaaatgagaaatttgctttaaattttttttaaataaaataaacattttagaataaaatggatccagtcattaaaatgactggaaaacctgtagtttagatatttaaggaagatttgcttttctgttatttatttccattgccccttatgcctatcaataagctattaacagttaccaggaaaaagaatcaactcactttatatctgtttttgcccctgactttatttttgacttcaggctcatagctggtgaagtggaggtgctaggggcagtgttaaatccaacttctccatggtagaaacaggcacacccttaggaataaagcaggtactgctgggacaactaaaaatgggttatgtatgtttcagaagacaatgctaccaagtatcttttgtgttacaaacttgtcaatcaaataatcccaggataactctgctgcacaatttgggaagctcttgccatacatttgttctttcattgccagatttaattatgtccttgcttcctcaggaaaagaaacaggcatatgggaaaggtgtaattacattcccattggtagtgtaataatattccatgacagaaaaatatagccaccatatgttgtattctgtaagttaaaaaaaagaattccaagcttctgggactatgctcagactgaacttgaaaatgaaaaatccatttatatacagtgttcctaatggcttattgtggtaacatcaagctagcttcagcagcagagaacctggtttcattaagacagagacttttaagctgcatgtaaaaatcgtaaaaatccaataattcaatatggctgccattctcaaatgaatgatgattatttctgctttgaccatggttctgtttcaataggacaggataaaatttaccgcaaaagtgtatttcttagaagatatatatatatatatcctcccttctagaattttacttaacatttgagtaacaacacttgcttttcagaatgagatgagggaataatagaacatttctagattcactctccccacataagttggtttacctgattgccagactctcttggtgtggtctgttctgccagtgtgctcagcttttaaaatgttgagtccttgttcttgttgacagattgaggatgcactgaaggcagcagacaccattggctacccagtgatgatccgttccgcctatgcactgggtgggttaggctcaggcatctgtcccaacagagagactttgatggacctcagcacaaaggtatgtatttttgtagacaatattcttaccaaccaaaaaaactggcttgatagaccttttcaactagagaaagttatgtagatgagaaattacattttctttattaaatcatgatcatgttctccaaaagcgtattccaaaagatgacacttttgcgagagcatgcagtgcaactcttcatgccaggatgcaatgataaaccacatggttcaaggtaaaccagtggtcactttacctcaaattccacttttatagtacaatctattgacttcaaggagatgaacttaattcaactccttcttcctttgtttcaaaatctactctcaaatatttaaaatgctaaaatatgttttagtggttaaggaaaaataggacataatgtctcatttttaattttttagaaataatgtggctggcatgggtgacatccagaaagtgaaacaaagcacattgagtagtttgactttactcaaaattaaggtgtctaaaatatacatggtataaaccactcaatacagtaaatgactgaactccaccaactgccatatactcataaaaacacgagagatttgagggtttataatttattttctatcaaaatcactttaacatattaggaactacttctttctttgcatgttagaggaaaactcttgagaaaagtaagctatgctacaaaaactaaattagagactaatgcagaaaatatgctccaggaaaacagagacttttgtctatactctatttccacaaaatagaacagtgcctggaaataccaggagttcaataatgtctttgaagaatgattacacgtgcagccaagaaacctgtgtaacttacatggcagtcatagaagtgaatttgacagaattactgtaagggctattttgggaattatttaggaaatagctcacggacagcttattgcttcatctttacttactttttgaactgaagtgaaatgagacccttgaattgttgacatagaattttgaaaacagataagtacaattcagcatatttaaataactacaatggcagacttacatataaacaacttgggtttcgtttttctaaagttgtgaaaattacaaaaaagggaaacatacctcacataaatgtttcttgttaccattctggacatatgaatcacatatttagagcaaaaacatgtttttgaagatagaaagtttatttcctctagcatgttagaggctccaaatattttcaatattaacaacttcataactgccaattgtgacagtgtatacatattctctattaatttttttactctataagaaaccaatctgaagactgaacttttcatgtaagaaagtttataataaagagaattttggaatgaaatagctttcaattatttatattgtactcaaataatcaatagtcccttaaatggtttttcttgttgaaaaaaaccctcgctcttcccttgagaataattagtcatatcattatgtcctaaacaatcccctattctcttgaggttataattagcaccattaaaagctgcattaacttatccaggtccctaaattaactttttacataaaatcgaagacttcaaaaaataaaaataaaaataagctgaggaaacaggtgaagataatttcaaattttccctgtatctaaatatccattttacttcattagaatgcaaaatacttttccaaatttataccctttgtttcctagatttcttcttttagcaggcaaccggaatgatgaattaatcattattaaattgttaacattggctactgaattttctaaccactttgagaacctcatcgtgggcagctgtggggacaaatgtgtcacattttcatttgcacgtgctggagcctgtagtgatgactgaagtttaaaaaaatcctattaaggcacattacagaaaaacttacattaaattattattttaatgcctattaataatttgaaaaaattcaaactgctttccctttcactgtcaatccaaatcaaatatattataagacaataagacatttctcccttggattatcagccactgcatgtcctaaggtcaaagattaccactttcctattttgggttcagtattctacccattgtgggtgtgccgtaaatatgaaattataattatgctaattcatatctgtctaatcaggcatacatgatatatgactcagagtatttaagcatttaggcagtgattaaccataataatagtcccatatgattcttctaattctcaagttttatatgccatcttggctaaccgtttacaaccatcatcatctcctttctcctcctcatcaacatcaactaacttttattgtgtgtgtcactgtacaaagcaccctcagctattttagagagagccagagtctttagacttatttttccatatttattcacacttatcacattttctggtttcacagaagcctagctgctgaaataatttcatttccctctgcctgattgctcaattattttctctttttcctaaattagtttgatttactgtcatatcagcactttgaatggcaagcctcaataatgtaaatcaagcatattcactgcaggatgctattcctagtacctcactgattttctgacacattgtgccttctgtgcaggggagaatggagacggggtttgagagttcagtgctgaccaggatttatgccagggtattttgccaaatatccttgttgaagccagtgctttttcttactctttgatatcttttgtcaccaatttctaggcctttgctatgaccaaccaaattctggtggagaagtcagtgacaggttggaaagaaatagaatatgaagtggttcgagatgctgatgacaattgtgtcactgtctgtaacatggaaaatgttgatgccatgggtgttcacacaggtaggcaaagtatcttcaagaactatagtaatgctttcagttcatgtctttgatggccaaggcagtctttataaagttgttgcctttaaattactatttctagttgacagactagtgataacattttggacaagcatagtattttacagtattgaaaatgttctcacatttaatttgatcttcacacaaaccctgtgaagtaaggcggatattacactgagttaattgaggaagagccaaaggtaagcaatatggtagaaataagatccataaaacttagtgttgagaaataagaagggaggttgagacagtttaaagcagactgagctggtaatcacccagtaaatgagaaaataggcacaataatagaaataagtttttcagaaaagtacactagttagataagagggcaaagatgataacttaggatttaaaagtgctaaatttggggtgtgagcagagctgtcaaaaaagggagttgagaatgtggagatggaatttaagaaataaaatagaaataaataagttgatacaaagacactggaaactgttggcataaaaggggaaattgaagttgtaggcatagacaaagtattcaaggacataggtatagaaagaggagagaatagggttgaactttgaactctgggaaacatttagatttatagggcaggggaaagaggaagtattactgttgaagatagaaggggagaataaagagttaagaggaaaatcaggtagtactgtaccaactaagccaatgcaagaactattttataaaagagctttgtttttggcagtatcaaatgctatgcaagaccaagactgattatttaatttggctcttttggatgtccaagagaacaatttcattgcaaagtcagttctgtgagctctattaaaaggaattacatggtatcaagtggtaagcagaattggcaaactttcaagaagctcattcatgtaaagaatgagagagaagctttgtatggttgtctggcaatgttgggagaagacttccggaggcagtgaagatctgagcgtgtttgaaggcagaagggatggagactaagattgcagatataaggggctatgatgagggaagtgaagatggaaagggatgagatacagaaagccagctgatgagccagtctgagtgataatattcaatgaaaggaagaacttcagaaataatttgagatgaagagcagggaagttgaagtcaatctagtaagtagacgattgaagccttgatagctacttactagatagatgaacttgggaaaggttagagaggtttctaaaagtactgtatcagagtaatatgggcaaaacaggaattgggggaatacctgatatcacatatatatcccaacaaaccctcagactgttctatgtcttgcatcgtgcaagtagatggttaagtcgctgaagttggttatttcaatatgccaccaagtaatgagtgcttcttggatatataggtgactcagttgttgtggctcctgcccagacactctccaatgccgagtttcagatgttgagacgtacttcaatcaatgttgttcgccacttgggcattgtgggtgaatgcaacattcagtttgcccttcatcctacctcaatggaatactgcatcattgaagtgaatgccagactgtcccgaagctctgctctggcctcaaaagccactgggtaagaccagaataattgaccatgggtttgcagattcttttcagatagaaatgaaaaattgacagatagtggaagactgtactgcatttacaaactatgttccctttttctgtatgttagctccaaatcatttatagcaccctgaggacatgattattaatgagcttgttgccagattgaggtaaattatattgctagctggctttgtttgcaggctaatctaaacgaatcaaaatctaggtggctaaagcaggctgtgaaaaatctgcttcctaattgcactttgcagatgttgttaaaagtgcagattaatccttaattttagtcttcagctgttttcttcaggtgtatagccctatagcaaatagttgacagaaaatatagctcacttgactcaagcatgcaatacacattacttttattttatcaaaactccacaagactgaacagtgcggaattttttcacaagtaactgttacaaccaaacaaatacatctgctgtctatgtaacagccactagcaggcatgattggagggaaaggtaatcaaaacctttggtttctaataatatatttagcaccttacacttaaattatggcatttaaatgaacacaatatttacttctttatattttttttacgtagttccacagcactgcgtggagtggtgaaaggcatgttgccctgtacaggagtcacaattctgcattctcacttggttcttctgttgaccgtgtgattttgagcacatcactcattgtctttatcagtttcctcatttgttaggtggaagttgtactaaagaactcatttttaattctatagttctatgaattattttctcaaacagaataacccaaactgacattctggatgaagatagtcaagttctcaaagtgttagttttgtaaggagcccaaagttcaaagataatttggagacagagcaaggacccaaacttgaaatgcctacattttctgaccattatgtactctcttgtactagctaactccactgtattcttaggtacagatatgtatatgtacagatatgtatatattttctcaaaaaatattttgcagattctcatcttagtggaggttaaatacaaataaaggttaaactttatttatcaataaagctatcgattttgggttgaagaggtgaaggttgagcgttgtagcaatgcatgtagtgcacagagagtaaattctcctgtgacctgtgcctctatactttgtatcatgactcctattattccgcaagtggctactaaatattgatgcagaacagagaatcaagtgtcttataccctgaagtagaataataccagaaattttaagaaagaccaatttatgttttggtctgttttcaataattgctcgaagaaaaaaaaataaatttgtcttctttttatagctacccattggcattcattgctgcaaagattgccctaggaatcccacttccagaaattaagaacgtcgtatccgggaagacatcagcctgttttgaacctagcctggattacatggtcaccaagattccccgctgggatcttgaccgttttcatggaacatctagccgaattggtagctctatgaaaagtgtaggagaggtgagtccttggtttattacgcttttcttcttgttctcagttattttgttaaatttgtgacaccattgacagtgttaaagttgcctggataccatcaacacatggacagtgttaaaggtgcaattgacagtgttaaagttgcctgaatattagcatactaatatgctaacagtctctatgtgattgtttacatattacatatgttacatggccattttgctggatttgaaggtcttcctattcaaaaggtgaggccatatatctggctatatagtatagatacacatatgaaaacacattcatatacatataactgagttgtaatatattttataaccaaatcaagaaagtaatatagaatataatatatcaaaaagaccactgaactgagcttaagaattcaactttagtccattcatgcaaattgtggctctaacttcctgagacctcattccccacatctataaaagaagaggctggactagttcatctctcaggatccttccagctctaaaattctaaattgatatgagcatagtagattattaagccctctttaattatactaaaaagttctaagcttttaacatctttagaagattttttagaatgtgctgttatactatttgaaattaaagttagcctttgattattgcatcttcaaagatgcagtgttcttctgtgtgagaggaaagaaaggaattcatatctctgctgagattcactcccttgcctccttccaccaagtcctaatcattttctgcatccagaaggtttgggatagtggagaaaacatgaaacttggaaccagctggacttggatattactcttggcattgccacttattagctacagactctcaggcaagactgagtttcaggatccacacctataaaatagaaataataatacctaccttgcaggattcttataataccccctcttaataaatgtaatccatcattattgttattattaaattagtattcataaatgttgcatggggtagatgagtgctgaagtatgaacaaatctcagtctttctctatcatttgtctatctaccatttatcttagtttatctgtatctcatctctatttctgttgtggccagtgtgggagcttttagtctatgtatctaagttgattagagtacagagcaaaaggctgtttatgacatatttttccatattgttctttatttgtcccataacacagattatagcctaaacccaggccagccatttcagaaatgcatgtcactaatcacagaaaatatagattaaatctgtcaccaatacagggaaaaagaaaaagaaatgctttactggtctatcatattcacacatgaaaggcagaattatttctattttggcttccttaatttgtaagatactaatgaaagattttaaagtagtaacaaatcaacaaattggccttttaaattaaaatgtcttactagttgtaaaacactaaatattagttttttctccattatagttgttttaaatcttatttttcaaatcatactttttagtgtacaaaagaaatagaacgcaaataccatgaaaatctatgttgctagtgtttgcaccaaataaacaactgttatttagtttacatttcatgggaagggtcctttttaaataatgttcaccataaaattggtagttcaaggaacttgagaaaattatgtaatattttcatttggggcttcttatctgagggattttgttgtcaaacaaaaaataaaaggtaggggggagttttgttgtctaacaccttacatttagttcaaaaagtgagcaaacatttcctgagttcttactaaacgcaagacactgggaggatttaaaaaaggaatagattatagataattgagatacattgtctgcagttggtaaattcagaatacctaaactgacccgaatagacaatgaattattaatctctggtaaatattaaaagatagtacttatatatagatgctatgagaatatagtagaatagggttgaggaagcccattatagtcattccactggaaaatgtgaaatagtcactcaaggaaggtgcattttaatagtatagggcaaatgtggtgggaggacgacttgagcccagggggtccagtctgtagtgagccctatagtgccgctacactccagcctgggtaacagagtgagaacctgtttcaaaaagcaaaaatatatagagagagtattgaaaagcacaatttttgagcaaacatttatagatacatattcctttgttatacacgttttttttttaattgaatggatcccatgtaccattatatagattgtgcttaagaataataaaaatatatggagagttacttatagaactaatttcagataaattttaaatatgtaatacttcaaattttcttaaatatacccaaaatatttccttaattttacagaacaataaaatgtctgatttctggcagtcttttccatgcccaggctagacaatctataaacatattgtctaactcttcaagataccactatgacttgcaaattgcatatctgaattgcattaacaggttgtttattcctgctcttgtaaattttcccttatttctaattaaatttggaacagtgtgaaaaggttatctgtttggctttagtgatcattgaatatgtatcttgtcacataattgacatgaagatttcctaaactgacattagtggtaatttgagtctatttgaggaatcacaaaagtttactgaaaatagcattatgactgctattattttaaattggagaccaaaaatgcatagcaatctattattctatgaaaagattcaaacaatgtttatccagcgaaaataactgggtaggttgcaagatcaatttaagtttagttctgacatgcaacttgtccaaactaaatcaccacataatttttctaattgattagtgtatgatgagctgtaaagattgtggaaagacacattgaatttgtcacagaaagtttagtctcctcctacgttcaaaatcataatcatcagtatttgttatgactctcaaggttctattaatattaatgcttagctgtaaggaaagccaacctgtcttgaatactgactgatactcatttacaaatagtttctgtttcagtgttaatatatttctggtttctttttatttgccttccattctaaagaacatgcgcataaagcaagatcttactaagaaaaggtctctatgcttcaaccttgaatttcttattttaatactatggtccagagcaggtacaggtgatttcctcatcaatctcagcaaatacagctgaactccctgagtggtaaaagactgacctaatgaagatgcattataccaaaaccatggagaaagtgagagaggaagaaaaaaaggaacacctttttttttttttaatttgagaggctttatgatatattttttgttcttatttgttttataaaatatattttacgtccagttcagttacaaattaaagatacataagctctttctttcaatatgaggtcttaaacatgtattacaggtcatggctattggtcgtacctttgaggagagtttccagaaagctttacggatgtgccacccatctatagaaggtttcactccccgtctcccaatgaacaaagaatggccatctaatttagatcttagaaaagagttgtctgaaccaagcagcacgcgtatctatgccattgccaaggtaagatgttacaaggggcccacagctactagttgcttttccagaatgtagtcagtctggacattaaaataaaactgaatcacaaagtggttttaaatcagggatttttggaaaatttttaattcttttatagtattaaactggaaacatctatagatttcattagagtcttttacaattaatgataaattatcatttttatttgactttaagcctggatttaagggcaaattgcagttttaaaggatgattaaatagataaaatgtccccctttttaagtatacttagtactaatactcaagtagatttgactatattgacttgtcctttactattaactttattacatgttccttgaatgtgtaaaattgtattgtagaaaggaaggtgcatacaataatgtcccttagtatgtgccacttgagtctagaataatcttaatttatttgcttctctttctgtgtttaaaaaacagcaacagactataaaggcccacatgattatagggttttccatgtaattattttattggtcttactttcaggaaaaaaggccctacatttctcacttccctccactacttgcttctcatgcaaattaaatgccatgttaatctacttttatatttactgtgcttagagttttgaagtttcagctcatctgattttataaaaggtgacttgggcagctggaatctgtctggtcagaaatccctgaaaggctttttgacatttaaggaagcacaagcgttaatcctccaacagtatcaaaccgcactggttctacaaagctctactgaccattttatgtttgtgtgtgtgtatgtgtgtgcatgtgggatgagtcggtgaaaacatgaactttctctttaaaaggattcccgtctttgtaatttgcctgtgtagaaacagaaaaatgttgttagtgattttgaactcatcgcaacttttatgtccatattttgagtccttaagagacctgaaggagaggaagggatatttccttaattgcatccaatgtatattctcctcgctcttatggtttctaaatggaaaatatttaagccctactgaaattctgggagttgctattatctcttgatggacattttcccatgttgagtttcaaggtaattagaatttttctctggcggtggcgggtgggatagcagtgataagaagttattttagaaagccatttcaccttcatcatttattatccctatttcagtcttttatttaagaagcagctcatgacattcatatgtgtgtgtgtgtgtgtatatatatatataaaatttttttctcaggcaaaggacagtaaatagattttttccttaagtctagcaatcatgtttctgccactttgaaggagatgaaaaaggcaagcatttccaagttcccagctaagctgtaaaactcaagcaaatctctcattcttttctaacagacttataaaagatgagaatctgggaaaaatgtgtggaggttctttctttcacagggtaccctatgtatgagcaagaagtgcaggggctgcgtgtaaattattgcctgctcgagtgctgggagaaggaactgatttctgtttgttagaggtcatcattactgttcatttcaacagcagccgggaacttggtgattttgacagagagtgtaaggacggtggagggctgaaggggaaaaagaatgaagggagtgtgtaaatctttgcttgctttcatgagtcttagaaagagcaacttgctctgaggtctgatttttacagcagtcttatttcaggatgactggatcatcacctcttttgatttggggagaatgcggggcattatttttgatttttggaacattaaagtaacctcaaacttgtttgggggtcattatagacttcattacagtgatgttacatagcaaagctgcagtgcttggagatgaggtcttaagactggcaggatcttgcttgctgttgagaaatcatggatttttttttttatccagtctatcattgatgggcgtttgggttggttccaagtctttggtattacgaatagtgctgcaataaacatacgtgtgcatgtgtctctatagtagaatgatttataatcctttgggtatatacccagtaatgggattgctgggtcaaatggtatttctggatctagatccttgaggaaatgccacactgtctttcacagtggttgaactaatttacactcccaccagctgtgtaaaagtattcctatttctcagcatcctctccaggatctgttgtttcctgaatttttaatgacagccattctaactagcatgagatggtatctcattgtggttttgatttgcatttctctaatgaccagtgatgatgagcttttaaatgtggcacatatacaccatggaatactatgcagccataaaaaaggatgaattcatgtcctttgcagggacatggatgaagctggaaaccatcattctcagcaaactaacacaggaacagaaaaccaagtaccacatgttctcactcataagtgggagtggaacaatgagaacatatgagcacagggaggggaacatttcacaccggggcctgtcggggggtggggaggtaggggatgcatagcactaggagaaatacctaatgtagatgacaggttgatgggtgcagcaaaccatcatggcccgtgtatacctatgtaacaaacctgcacgtcctgcacatgtatcccagaacttaaagtatatatatatatataaaagaaagaaatcatggatttgactgtagtcctttccttccttccagtgaaatgactacaggattctaggccctccctcactgtatgtgcttgtgtgaaaacctcctttgatctcttaaaagtttcagtaacttaaggttctctccacctcacagtgtagatggccgacagctaattgtgcctttaatcacttagaaagtaagacagaatattaagtctttgggaacctgactgtaattacagggagaattaaacaaaagaaacatacattgactaggaaatgaacatggctttgagtatttctgttaaatgtcatcttactctagtcaacaaaattatgagccatgccatatctcaacaattataatcatggtctctctgatactatcattatgtaaaagctttaagaaaagtaagctccctgggctgaaatataccagcagagttactagttgcatatatttcttaatgggtcttaaaaacgcagtgtgttattctaaaatatgttgttctggaatattttcagatttttcacagggtatatacacgtacacatacacacatacaagaataagagtagacatctttttgtataaagattttggttttgagagtttatctcttttttcagttaaattttctactcagcttaatgacccatagttgtagttttacttttgagaaattgataaagtaagcttgaggaagaggctgagctgcctatcagaacagaagttattactacattgttttggaatatattaggattttaaaaaatgcctgccttagcacaaaaatcatagtgactgattcaaaacaattttttatttgaagtcctctgtgaggaaatattctggaggaataaagccaagccagatccgacccataaattctcactgactattgtatgtttgtgtgaatgtggagtgaggtgataaaaatatgctatctcctacaagataactatcaacactacaagttaagagatcattatattaattctagattttcttaccaatttggcttaactgtagtttcaagagactttctttaattccaaagagatgtaccaaatttagggtataatgggtaacacaatcaaataaagaggagcgagtcaaaacctgttaggagatttttctgagaacacaccactcaaggcaagcacctactctgtatgccatttgtggatatagttggcaccatctttatgtttattggaaggaatgtcagtgatgtcagtttcatgttttgtaactcagtctacagtctcgggctctctaaataacacacagaggcatgactgctatgtattttaaaccaaataagacatttagaaaaatgtttgccaaagaaagtatctcttctcctcttggcaggccattgatgacaacatgtcccttgatgagattgagaagctcacatacattgacaagtggtttttgtataagatgcgtgatattttaaacatggaaaagacactgaaaggcctcaacaggtaaggcagtgctgctctcattcatgccagacaccttcagtgcaatttttaaagagtcttcttcctactcttaagcatttggtctacattgtgattcaatgaggtagatagtgccattgttggaaaatagtacccgtagccagaagacaaatggcaggtttttttttttttagatgtttacctttagaaatgtatccattaatctttttaatcatcttctattcccacccttgtcatcagacatagtaataaggtcttttgaatgcacaaaattggtatacattgatgaacgtgtattatttaattatgaagtattatctagatttaaattttattaatcaattaaatgaatatttgttttctataaattttcctctacattctgaagtctgttttccccttttaatatcaatctatacattgctgtatattgaggagaaaatgcattccttttgcgctctactgtttttaaattgggacattcagttcagcatacaattaagccacattcaggtttctcttaacagactcttcacctctgactaatttacatttttatctccatcatggccaattatttttaaacttcattttatgttgagaatattttgataatgtagtccttaaaatctacttttaaatttttcatgggaaactgctggggcaccttaggctgatgaaagcatggatcagttttaaacatctatcttcaataagaggagcatttattagcagattaagaaagacaatatagtcctcttgaacttcttccctctgaaagcactctgaaatacactactattggaaagacgtcttacctgcaaactagggatgtgtttagagaaggaaaaattttgtttgtataaaaattgttctcaaatgatttgacaaaatgtagatactttaatcacttaaaatatctttgaggacagtggaaaatctcaaaacctggattgctcaactatttagcaattgcaacatatacttgggttactgtatttgcctgatcaatatgtgtacaaactaggtaataaaacacttgcttttctttttgagaaaaattaggttctttttcatctatttaattattgcccatgtcaaatgcttggttttgaaaactgaggaattctatctgacaaagatgaaaccagctatagttgcttgtaaatcatcctttctagtgatcacataaaatgaacagtagacagcaaataatttaggaattgaacctatacatttatcttataattttgctgacttaagtttccctttcttggtttatgatgccagcagaacttctgtgtaaaattatagtctgttctactgttctcagtttcaggcaactgatttcaaatgcctatgaaaccactccaattaagccacatgggggtgctagaaacttatagtatgccagtcacagcagtggaaaagacctggggtggaaaatagcagatgttattgtgatttaaatttccacttgacatacgttctgatttttggacaaattcaatgttttaattgaatagttttcgttacaaccagaaggcaggttgagattctaactaagcataaataagggtatattgatagtgaaaaaggtccttggaggattaaaacaacacactgttacagatcatttataatatttttctgacttccacattctgttgcatttatttgccgacaatttgacattttcaatctccattttctggcataaatatatttgtaaatagggatattttctattgttcataatgatctacatttaaaactctttatgtaaagctttatatcatttcaaaaatttcaaaaacttacacttaaaatcatctctactgtataaatttgtttttgatccagggaggttgaagtgtctattatatagcaaaagctaaagtaaacctgaagtggaactcacagatgatccacggcgttagcaaacctaaaccctgaactcattatctgagtgtcactttatggtttaattcctttctttttgaagtgtcattgatgcacgcatagcaatttgataatgattgttatttagcggtattagataaataacaagaatagatggccactaaagctacctgtctccatcattttgtggcacataggggtctgaagttgaaagaatacgacagctgatggaatgaatgttaagtatgtaaggccttgagtttccttgccctattttaattatactcaccattagtctgggtctgagtcctctgctttttctcggcccctcaatatccagggaggcttagtcatcaaggtacgtactgctccaacagtaacaagagctccctattaatgacctatagctgacttacatattgcgagtttggagagaggctgagaagattagttgttctttttcatttgtatttatttatggtttactttgaagatctcaactgcttctgtgttagaatggctgtctttagctgtaggcctaggagctagcgatttatttggtgtgcgttcagagaactccaaaattctcctgcctcaacatctatctctgctgccaatgtaccgcactccctttgtacttttcatagagatccttgagaagacaggcagtggggctctcacttgggaaaagagaagtaaattaagagaaaaaatatagaatgctagacgtgggttttctggttccacccttgtgcattggaaggagcagactatggagccagagattggtgcgcagtcctccccactgtagaatcagacgtacatcacctctttcatttctccagattcatgttctttctcttaatctctgcttctagtttttttgtgaagcttaatttatataagtataaatgacatctgacatattgtgagggcccaagaaaatttttcctcttttcccctgaaaataaaaatgctacttgttgtaataaaggttactttatgattttagatatgtattatatattatgattttagatatgtagatatgatagttaaatatttaaagattcattttcagactcacaatttttatttgcttttatattttgcaatgtatcatttcttaatttcctttatgatgcatcacttattttaatatcagacctattttttaaaggaagcaattgatagctacgatgcaaatgctattcttattaaaagataaatagctttcccttatgctaatgaataaaaattcctactctacagttgttaatcaatctcgagttctaaagtccgataaacacatttaatagcagaggatgagcatatcattaaattgatggtcagtctctgacttgtgtttacatatagtcatctgaaatgaagttcagaatttgagtcccaaatagactatacccacgcatggacacagggaggggaacatcacacaccggggcctgttggggggtggggggctaagggagggatagcattaggaaaaatacctaatgtagatgacgggttgatgggtgcaacaaatcaccatggcacgtgtatacctatgtaacaagcctgcatgttctgtacatgtatcccagaacttaaagtataatataaaaaaagaaatataaaaacaagaacatagtttatgtttgaaatgtaaacaataaatgtgcttatttatgcaatagcttcaaacaatatattttaagataaaatacaatggaaattattaaaaaagatatactcacatatttagtatatataaatattcacagactgagatggggaaaacaaaacaatgattgtaactaggtagatattatggaaataactgatgagttttccatgcctgtgagatagtagaaattataatcagaaacccttctctttgaaggggagagataaacatgtttcatgttcatgattacgtatgaagtctcatctttctgcagggtgatgagacaagagggataggtgtattaggccattcttgcattgctatgaagaaatatctgagactgggtagtttatgaagaggtttaattggctcacagttctgtaaacttcacaggaagtgtggtgctagcatctgcttggcttctagggaggcctcagaaatcttacaatcatggcggaaggcaaaaggaaagcagccgtgtcctatggaaaaagcaggagccagccagagagagggagtcggtgggggaggtgccacatactttcagacaaccagattatgcaagaattcactcactattgccaggagagcaccagggggttggtgctacatcattcatgagaaatctgctcccattatccagtcacctcccaccagtccccatctccaacactggggattaaatatcaatctgagatttgggcagggacaaacataaaaactatatcaacaggtatcagaataatcaactcagcatcctagctttgagtgcttgccccctcagaactcagtatgctgtctctaatacctgaatatagtagcaatggcaaccctcacaagacttctgaagcaatatctattcttaccagcttaggtaataaccattatttagacagcttcagccaaaaaaagatctctttcctgtttacgctcactgactttctccttttccacttaaactgcttattgctacccaagggcatggtagggaagctgactgttctaggcagttccccaaatttataggctggtgtagtagcattaactgacctagggtgataacatatttacagtggatttctttaggatttgagaagtttctttttactcagtacgatataagttgtgtcatgtaggattcgaatacttgttatgtgtatgctttggaatttagatgtttaatggtcaccaaaggtcttttaacttcacattgtcagatcaccctgcaaggagtttgaggaaaatgaagtctatataaatttttagtggaaccacaacatgtgcataatctctgtccattagctttcactgctaagctattgatattttagtctatttttcccatactcactctcccaatgccgacgctttcacatattgtgctcttcccatgtagtattttaataaataccaaaagaaaaatatccttactccgatctgtaagaaattataaaaatctcacctatagttcttttttccattagtgcatagattcaattttggtcatgtaaagatctcctgcctggagagaggaaatgcaggtaccataaatcaaataaagatgtcaaatgtcttcaccaactaggttcttctgatatagcctattccttattgtaaccaaataatgaatttataactcttaatactgaaacttgaattttgattcagtttaataattctgaatgccttccaagggtaagataataatcacaaaaatttttggactacatattaagcactgttctaagcacattattttgtttaattcctaacacaacattaagaaatcagtgattgtcctaattttattgatagtaaactgaggcactgagagattcagcagtttcctctacatcacatactaataaataacagaattgggatcaagtctaagcaggactccagaacccaggatacttgctatttaaccccttatatttgatatataattatattcttatatactttttactttagtaaaaagtaaacattgtttttatgtacaatgttgctatttatgtgagcaatattgtggatgaagcttagaaagaatacttacatgtaagtatatacctacatacttaaatatcaaatataatatatttatatttgtgtataccatagatgactgcttaaaaataatacatatatgtgtatgcttatatacttacatatcaagtatatggtatgtaagtgtgcatgtaaatatattaaatatatgtaaacataagcatatatatacacacacagaaacaggtttgcttggggtatagaaacagatttgtttagaggtgtagataacatctagaggaaataagaagtaagactacctaaaatagacagcttcagtttagaaacagtagccaataaaggggtgatagtcctatcatggtagaatcagcatatataatgaaggtttctactatattattaataaacaagcacaggtacaaatatccttcagttggactccccttgctataagtatgtaaggaattcaactataatagaacttgtgagaaagaactatttcaggactttacacccccaagcattattatttataataccaatttggattggcaattttatattgaaagacaatcatgatacttaaaaaaaaaaaaaagacacatgaacaggcaagaaaaaaaaagtgagagtacaattaccagctttaagcatctgcttatccctctggctgtaactgtttttaatttttttatttccttattttgtttttttggtttctttagctatttctgactgacatatccagcttggagattttattatacctgcctaaattgtataatttcgctcttttactggctaaaactaagctgaattaagttttgaatccttgcttcaagtgattatcttaaagaagatggccagcctctgcttttgctataccatgttaaatcatcaaagtgaaggttttctaccatttatgatgattgcttgttcttgtgcattccattcattttgggcaattttccttcaatggtccattttgctctcttgtttttatgtacaatgccgctatttatgttagcaatgttgtagatgactacttaaaaagaatctattttcattcattttacacgttcaaaagtaggagatataaccattgtgatacaatttataccatacgagtattggaagctaaaatttgtatttgtttccctattgttgacataaactttactatggatttatttacaaattatccagatattgcttttgtctaatattctgtaggtttcatgtggtttttttttgctatcttcactctaataactttaatattctctttcctctttactgcttatagtcaatatagttttaaaaaaaagagtaaagtgcacttttcaagggtccaatttccatccgaaatcactatgttcaatgtgataaactatgtccattggtgagtggtgaaaaatcataggcgtgcctattgcttaggaaaacaatctaggacaaccctggtgagttccacttgggcattcaagtgctaaattgagctcagtaaagttggccatttccctgcagccacaaacttctggcagatgtaataatgcaggtgtcacgttagctggaacactccctttgaatgtcctctcctacacatgctaacttctattgactttttatttaacttgctcatgaggcatggcaaaaatcaggcaagaacgttttgtgcttatgcttgattgaagtttctgggggaaaagtgtcacctaagagttgttggaacttagatataagaaacagaagggtcagtactttactttctgatgacaatgtatattttctggtagaaaaaaatcaacaactttcatcttaaactactaaatatacaagtaatttaaagaaagataatataacatataatcacattataatttttgtgatactttactatgacatgtttttgtgatagcatctattattttggatatagaaatgagaatggagatgattgaacactttagtggaacccattaatttgatttgcagaaaatggtcttatgtcttctcatattactactaactcacacgatattctaagcctcagtttcaccctagtaaaaacaaaacaaaaagaaacaacacaaactcccttcttattttactggtcagtcatgcagctagctgaatatatactatatgtgaagtaacaaactttaaagaaaaacagtcttaccagttattacatattaccattctatgctttcagtcttcatactccaagccatttatataatgaacctcttcaggtgtactaaaaaatggggcttatatatacaagtacttatttctttgtaagagaagagtaataccatgggaaattttataactctgtgaactaatgccaaaaatacattttatttttaatttgcttttatgttccatgtaataaaaggatattttaggtgatgtcataggtttgataggactccactaatttttaaagtaataatttattgagatagatataaaattttacatcaaatatttaatgttctgagagtcttcatttgttatttaaatagtgttttcatagttttggcaaatgattgtgcatttttgaatttgtgagagagtacttccgagtctggcatggacaagatgaatgttttgcttaaaaggttttcagagtaatattcagatgactcataaagtgcctattatgtttctgtatattaattattgtatgtttgctagttcataagaatatacaacttaaaaattttaagttgatttaaaataacacatactcagaatatgtgtatatatatctataaatagtcaataattaatacattattcctgtgttaatgtctctgaactaagcgtgatgggatatatatttacttgatggcatttctttttattaggagctggtattagaccaaatggtatttgttcttctattcagtcattatgtattgggtacctactatgtgtaaggttttgtgctagttccaaagccatttgttgatgaataatcactagttattagaccaaatggtatttgttcttctattcagtcattatttattgggtatctactatgtgtaaggctttgtgctagttccaaagccatttgttgatgaataatcaccagtcattgaatctataatataggtttataacctatacaaagagctatatatagacaggacacattaatggacatgtgagaagcagaaatatgaattcatgaaagtttagtggaggttagaaacaaaagctcttagctaactttacacatgttatctcatacaagtctcgatgtacagtttttaggaggtatgtgtctctatcccatattttatgaaagaaatgatgactcagaatgtttaagtaaattctccttactccatattggagccaggttttgagttcagaaatctctcagtccaaggacaatattctttccttcaatatatcccactgtcatgggagccaaaggaagaaggaagagagaatttaaaataaatgaaatagaaagacactttcaagaggattgcatggtttagagagagaagagagaaacagaattaagtcctcatttgatgttgggtaggtaggagtggaagctaggctataaggtccaaacacatagtgagaaacaggtaggtaaaggtatgaattctactcaggaactgacaaattgtgtttgctctttatcctatttatgctatttttcataacagtgaaaatctgactatgaagaaattaagatagtataagaagaaaaactaaagtggatattagctacctgtttgttcattgggtgaaatagttgacgccacacagtcttacttcattgttccgtaaatattgcatatatcctaatatcatcccccaattaaattgtgattttcattagggaaagtatccaataccataatgtcttaatatgtttttattataggtctttcttagcaaaaaattgtgttaatttgtatgaatgcagaatagagttcactgtggcataaggtataagtcataatttctgaaacagatacaaatggtttccaattctttatttaccatatattttcttgggaattgatatatggtgctttgtataaacactcaacaatatttgtatgataatataacaaataaactttcttggtagaaagtgaaaatcatcatttcttagtgatggcaaaggagggggaattgtagtggagcaaaatgcatatgattcctggttgttcaaagggattgaattcacaaaattcacaaaattattaattagaaaatacatagcccaagatataaactgactgtgttgggaaatattgtaaaccaacatctctaggttttaatttcttaaagtagttatgtatctactaattagctaggaaggctctgaataaactgttttttaataaaaagagatttatctaattgttttatattgtcaaagattatatacatgtaggcagtataggtatatcgtgaaatctctaactcctggtgagaactaaccagtgtttgtgtattcttgatcttcaaaaattattcacgttttcaaatttttgcattttctgagaagtttttgtgagaaatattcacagacattttcaactatatgaagggatatgattttattaaccagtgaagaaggttaaggcaaaaataaatacttatttaaaatacaggcatctactgtatatctccggtgaccttaaagtacatttctattataataaaggtgaaaaatatcactatcctatttttatggatggtgaaactgaatcacacgaggtgtgtgtcatactttatgtcacaccaatcagaggaaaacaaggaatctagcccagggctcccactttcagttttagtcactaacccttttcaaaagcttcttttgcgagatatgacttttaaatcagacagctggagatcagttcctgcttagcggtcaagttgtgagccacctgcattgttgaccccacttagagaggagacattgtgaggaatttgcccttttccaaaactcttgggggaaaacacaggaagtctggcagggagaaagccccagcaagtcacctttgaaaaatgtaaacaggattttcaagggtacaaagacccaggataataattttctttttaagttttgctttatttataataaaagatttgtatatatttatacacaatatatgtctataggtatcttttctttaaagtacaaataccttgccttccatgtttagggaggtgtgagtaaaacaactcttgagcgtagaatggaattaaatttacgcaaaataggctgccagagctataattacagaagctagataattagttgctgaccccagaatttcttcagctgctaatttatacttgagatgcctttatggggcataaagcctttgagtctgaccttaggatagagtcatgcacttcgtatccaaagactataaggcagcgaccatgcctcctaacagtggagtaaatacccgagagcactctctctctagaagatcaattttgacttgcagggagtcgtaagtatggtggccctcaccacctcaaagtgtgagtacagaaatactacacaggagaggaaagaaaacaaagggagctgaggtgctgggccaaatgtaggtgacttgctagttttgctcttctaaacttctcctcctgcttcttctcttctttctcttcctctttctcctccctgttggtctggttctttcccttcctccttttcctccagcaattgtatctattaagcacttattaccttcttggtgttgtgctgaacacttgccacatttattattttatctggctgatgagtctttttctcaggatggtggagcatgactacaggttttgggcaaaggtatttgcctatctaaggttgaagtaggtattttgacaccatttgcctatataactataatgatgataatgtaatggccatcacagcaatatccacctggcagtattaaattgcagttacttcttctacccctccccttctacccactcttcagctgataaactgacaagtatacagttgtagtgtcaagtggatggtaatttttgctttcatggattttaatgtgcattttctatgtcttcttatgaaaaaccccagataataaagatatctgctttccatgtaggtagtaagcctcatatcaacatagactgaatatgacatgtcaccaggaatttaattctagcattttcccacatcctcctaaaaataacttctccttttcctcctttctaaaaatggcttacattttttccttcaagaactagaaaaatgtagtcaaaaattattcttatatatcttacatttttctaggaaaaaaataagcagtagttattagtagataggcttctgttaagtttttaggaggctgagacaggcagatcacaaggtcaggagtttgagaccagcctggccaacatagtgaaatactgtctctactaaaaatacaaaaattagctgggcgtggtggcaggcgcctgcagttccagctacttcggagactgaggcaggagaatcgcctgaactggggaggtggaggttgcagtgagccaagatcacgccactgcacttcagcctgggcaacagagtgagactctatctcaaaaaaaaaaaaagttatttattttaacaaggctctaagtaattctttctagaagtcaaagaaagatatattgaaatatatttatatatttgttgcttggtacaacctaagtgatgtttggaaaactgctctgtggaaacatgatgatttaaacaaagatgatggagatgttttaaaatataggagtttcaaataaatttatttgcaataacaaattgtaaaacatcaaagagtgcccattcaatccctattttctatgaggccttataaagtgtttcttcttatctgttagatttaaattctgtacacataaaaatcttatattcaggggaaaatccagagttttgcttactgaatacatcttctttattttggggaaggcatacattgaatagatttaaaattataaataaatgtattcatcagaaataacagaagcaacatttcatagtatggacttaacccgttaatccaattggctcaagcaaaagctatttgattggtatcagcatcctttttttttctttttttttgagacggagtctcgctctgtcgcccaggctggagtgcagtggcgcgatctcggctcactgcaaggtccgcctcccgggttcacgccattctcctgcctcagcctcccgagtagctcggactacaggcgcctgccaccacgcccagctaatttttttgtatttttagtagagacggggtttcaccgtgttagccaggacggtcttgatctcctgacctcgtgatccgcccgcctcggcctctcaaagtgctgggattacaggcgtgagccaccgcgcccagccagaacactttcttatatacgaattgacataacttactactttggttaggcagtttccatttgtttttcatcttggtaaagacgaatggtaaaattcaaatttggtaaaatcaagggcagagagagagtcattgcatcttaaattaagaaccatgggccgggctcggtggctcacgcctgtgatcccagcactttgggaggctgaggcgggcagatcatgaggtcaggagatcgagaccatcctggctaacacggtgaaaccccgactctaataaaaatacaaaaaaaaaattaaattaaaaaaataaaattagccgggcgtggtggcaggcgcctgtagtcccagctactcgagaggctgaggcaggagaatggtgtgaacctgggaggcggagtttgcagtgagccgagatcctgccactgcactccagcctgggagagagagcgagactatgtctcaaaaaacaaaaaaacaaaacaaaaaaaaaaaacaaaaccatgaaaaaacaaaatgtggtttattatggctcaaaaattgcaattaacctacattaagcgtttttcttcatcattattccttgtattcatagagcataattatgacattatattcaatactaaatgagtggctttaccagattaagagtaatatcatgatatttctggattattagggtcattaaagattagcaaaaaagaacaggaaattcagaaaattaaaacttgcctatttaaagatatctacattatcagtttctcataaggtttcctttttaatgttgattttactgttattattactagcctttaaggtgaaatatagttttaagtatgccattttttgaaaactattacttgtaacattttagcattattgtgatagaatctgggtccacttagcactattagataattttcttgatgccatactgtcacgtgaacattggatctaggtattatttgctctgtacaagaaatataaagattcaagtcttcttaaattccttcaaagacctcattcctgtatagaaacagccatggtactcaaaaattaagacaaaatagtagtgcctacccaattgcctgggtttttatactttgcttttctaaatgccacttctatttttgaaaattgtcttttgcatttctcgtaaggaaacacatagcaacttgtctccttgaatgaagagaggtgacaaataatttctccactgatggcattattgtgattgtggcatggtcttgaacccgtgaaacgccaaaaataataagtgaagcagtaaaaaactcaagagagaggctagtgagggttcatgagtcagagaacatatatcttactcaattctcttattaaagcagatgtcattactgaacgtcaggcttagtttttttctgccttttggagtgttttttttttttttttaaagaggataataataaaattgcaaacccattccataattgtaggccaggtggagtgctcattttcacattagagcttgtgcaatctggagggaaatttggtttagtattactcgtgagttggtggatcagatgaaagccagtcaagtggaagagaggactgtgtgaagtgcgctggctcccctgataattagaatgctgcaggcgttcctccagtcagctaatagatttccccagctcctctgtgccaggtgaaaatttcctcattaaggggaatttattccatttccttttatcatttattattgaagactaagtgtgagtggaggaaatttcagagatgacagggaggaattttaaacaacaacaacaatatctacattggaagtcttagagaatgaggagaaaggcttgtattgtttgtaaaccagagaacacaccagagactttttgctatagaagccgagccatgctgtctcaccattaaaagattatggcagagtgtgtaaaagtctgatggtctggttttaagacatttttttcaccttctaaaatttcagtcattttgtgctgctaagtagaaagaaactgaagattatgaaaaggccagcatcacagccatttggtgtgttgttttattgtatagattctattatgcaatgatgaaagtctaaccttttgtaaagtttgcccttgaactctcaaagcaaggcaaactggcacgggaaagaatagttgtatatataatagcatattttagaggacacagttctgaaatatggatttaatgtgtatatgttcaaaagagtaaaaattaacataaaatactagtacatacaaatatatatcaaagaacagaaggataatttattatgcatattttaaaattgtgtgcttttgtgcaatatgctttcttcagctgatcacatttctagctgggcataaagctgtcttgatttacaacataatataaatggagtattccctattgaggtttcaaaaagcagtgttgaattataaattcagtatttatatttcttttagtaattattctgttttgagtttgtttcaaattaaggtttttattttccttcagaaaaataaaaatgttatagccttgttttgaaaataagcttttacctagtttgatcaaaaaaacaaaaacaaaaacccaccatgatggaaattggttttggcaaacaaaatggagggagcataatgtgggcagataaagatgaggaacatctatctgagtctccacattgttaaatgagctttatgtttgcttaagattatgcatcttgtatttatttgactctgaggagatttaacctgatctaaatcactgccccacaactaatgaattgtgtctttgaactgtctttttttttctttgattataatgggacacacaatacaattttgtatcagaataagctgggactaaagtcaattttctactgtgtataatgacatctcagccagcctggtgttacaccaaagagagaaaacagaggagaggaaaggtgaggacaatacagagaattgacctgcttccattaggagtaccttgtggaattaggcagcactgactgtgggaagggatctaacttgcctgtgcctctctaatggccctggtgggtcagtatcaacaatgatttctcagtgaggaggattgctaagtgttttgcactatttcatgatcatgtctaaagagcagaaataaccagagagaccatgaacaaaatactatagaaattacattactttggacatccaatgatcacacatacccaatatctgtattcaagttaaggtagatgaacatgaatgtactaatataccatttcaatttaatacattctaatttttaagacatttaaaaatattgtattctgttattgatctagttatttgaaaattgggcagaagttgaagcagtttttggctcaccaagaaaatgtcctaagaatcaactagtgagattaaaatatgcaaggtgcaggtctagcttgatacatctgtttcaaaattctcacctagtatgatttaaagggatgcctatgtagaaagttttcactcccattctgaagtatcattcacaatcattattttgtgttactgttgctcttctcagacattttctttaaattatgaaaactctctggtgtgggaaatgctatgggcaggggagcagtaacagttgagttagtcttagtgacagatggcttttttttttcgtcaccagagctgagtacaaaattaactcacttcactttttaatgcacaaggccaattcttatcaatcaacctttttcttttctctcttctttctcgttctcccttctttcttattatttttatttctttgctgataagtgttcagttttattagtaggtagaggcagaagactttgtatatttgctagagatgtctacatacattctgttagactcttgtggtgaaaaagaacaagagaaattatgcatattccagaaatgaaaatactacattcctgaatgaaaatactgcattgctgaatgtagacgacacaaatgcaaatttattgcatccctaatagaaatgtgaggaatctaattttttcttatttaataccattatttataattttcattttaaacaacatagcgacctttgaaaacctgactggtattccatgtaagaaggaatgcaaacaaataattaaagaccctctaaaaattgcaacaacaaacaaatagaaaaacctgactgaaaaagctaaagataactacatgacttctgcttatcttagcatttgaagaacccgcacttatggtgctgccgtgttagcccatggtcacaattatagatgtgatggttcttttcaaggcatgtgttttaagtgtatctggatgactgttcttcagagttaggattttagtcatttaagtaaaagtggttattgttctaatttagaaaaatcgcttatttgtcaagcacttccaccgaaaggctgagtgcatacttgcacataaacaaatgagcaattggtttgggagcatattcttggcaaggaaagtggaaacatacctttctaaaacaaataacaacaataacaaaaaaaaatcttcgccaggcgcggtggctcacgcctgtaatcccagcactttgggaggccgaggcaggcggatcacaaggtcaggagatcaagaccatcctggctaagacggtgaaactccgtctctactaaaaatacaaaaaattagccaggcgtgatggcggacacctgtcgtcccagctactcgggaggctgaggcagcagaatggtgtgagcccgggaggcggagcttgcagtgagccgagatcttgctactgcacttcagcctgggcgacagagcgagactccgtctcaaaagaaaaaaaaaatgtttcctctactttcaaaattaatttctctctctctctctttttcttgaaagtaaaagtaaccacaaactttggtgtttccaaggctctctgaagctctaaagtcacctctggggtaaagcctttccagacttctccattggcagctggggtcccctgccctgagccacggcttcaacttgtgcacacttctcccacagcacctctcatgatgtagacatatcattggctatttgtgcttcctaacatactctgacctcctaaatgtaagagtacaatatttcatcttccatcattaatacaggcaggacaggtctgatacagagcacgtactcactaaatgttaaagcagtaatgacaatgaatgtggctaccctcaccatccagtttcctcagtatgtttcccatacgtgccatgtccactgctgctctcaaacaatagccaatactgttgccattgcctattgtacacctgtcaactcctttatctacataaagttgaactttgttttttcttttttgaggtggagtctccgttgtctgagctggagtgcagtggcgtgatctcggctcactgcaacccccacctcctgggttcaagtgattctcttgtctcagcctcttgagtagctgggattacaggcacctgccactatgcccagctagctttttgtattttttgtagagacggggtttcaccatgttggccaggctggtctcaaactcctgacctcgtgattcaccctcctcagcctcccgaagtgctggtattacaggtgtgagccaccacacccggccaagttgaactttatttatagctctgttctcatccctccactgctgtagtgtttctcaagtacaacctttcacactattatctttctctggcctcacgtagcaccacatagcttatccctccataaagtgttttgaatcactatcatttcattgtctcaaatattgtttccttatcttctggggcagcactgttcagtagaaatttctgtgatgatgaaatattctgtaatctgcactgtctgacactggagccactgaccatgtgtggctgttgagcacttgaaacctggctttggtgactgtagctctaaatttttggtcttaaaagatttaattagtttttcaatttaaataaccacatgtggctaggggctgctatgttggatggcacagttctaaagcacagggcttggcacacatactaagtcagcaataatacttaatattggattgcattcaagaatttgacaggaaaatgcattgctctgagagaatgcttatcaaatacttgggaaaactaaattcaaaataagaataaaaagagaagaaattaaattcaatgggagatttaacacactgatttgagacagaagagaatttaggtgcaatagaaaaagcaaattgactaggaagagctgtagctgcaaaaatttaaactaatactgacactggaaatccagggaaatagccattatatacaccagcttgattttttcttctccaaactcagaatatgaattaattaaagcagattcatgattagaatgaacaaaatgcaatagatttaatccaattacattttattaacagcatttcatgaaaatgttttcttaaggcaagttagatcttctggcaatacactattttaatttcattgtattgactatcaaactattataattgaattgtattgtattaacaattacatgaaatagctggcccacaggtatctggttaaagatgcttttacagtagtattttattcttctgtcccttagctctttacaaattatttttgcatgcattttgaaatctagttatgagctaatttcaatcacttctttgtcttttctataaaataaaaacctagggaattgaagtttttatatttatccttcatttatttataatttatattcataaattatatttacatttaatttataaaatatatgcattttatttatatgtttatattacttatatttatccttcatttatttattttcataaatatttattgaatgctgtctgtgggccagataatgtggtagatttggggagtaatctggtaaataagccaaatgtattctttgcctttatggaacttaaatccagcaggaaaaagcctgattgacgaataaaagttaggagacattaaaagtatcaggtgataatggacatgctaaactgtatgattctatgtccatcgttccaagcaaaagaggcagtaaaaagcacaagaagttcagtgtggatgacagcaaaccaaaaggcttcacaaatgaggcttggctttagttggactttgaagggctgctgagggtcagggagaagttgagaaggtaaaaggaatgttaaaggtattacagatgagagaaacaacacaaataaagtctacgctatggaaaggagtagggggaaaataagacaaatctagtttgagtggaaaacaattataaaatgacaaaactgtcttctcaacatagacagatgggtgatattagtaagtagaggtaatttagggagaggatatccaaactgatgcaatgttgggacacctaggtgaagatgattctcaaagttcatatgcataaagacctggagcacaggtcagatgttggagaaccggccatggatttgggaattgtcaaccagtcatgctacttgcacccatgacagtggctaaatttagagagggagagagggaagacaaaagcaggtaacaaagggtagagccgtgggtaggggtagggggaaacccaaaactagtaaatggtagttttgagtaataaagtagagcgagaagccacttagtagaagccagaatatctttttaaaaaatagatcatcaaaagggtcttgtgatgacaggttgaggaaaatgaaaactgaaaaagggctcctggatttagagagtgaggtctctgattattactaatgagcacatttattagaacagtaaatgcacttgccattttttataaaagcagcagggaagaggtcgcatagagtgtgaaagcaggagatcagagattgtcagctttgcaaatagaagacttcatagaggctagaagattgagtgggttagttatttgtgtatttttaaaagataacaagacttaaatatgtttgaaggtggaaaataagaagcccttggtgttcttgaaattgaacttgtcaccgctttttattgtttttggtctaaacttgaatctctcttttctattaaatcctagtgagtccatgacagaagaaaccctgaaaagggcaaaggagattgggttctcagataagcagatttcaaaatgccttgggctcactgaggcccagacaagggagctgaggttaaagaaaaacatccacccttgggttaaacaggtaaaggagtttcccttttcccccatcccccactgacaggatttctgtggtaaaacgtaggcacccattcaaaaggccattgttaataaaaagaggagtggaattaagaagtgacaatactcatccggttgatgctcataatgtcaccaattttattcagcaagtgattaatttttacttaaaagggaaagaaggaaaggacactaggatgtaaagataagagtgagtacctgattttcttggcctaactgaacaaaacaaaacaaaaatttaaactctcctctgctttttgacctgtgttcaaatatgtaagtagttaagaaatccttagtgtaattgaaggacttgaaatttcctagcatggtggctgaccctcttgaaaataatagttatctcctttggcagtaactttttacagggtaatactttatattaagtgccccatgattatggttcatttagtattcattgtgatagggctgggcataatgagctcatctagtattcatgacaatcacgcatgaacattcataggtgtgctgttgtgattttttttcctttggcctttaatggaagggatgtcttagtttaaagtaccaccagctggtttttgtcctttaaaatcattgacttttcactgtgtgctcaaggggcacgtgcatacccttaggtctcaagctttttgctaaatattttccactcagcgattattatctttcttccttctcacctgccttacaccagcttgccctgtcggccccaaattcttgctcactaagctgagttactggcccttgagagtggaattgatttccaaatatgttcaatgagatcttgttctccccccgttcatcccctatggctttatggtagttgtgtcatcccaccgctcagtgccacaggccacttaaatcctgcgcattaatttgcaagccaaagagatccttacgtataggtcattttgctcagattttagatttcatatacagctgcttttagagagctggtggggtaagtcttcctagtaaccagttgactataggaccactttgcgatgttcatgagagttactattactactagtgatccaatgccctgtttctcaggtgataactagaccacatcactattttctctctcttattttcagaattagaaagcaattccacgggtcatacattttcctgtttgcatactttacagtaataggaattaaaggaatatgtatataaagcacaaaaaatttagtcttgaaaaaattataataacattcttatttgtttattttatttgttttctcttacagattgatacactggctgcagaatacccatcagtaacaaactatctctatgttacctacaatggtcaggtaggaatgggcaaattggcctatccagaaagctctagatttcatagacagttcacattagggaatatatattttttacctctttggatatctaggtaataaaaaaaggcatcatggccgggcgcggtggctcacgcctgtaatcccagcactttgggaggccgaggcgggtggatcatgaggtcaggagatcgagaccatcctggctaacaaggtgaaaccccgtctctactaaaaatacaaaaaattagccgggcgcggtggcgggcgcctgtagtcccagctactcgggaggctgaggcaggagaatggcgtgaacccgggaagcggagcttgcagtgagccgagattgcgccactgcagtccgcagtccggcctgggcgacagagcgagactccgtctcaaaaaaaaaaaaaaaaaaaaaaaaaaggcatcatgtgtgtcaggtatgatgatatgtttctgtactcagtcttttaagaactgccttaagataatgaaatcaaacaaatgaaaaattaaggacaatgactacatgatcatacaattatgctatgttctcatgactatttaatttaaaaaattctgccatatctattttttataaataagtagggcttgtataacactttatacttatgggtttccagagactaatagagaatacatgttaacaagaggaagatgagaaatacatacttaatgataggacaactagtttaattaaatggaataataacacttaatgatttctgcatcttccttttcttatttcctcaggagcatgatgtcaattttgatgaccatggaatgatggtgctaggctgtggtccatatcacattggtaaaataataaattatgtgtatataggactttacacaatttatatagttttcttcatacatgttaattccattattccaagaactatatcaaataaatgctgtaatatatgttttgcaaattaggaagctggggttcagaaaaataaaacccaaatatatacagctatttagtggtagagtgggactcaaatgcaggtctcaactacaaattctatctcctctcatttcactgtgtaacttaattttcatcctttttaactgaattgagcctttcactggagttgggaatggattagattttgacctgttatcttctagcatagtttttcataaggatctacatttactcaaggactttatacattagccagaaattacattgcagataccacctctgacctcatcctacgtaacatatatgactttcgtttacctcaaatgcaaaaatcttgtctgtttggtgcatgggtagagcattatgtaggtgaattaaaacataatcaccagagatatgacatttctctccagtcaattaaataaccactaaagattattacagatgcaagtatgtattttaatggacagtgatattagtcaacatatggatttaatatttaatctccacaaagcattataatatggaaatgataaaaatctatgatttgaatatatttaaatcttattctattactttaagcatagtttatttagtttttacaatgaactaagagcttcaggatatgttagtttaccaatctttggacaaatcttgaagtaggacaaaaatgttatatctttaccaccttagtcattgtcttagtccatttgtgctgctgtaacaaaatacctgagattgggtaatttataaataaattctcacagttctaggggctgggaagtccaaaatcaagtgccaggaagttcagttgtctggtgagacataggtctctgcttctaagatggcgccttaaaccttgtgcctcctataaggaaggaatgctgtctttacatggcagaaggcacaacagcacaaagggaacaaattccctccatcaaaccctcacccccagttttttctgagacaaggtcttactatgtcacctaggctggaatgcagtggtatgatcatggctcactgtagccttgatgtcccaggctcaagcactcctcccacctcagcctccctagaagctgggcctataggcatgtgccatcatgcttggcttatttttatttttattttttgtagagatggaatttttctgtgttggccaggctagtctcacacttctggactcaagcgatcctcctgcctcagcctcccaaagtgctggtattacaggcaggagccactacagctagcaagcttttctataacagcattaatctattcatgagggatctgcacttatgaactaaaaccctcctaaaaggccccacctcccagcactgttgcattggtgactaagtgttctaacacatggatttcaggagacacgttcaggccatggcagttatcttatggtgaaatagcctgaccatttcaccagcatctacctgtctactctctggagtactttttcttccttttcaaattttacctattcatgcagtaattctgcattatatcaggatccaaagaagactagtcaagctaataatcaagtgtgtgcttacttgatagttgccattaatatgccagtatatttgaataacgtgttttcacaagaatttttagaagacaatatcttaatgcaaagaattagtacaagtctgtggactttcaattctatggcatcccagtagacgtgatattttgaggtgtttaggccattattacacttcagatttctttatagaaggtcactcactctgcatgggtggccttgccaagtttaaaaggatatgcttggaaaagataggactcttcaatcaatcaggatatgtcagagctgcaaggcacctcagggatcattaggttcagccctcagacagcagattaagtggaaaggctgaaaaaagagcacaggtatcctcatcactggattaactatttttgtgtattgaggtcaatatattcactttgaatttcttttcagtaagtgagggttatttttatcattaaaattacctcccattaacattgaagttctaaatacttcaaatattgagattttctattgcagaatttagcatatatgacaagcccaatatttccttgctgtttaattagtacccatttttcctactactaatacagtatgcatcatgggtttgaaatttatatcttggagtttaaaaaattgaattgaaaatcattagcttccttagcctggactgactggtgatacatttctgcttctctttgtattgtaacttcgtgcttctcttatcccttttgccaatctcattgtctctgcaggcagcagtgtggaatttgattggtgtgctgtctctagtatccgcacactgcgtcaacttggcaagaagacggtggtggtgaattgcaatcctgagactgtgagcacagactttgatgagtgtgacaaactgtactttgaagagttgtccttggagagaatcctagacatctaccatcaggaggtaagaaaagaaaaacagaaaaaaaagaaaaaagaagacagatatatgtagtatacactttatatatatgcattctggtatatagatgtatatagtaattcctcttagaagaaagggctgccagtggcatccattgtcttattttgtagtaaaactctaaaaaaaatcactccattcttatatttttgagcccctggcccagagtgattatttttcacataaagtttttatttacattttctttctaagggtttcagctagattgaaaactctacttggtaacatgtgccagatacatattaactaatacaagatgatccctcataaatatcttgcagagtgattgaattggtcatctagacatacaataaacagcctctttctagtttgtgtgatgtggtttaatgataaacagttccagttccctgaaaatagtcaattgctcacaaaagaccagttaattccttgttccatcagatgaagccattagtcttcagtttaagatcaatgagttcattgtgaataattttgcttcctttatagctttcacttacagttgttcctccattcccatcccaatattactgagtatcttcactgtgaattcatgtgattgcagattactataagactgtagaacaaaataaattatcttataattaaaataaaagctactggaaaattttagtgatgtccagtagttaggcctttgatattattacagttattattactttttaccagaaaatcatctctatgtggaaaatatggtcaattagaaggaaaaaagtactaaattggaaccaaaatacttaaattttagttttgactgacaacctcattgatttctttaagttacataaattctccgtgctttatctttattttaaatgaatcgtctgagtataaacacatgctacttgcaaatactgtgaagttaacatagagtttatggccgaagtcagattgtaaagtataaagtatagtgctagaataatgttattattttactattacaaaagaaagtagacaagtttaggaaggatgtataattatagttgtctacttgggcctggcctactaatcctttaataaaattgatccattaaatagaatatatagcattttttagacctctctctgacatggttgtttttaaatcactccttaatattcatttgagatagacaggtggggatcaaaataagtgcatcccacaaatatttctcgaacaccttgtaaatccaggttcagtatgatagacagctggaaaaacaggttcttatcttcaagacattaacaataaaactagtatctgtgatataaatgtgaaaagtcaaatactaatttaaaaatattaaaaaacattacagatgatagcagcaggcattttgcatataattaattatgtcctcatgaaatggtttaaagaaagatgaaaaacttctatgactgcttttggatacaattatacatggctattaatgagatttgtttattaaaactgaagtcagtattatagaaagaaagaagttggcccttctttgaaactaattggtatttaaaatatagtattactatatattaggaggtaatttaaaatatgttggcggacataatatgatgtacatatgtaaatgtagacaatggtacttctgtcacaaaacaagttaaatgaatgaattaatgacagacattaattagtgataggcaaaacccattagagaatgcatgactcgagacagaattgaggttcatttatatcatttggtttaattgtaattaaatgtaatcctaaaatactgcctaaactataaatcatttttactaacatgtaaattagtaaaatataaagcatcatccttctcattggcaggtgtacagatagtagaattttataaattggagataattcataaaattccaaaaaccatggccatttgtaatgaggcaaatactacttctgttagaaaaattttctcacatgacattctttccataatacatctaatttgtgcataaaaataaggactaaccaaagtgattagtggccaggataagttaagatgttctcaaataagcttgaagtatttccttttcatgtttttctattgaaaataagtttctggttcagaaatattcttgtgctatggtaagttagtgatatcaggttttaaaaaacagaaaactaagatgggtaaaaaggatgcaaacagatctaggtatgattaatggaattttgggagcttaatggaattttgggcctaaatattttagaaatctattaaacaatatttgaaatttagaatattttatttcagtagatttcttgaaactattcaggcctgatggctatgataaggatgatgatttacctgtgtgggttaccaggttctcatccctttgttcctacatgtcccgtgatatttggtgttggatcaatttgagattggattattccataaaactgtgctatattaacattttacaaacatgttctcatactgaattccttttgccctgtgggaaaacctgcacgacaccatcacactgttactctaaaagattcctgaggccgtgatttgtcttcccattgatggtctctgattctagtcgtcaatgatgagaatttggttttgtgctgaaagcttttctactactttccaaaaaaaaaaagtagttttttaaaaatagcttttctcttattctttaacattaactacacctgaaatgagccagaaaagtagagttaacttaagattctaatatttggtctattacttcagcatagctgaaagtgtattagtttcagcatagttgaaattacaatctatagagttgagttcaggccggggatggtggctcacgcctgtaatcccaggatttggggaggctaaggagggtagatcacttgaggccaggagttcaagaccagcctggaccccatctctactaaaaataaaaaaaattagctgggcgtggtggtgcatgcctgtaatcccagctactagggaagctgaggcacgagaattccttgaacctgggaggcggagattgcagtgagctgagatcatgccactgcactccagcgttcatgtacaagctctatacatgtatttgctagataagggatatgggtgagtcacttcacctttactgagcctcagtttctttagctgtaaaatggggacagtaataatcacctcagaaggatagtgtgaaagtcaaaacagatagtccaggatacatagtagaatctttattaaagagtagcagctattatcttactattgttttgaatttattgcaaaacagaatttttaattccttaaaaagcagaaatttctttaaaaacaagtcaatttaatacagctaagttgaaaaatattgatgtgtttattaaagccttttattacactttaagctcctatttagtctaattgactcaaacttttgctataagttgctacttctccctcagtttaaaaaaattattctaaaatccttcatataagagattttttgtgtccatttaatggagtaatttgtttttaagtctctaaaacattaacaacactgctgataaacccaacataataaggaaataaaaagattatagccaagagagtattttaaaggtttttgcaaaaatttatattgaacatattttaaaataaaaatagtttaagtacacttataaatatgcaaaatggtggattattattttcagtactgtttacaatgcctttaagcactcaattgcagggtgtttgtttagttacacagtaccgtaattgctctcatcagacagaaattagcctcatcccttataagagtatttcagaacaattttaaataatgacaaaatatatttggcacatatctatcattttggcagttctactaatattcattagtgggtcattaggacacacacaaattatgctaagctcaatggcctatcagatatatgatttttgatattaataatcatgtcttatttatttatacacttacggtatataggacctttaatgtttagtgtttaggcaggtattatcctaattttatacacaagaagactaaacgttgggggaaagttcagtcttgttgtctataaaattagacaagaaggggtgggtggtacacagaaggaaccaagttaggaagggacttcgactggaaatctatttcctcaccgtctcacgctggtttaccctcactgctacaacaacacctgtcttgagaaactttgagatttagtggactatttttttttttcttgaagttttgactgctaataggagatttggacttatggaagaaaatcttacacaaatgtctgaaataaggctaaagattctggcactgtttgtaaagcaagtagtgaggcagtaggaactaaaatcagttactaggtactgttgacaggtaccaaggctgcagccaaggagaggggaaggtggaaggtcatcaaagtggaaggacatcaaagtgggacctgagatctaggctggaactaaggggtagctaaaggttagataagctggaagagaagagaaaggaaacaacagccagggaagtttcagtggtgcagagaatttgttagtgggaaaatacctagttggagctaatgagtagtcttttgagctgagaggggtgataatagataagactggaaagtcttaagtgccctgggggtcaaaagtttatgctttattctctaggcagtggaaacctttggagaactctgagtgtaggagcaatttgatgaagcagacttgcttaatctgaatgtgaagtgctgagatggaggtgtacaggagaagggagtgttaaaagaagaaatctgtattcagttaggaatttccagcagtagtccaggaattaattgattatagcatagagtacatagcaaacatttattgacttgattttcctttccatttgccacacatgtgagtgtcacaaatgatattcacgtgtacttgtatggaaatcttgcacagattttagcatctaagtgccagaaagtaaaaattttgtggcatcatttaacagtattcattggtaggagagatgtaaatatcacagtcaggttaagaattatcagtaaggaaatagacacaatattagcatagttgtccattcataatgaagttattccaatggctgatattgtgagtgtattttccaggcatgtggtggctgcatcatatcagttggaggccagattccaaacaacctggcagttcctctatacaagaatggtgtcaagatcatgggcacaagccccctgcagatcgacagggctgaggatcgctccatcttctcagctgtcttggatgagctgaaggtggctcaggcaccttggaaagctgttaatactttggtaaggagagaaacaagtatctgtttctaatgttctattttgaagagctgcaacctgaatgttgactgaatgttgactattggatatgttaactacagggcagatagaatgcatacacttagtgaatttaaagttgttgtatatccatgattgcagttaatgctgattatgagttgatagcagtattctcattaagattcagacaatgaaaataatttcaaaccagttttgaacaagatttgatatttagaatcagaagctaggaattttatgtatttcagtgtccaatttacatttaatggtgcctttagagaataaagaagctgggctaccactcgagctaatgatacattctgtaattttattgcatattttaaactactcatacatttttattgttgtttctattaattagaatgaagcactggaatttgcaaagtctgtggactacccctgcttgttgaggccttcctatgttttgaggtaacactgtatattgttttccaaaacaatgattcaaaaattgggagatacagaaatgcatgctgtatgctaatagcactagggttctatatgtagtaatttataaatccattaacaatttccaaaccatcacagccagtttaaggaccaatgtgtggtcttctagtttaatgctttcccttcagggagtggccataggaagactacagttcttcatctagaagtgtagtgtaaggcatctccttaccaaacagagagggtagctttatattaaagaacaggacaatttaaaaaagacacacaaattgaggtatctctcgccagcgtgttttctgatacccagaaatgacagcttatctttgactattgtcagcaccttctgatagtgcctttgttttaaaattttcagtttttgagatccgattgtttaatagataaattataagggtgaggaacaggaacagtgaggatcttttatattaaactttaaaacaaagttttatcataaaagaagaagttgtgaattatcacttactttcttcagatgttaccacatgtaaggaacaacttcaccaaacaagggataataaaagaaacacaatttgctttgcacaatttgaaagtgtaaatggaatttgagatgggttcctttaaaatgatgaaaatgaaaaatttcaaacgaggtggaaatctttttatttaaatgtcattttgtgtaaaccatagtctaataatactacctgtttgaggagttaatgtaaactaatttaaacatgcacacatttaaggaaggatggaaaataaaacagctttgactatcacacttctttttccttttttgcaatctatatctttgttccagtttcacatactctgaatgataagcattattgctctagccttcctctcttaaacaaatgaagcaactgaaagccctttaggcagaaatttgtaataggataaactggtgaggtgatggatatataaataacttgattgactttctataatgtatacatagatcaaaacatcacacaatacctcataaatatatgcaattactatttgccaattaaaaatacattttaacattaaaagataaatttgtagtagtgtaaaagaggtaaatgctgctgtttaaaagcaaagtaatatttttcttatttttatttttgctttctgttactcctcctctcctaccctcccaacccattttgcaaatgtcaaaattcagagtaaattgatttcagatagcattttttctcaagcatttaaaaagaaaggatatagttgaaaaggttttattcacatactgcacattgtattagcaaatattactttaaaaattgattcatttgcaatctggttgagggagtagcataacctgctttgacaacagagcagtaggctaagatcagctgttgataatgaactctgaagaaacaggttagggaaatcaggttctgggctgaatcctgttaaggcttaagaattacctggaaccagcagagtgttaatgtagcaaatcagaaagggcaaactttggagaagtataatttctagagctaccaggattccctttgggaattaatacaggtttactgaccccctacactttaccttcttccatcctcagcttcgtcagttttatactttggttgattgtcctggtgattaaatggagaaaagtctcaatttagcaagaggcaccttcttattcagccccgactggaactataggttgtctggaactgttctgagaaccagtcaagtctagtattagcataaacctgacctgctttttttccccttccttttccagtgggtctgctatgaatgtggtattctctgaggatgagatgaaaaaattcctagaagaggcgactagagtttctcaggtagtgtccaatttctttgtagtgactgttatctcttaataaacatgtagtgacatttatctcttaataaaatgtagtgacatttatctcttaatgcaaccttactttgtatgttttcttttcacacaatgtgttagaatgagttttcttttttcctcttctaccctctagtctcctaaaagaatgagaaaccttgaaggcattaaattataactagacttttaaggttggtggaaaaagaggaatacctgtgcatattttatcaaaacagattttagactccaggagtctaaaaggacaatgatttttgtttttctcatgaattagatgctggtcagggtatttctggaattcccagtctcaagggctgctcaaccatgctcaccattaacaagtgaaagctttcctgatttttaattttcacatctgggaactttgcctagtcaaacatgcaactttaatagtaagtccctcactcaactattttttattttttcctgttggcacattcagtttgtgagttaatacaagcatttcttattttgtggcaactcagccaccttcctccactgccccccagcctttaccttctccttcagtgttacctcagcatgatccatttaagatttacccagtggggttattgatcttgtattgtagaggataaaagtaatgttttccttttaaaagctttcaaaagcttgttggggcttttttttttaagggggaacaattcatagagaagagtttgatgttaggcaagtggaatttggagggaggaagagtgaaatcaggagcatttcaaagaggaataaagtgcgtggactgtttctgcacacatgacgctggatcgctcttctgtgtatgatagctgctccccaaggatgtttgagtggtaagagtagataagaataaagagtgagaagaggcaaagagtgtaaaagaagaaaaccaggtagactttgaattcatgtttgtgtgcaaatcagatagcttagaagggaatctttccagtgggccagttttcactaatggagtgagacaccaactgtcttctctattttattcctggccaggggtcctgccatgcggcccttttcagaggctggctactgtactcagctggtctcatgtgagtgatgaggcaggtgtcccctcttgtctgcctcgaacactccttataggatctcagtacaatatttttaaagtatttttcctttagcgtatggatagaatccatatgggaccaaagtttaataatagagatgttgtgattgagtactttacagttcaatgttccctatcaaactacagcagcatctgggatactgaattcaatgactctagagtaaaaccagccccaatcaatcagtaatctatgtatgtattcatttatttatagcacctgttatatggtggcattgttctcagtatcaggaattgtaatcgtgaaaagaaagatatggtctctactgtcacataggacttctttttgctaggctcaacagacttcaaataattacaattaaatatgatgagcaatgaacatcgcaatagagaaaatacaggatgttgagggagagtgtgaaagtcttgggctccagtccctgaggaagggacttttaaattgatacctgatggttgattcagaattaactgggcaaatggcttacattgtgggagtaggaggaagaaaggaacagcatttatgaaggtctgaagatgagaaagagtagggagtttctcaaaactgataaagcattccttatatggctaggacatcaaacatgatgctgattattaatgatggtgcagaagtagtcagggaccagataaaggagactttattggtcattataatgagtttgaattttagtcatattttttattttaaaaagatgagtgtgctgtagtacacagagtgaattatggggcaagaccaaattcatggaaagaggtgagtgagttgttgctatagctcagggtagagatgacagtgcctcggattagagtaatgacactaaagatggagagaaatagtaagaacatgcattgaaaagaattagtgaatgaatggaggtggagggtgaaagaggataaaggataactcctgagttttctgccttggataactgggtagacagtgatgccatttattgagatagggaacactgaggaaggagaaaagtatagagggaggaattatatatttattttttaaccttttgaatgtgaactgcctgtgaggaatccaagtggatatgatttaaaggcaagggttattataataggtttggaattgaggaccaagatcatggctagagatagagaaggaaatatagattttgaaatgaatagcatatcactttaatggaagatttgagaatgaaagcaatcactgagggagagagtatagaagaaaaggaacagctaagacagacactggaggaatactggcatttaaggcagagaggagaagaaagaaccacgaatgagctgaagaaagaagcacagaaatgtagtttacagataccaaaggaagaaagtgtttttcagaaggccagccttgtataatgctgcatttcatgatagtggtcagaaggagtttgtgttcagaggcaaaagggatattcagagaaggattcagggaggagatagcatatgacctaggccttgaagggtgagttgagatttgaaagatgaagctgaggagaaaagatagaatacacgtggggaagagacacatggaagcaagtgaatgcagggcctggtaaaaagacagtggcccaggttgttttagcctatggtacagaggagaagatatctaaaccctggagatcttccctcaacctcttcatttagtatggagaaaagcaagtggggattatgttgtggagggcatcccgaccctgacatggaggaaatgagtgtgggaagcacttcaagatgagaagtgtctgaaacagccaagaaaggaaggacttttgaagattaataaataaaaatacttgattttacagttacaaatgtcatactctagaagtggcataagacaaatcaactcgaggtaaaggatttcatctttggcccaataagaccaaaagaaaatgtcactctcattctgagttctcccacaattctcaaagagaaatatgatttagggagttgtagtgcttagaaaagataagggtagaaagaaagaaatattctgaaccaataataatatgtcattataaagtagagaaatattcatgattctgacagcagagaaagaagccatattctgcttcctccttagtcccctcttttctctaattgacctggatgcctatacttgaggattcagaactcatggtcagtttgctgagcactcaaagttggagaaagaccctctgcctcactacaagcaaagaacaaccttgttcttacagcacagattaggtaatgagtttatgtagttatgttcagccttgagtattttgcaagtattgccctgatacttataatacttaaagtacatggcttattgacactatatacatagcgttagctaaatgttcggctcctctgttttccttcgtgacaggagcacccagtggtgctgacaaaatttgttgaaggggcccgagaagtagaaatggacgctgttggcaaagatggaagggtaagtgctttattctcatctccttcattcctgccttctcatcatttttttctttaacaattttgaaatattgacaggttagaattcataatatctataaaacaggtctccagtaatagtggagaagctgtaaaaaaaatcaaattctctgacaattcagttgatgtgtcatgggtatcatatttcctatgtttcatactgttagaatttctctgatgatattcaaaagtaattatcatcctgtactcatcattccttttgaatagattttctctctcattttcttttgtctgtgtctttccttttatgtttcaatggctattatgaaaacatctaatacttttctttctgaagttcccaatcgaatcctggtttttcttctttcttcatttcccatcctcctccctttttattgggttaataaaggcaaagtcaaacagagtaaagtggataaggataataatattaaattggcttaccatatcacatcttgtatttctaatacaatgaatacctccaacttcaaggagaaatgaaaatgtgaagaatattttactttagttttatagttgtattaataatgcatttgtgacttctcttaaaatgtagtaagttatgttgtagggagtctatgccattttacttgctttaaggaaaaatacaaacttagcattcatcttctgctttgcaaatacttcaaaacactactgaagatgttaaatctttttctctttttccttccagattagcatttcagagtagatcttgttaataaaaatggtaatggtatctacttacaacagaatcacataatcttgagttgaaacacctttagagataatttattccagccctccaccctccaagtcagatattttctttacagcatccctggaaggtggtcatctgttttcttttaaacactttggtgatacaaagctcaacacattgtaagattatatattgtggtcacttttttttgacatctcaggtattctttatcttgaactaaggtctgtttccttggaagtcttatccctgattttctgagtttcagagcaaaaacttaatctatttccttttcaacatcttaagtatttgaaggttgagatataaaataagaggaacgtgatacctatatatggaagtggagaatgtaagactggcctagagacatttgtactttttcaaatactgtactggtaaaataatgctggtttgttggctttatttggctctaggtttgccagcatatgtgctttccctaaggttttctcagatatcaactattgcacatcgtcctgtactccctcttttggaaatgttccaggttattcacatagtttttaaattgccatgttaagaaatggacatagaactgcaggttgctgagctcagtggggtggggtgcctgagctcagtggggtgaatgcctccccttttccagacacttcaccaaaaaatgagctcttattattttataaataagctcttgtaaaaaatgagctcttacttatatgtggtctgttttatccttacaaacattctatgagcaggtaccattgttattcttatcttatcagaaaccaagactaagtaagtaaagcactttgcccaggtcacagaacagaaggatggaaactcaaatgtcactgttttaagacgttgctaaatctgataagcaaatctcttatgtaatttatttaagtcttttatacctacccaattattctcccttactctcagctgcatcatttcccaaggacacacatattattaacatataggttatagtgattgagaccacagactttggaatctgacagataatattcaaaatcctaactcagtcacataccagtcacctgaacctgggttatttattattacattacttttatttccttacttctaaaaaaggactagaatatttttcctttcgactccttcctctttcaaacttccatttaatgatctcttgatgagatctttgagacttatttttggtccacctaagttataccatttacctagatagatattgagctctcccaccttcttttctttcccagtgcctaaaagataaagatattttaagtgcttttcaaatgctttagcttcctatcctgttcttaaaagtcaatatgaattggtttagttttactcttttcctattacttatacccatgctaatcagtggatgagggaggtaggctctcagccactcttagctgcctctacaggaaatctgttactgcacagagaggcagcattttctactgctctcatcaggaatgtagcaagggaactacttagtgctcagtgcatctgttaggaccaaaggggaggatgagggagtagcttccttgaaggaagtacctgaaaactttttctaaaatcctttttttttttttttggccaggttatctctcatgccatctctgaacatgttgaagatgcaggtgtccactcgggagatgccactctgatgctgcccacacaaaccatcagccaaggggccattgaaaaggtcatcatttataaataaaagtggaagggaaaaggcaacactcagaaaaaaacacctaaggttttttttttttttttaaagctaggtagcaatgtaagatatgctgcaggttaaatttaatgatgaggctaacttccttgctctgagtcacctgggtattctaaagataacaattttcttcactgtccttttgagcccctttggttgtatgcgagtacaggggttctcaaacttgaatgtgcatcacagacacctggagagcttgttaaacacattgctggactccatcccccagtttctgatttcatatttctggatcgggctccagaatttgcgtttttcacaagtcctaaggtgatgctattgctgctagtctggggatggcagttagagaactgctactcctggggattctaatgtttcagggccacacacaggtgagcggcatctgaagcaatgcttctcagttaggagtggtgaaacaggtgtggaccagtcacttgagaactttctggaatctatgctttcccttctcacccttgacttcacctccaaacagcactttttgatatctcttttgagctccgagagccagccgtataaagaacttaacaaaaataatgactctgccttagtactcaatatgcactgctaggtgtacatttagaacctatcatctttttttttttttttttggagacggagtctcgctctttcacccgggtgggactgcagtggcgcgatctcggctgactgcaagctccgccttccgggttcacgccattctcctgcctcagcctcccgagtagctgggactacaggcacccgccactgcgcccagctaatgttttgtatttttagtagagacggggtttcaccatgttagccaggatggtctcgatcctgacgtcgtgatccgcccgcctcggcctcccaaagtgctgggattgcaggcgtgagccaccgcgcccagccgaacctatcatcttaaataagctttgaggaggtcccattagtctttaggtatattagatcaggctcaggctcagctctttttagtgagcttttccagtgaccctgccatcagaattcaggcagacctgtctctctggttgtacattgggctggattctgaaggtctttgttctagaaggtagaggtagcaggatactttgtaatagcagaagcattaaagaaaaaagtccttggatctcaaatgtacttcagtttctcatgtcaggataaatgatcctcagaactcaggattttccaaatctctcagagctcaatgtgtcatagactctacttcgttttatacccaattacattgctgaaccactcttgtgagcataatgagtgaggagctcttgctctttgtaatcaatgccccctcttggtatagggacattctggctctggttgaatacagggattcctgtatgtgacatgcagggcttccctgcagggaaacactgtttccttctgaacataatatctaaccttgtagagtccagggcaacagaaaagcaacacaaaagaaatctctctggtttctttgcagtaccatgtaatttcagggcctgtacctcccagcaggtaggtcattacattgatatagaggttggactgcagtttctggtgctaaggcaactagactgaaaggatttcatttaaccctcaatgtaaaaccaggttatataattgtaggtagataggggaatttggcagagagataatcgtgtacaattatttgttcttttcctattattttgtgtgtatttattgcatattattttgttaatagaaacctaatagtgccctccattataattattaatgtagatatatagctgtctgtgaagagaaattaaagacatccaaatttaaggtactgtgccttttagaaagttttcaaaaactaagatatgctctttagcacactatacgattatgctttttaattcaggtgaaggatgctacccggaagattgcaaaggcttttgccatctctggtccattcaacgtccaatttcttgtcaaaggaaatgatgtcttggtaagaaatgccaaggtgcctgagaggacaccaccactgtgttacgtcatgttggtttgcatctctctggtaatcttctctgtgaacaccagacaaagagcaactgagacccctggatctgtttgtgtctgagtgtggaatgatgcatagcatataatgtctaccttatttgaaggcccaggctattggtggcactgataagtcagttacagctttgtaaagcacactgatccactgggaaggtcactgtatgccacctacagtatagtatagatggatacggtgagacagactatcataaataaatggaatgtgtagagtagtcataaattctgtgtactgaaattctgctttactccttacccagagacgataccatttgcaaaaatgataaatgaactagattagtcctaattaatttagtctacttagtttaactaatcggtaactgccttagtctgttttgtgttgctataacagaatacttgagtctgggtaacttgtagagaaaaggggtttacttggcttatgattctggtggctagatagtctaagattggaaagctgaatctggtaagggtctcaggctgcttccattcatggtggagagtggcaagggagtgggcaggtgcagaggaatcagatggtgagagagaaagtaggggagagaaactgaagaaaccagactttttaacagcccactgttgtgggaattaatttactcctaccagactctgattatcctttttaatttaggtgaaggatgctaccccaacaggatagcattaatttattcatgaaaaatccacccctcggacccaaacacctcccactagtctccagcttccatcatggccacactggggaccaaatttcaacatgagttttgatggggacaaaccacatccagaccatagtagtaaccagcattgatttacctcctactcgcagtcatttggtggctgcaaaaatgtattaagcaagcctctgctctcaaaaaatactgtaatttagtgaaggttgggaagaaggtaaatttgtagaaaactataaagtagagtatcacagttgctagaggggatgtacaaataaaatggtattggaattatagagcagagagaacgtatttgccagtgtgtgtgcatgagcatgtatttgagcatcctatgcttggttaggggtagatcataaaagacttcaaggtagattttgtattgtgaactggatctcgcaaaacggttggaattttgacaagttaacgatggtagagagattattacacatagatagaacatcatctgtaaaggtgagaaaagagcatatttggagagagtaaatagttcagttgagtgagatgattttactgagtaaaatgggtgaactgggaaagtaagattgaggccaggagggtagtataagataaagacagtgaggtctccaatgaagcaagaggacagaaggccttcagggactagactttaatctgaagccagtggacatccagtgaaggttttcaggaggggtatggcattatttgagctctgcattaaactaaacctgtcagcagtgcatgggaatgcaatttggaaaaaggcatgaaagaaagttagagttcaaagatactgactgaaagtatcaggaaaaatccaagcagtaaggagaaaagagacaagattagcaaaacaagagctggtccccagttaataacagctggaaaccagtggtagagagaatattaatattgttgttactggctctcaatgtcctctttctcattttgaattttatctcttcaggtgattgagtgtaacttgagagcttctcgatccttcccctttgtttccaagactcttggggttgacttcattgatgtggccaccaaggtgatgattggagagaatgttgatgagaaacatcttccaacattggaccatcccataattcctgctgactatgttgcaattaaggtaacattttcaaaaatttattagtcattttatgagttctagtgaaattaaaagaacaatttgtcatcaaaaatcttgttacttttaaaaccttctaactaaagggttggactagggatttacatttcctttcaataatgtactgcagttgtactataggcaactttatgtgaactgttgtacatttcaaaaaaatttttaaaaccatctagaattgtataacttcaaaatcaattagctgagtgaattataagctttttgtgcagctgacacatgatggtgctagtttagctggtaaatagaaatccaggacacaccttgttaggataaagcttgaattgtgccaactcttacatgacttttgtaaaaagggttagcctgtggggttgattaaattcctaccacattgaccacctttgcttagtatatattttcttcagtggcatgatttttccatttgaaaaattgagacagctgttgctgtatatggtgctgtgcggttgttgaaattgatgacacctttataaagagtgaccaggaaaatttaaagtttgttcactaatttccaatacatatgtatattttaaataataccttaataataaagccattgtgatctcctagctgcatcagtatgatggtgcacagaattatgacctttaactacttggctggacaggcatgaggattagtgatatataaacgtatttgaattacgtagatgaagagcacaatgaaattaatatatttatgtaacattaatattgatatatttatgtaaaattgacaaatttctgatgttttcaaaaggtttccgttcctatatgtactagtgacttcaaccataattgtgttacagctcagacttggacttttgacttttatgatgggaactttaagttgaagttgtgaattaaaaatcttgtttaagctgataatgtaggatgccttgaattttatagtgcattgagatggaatgtgactttttatgttgggaggagaggtggcattttattcatggagactgtgacaaacatatattgttaaatcttttagtagaaaaatagagaaattttttttgagaccaacgattagtagccactgaaaaatatttttttccactggagattctatatatggattttaagttcatgtttctttattcatagttataggagtatgcttatttcttttagtaaattgatatatgaatttttaactaaaaataatattgatggatagatatgcttttttttttttttttttttgagacggagtcttgctctgtcaccctggctggagtgcagtgccatgatctcagctcactgcaacctctgccttccgggttcaagcaattctccccctcagccccccaagtagcccccaggtagctgggattataagcacatgccaccacgcccagctaatttttgcatttttagtagagatggggttttgccatgttggcaaagttggtcttaaactcctgacctcaggtgatccacctgcctcggcctcccaaagtgctgggattacaggtagatatgcattttttaaatgcactgtatcttctagcttactcattccctagttagctttgtatataaatcttagtttttttcaaattacttagtaattgtcaatcttaatagccctagtgaggctaattggtatcaacagatggggaaatagggaagctgaaatgcagaaatatgtaacttgaccaagatgatccagtgaaatgactcccaagctagaattcccatcataatttagaatgggtgccagaatcaatggagcaattgataaaattcctccatgtaccagataagtggacacatagcgagaaacaagaacttagtttttcatgaattgcatcagtaaaataaatgaaaaggaggcactcctatactctagttcatatgaaagttctgcacaaaggtgtttccaagcagaatgtttttcaaagcttttaagaggtgtcaacaacagtttaatgcctcagaaactggcttacagacagccatttctggcaaggtggcttgttgcaagttcaaatgatcagaacaagaagaggaatgtttccaaagcctatcaaagagaaaaaaatgtgtttgaactctgtctggagagaccaatgcccagtggactttgaaatcattccaataggaatatgcatgggccagattagaaacactggtccagactggtctcaggcgccctatttacagaattaatttgtgattatttaacctaaagttttggccaagagctcaagaaattcttggaatggagttttaaagccatctttcaagtcggatgcttggacccaagagattttttacatgtctactgtagcctaagtgaactctgtgagagatgatttgctaatatatttatcctctcttattcattttctacttttccctcacataatttttctccctgttttttttttttccaacaggctcccatgttttcctggccccggttgagggatgctgaccccattctgagatgtgagatggcttccactggagaggtaactagttaataatccatggaagctttcattaaatctactttgaaatctatggttttatgatttgaatacagtaaaataaagggaataaaaacatctgctatcagagtaagactcaaagagcttatgaattttgaatttaaaaaatattttacttctattttgaatagggtctaaattcttatttatattttaacatgggaatataatacatgtgttactaattcattttcacatgagaacatcttccaggtatttatctagacatccaagtaaatatcttctgtgtcttactttttatttaaaggttctcgggtctctctgtaacaacacctcattccctgccttgctgccatgaaattagatcatttgatttttactagtaatatggagaatgacagcattataaagatcatagacctaaacattgtggaatctgcagatacatgcaaaattttaggactacttttaacctcctggggattatctaaaaactataatggaatcggccactggatgtccctcttcacttgtgttggggctgtgtcagctgaaggtttctttaggattgtgaaatgtgtttcttgtaaagagctgtcagattctagaaagttctctccatgtcagtgtcaggacattttatgaatcacctagcccttgacagacttactagatacaaacttcagattctcatcagtgcatatccgagtggcaatatcagactgtgagccatcattgtttcctcttggtattaaggaaaacctaaaaggataaaatacttaattgcaacaaagtacgtgatgttttatatggttgcctggttacaagcaagatctgtgatgagaagccaagtgagacaagaaggcaggcagtcaggaataaatggctgtcctgtttgtatttggactcttagaaaggggactctttgcctctttgttgcttcttttaatttaagggcaaaaaaaaccttacttttaaatgaaggcactatgtacgtttcatctccagtcggtttaaggagacagtcttcaggttcttcttgatcccatggtcgctactactagtaatgctgattttagatggcccagggttcagatcagagagagatctattttccttcatactgttttatttttctttcttccttttttttttgaaacggagttttgctcgctcttgttgcccaggctggagtgcaacggcatgatctcagctcattgcagcctccacttcctgggttcaagcgattctcctgcctcaacctcctgagtagctgggattacaagcatgcaccaccacgcccggctaattttgtatttttagtagagatggcgtttctccatgtgggtcaggctggtctcgaactcctgacctcaggtgatccgcccgctacagacatgagccaccgcagccggcccatgctgttttctttagcatggcaaatttgttttcagtggttatgttcattctgcatccatacatatgttatgggagttattgaaatataaaaataagaaagaatgagaaattcagctcccctttgttatatctgtttctcaagtataaagagaatttttcttccattatttgaaagagtcgttaattccaagtgtcatacagtataatattacgaggtctgttttattactgacatcagaattctagcttagtaaaatcttaattatgcttcaaagagacattttcagtgtccaaatggcttgttgtaggattaaataaacattcagctactgatataagtaaggggcattttatgttcctagtggtaaagtggggatattagtcctaatctttaatggcacatttaactactttctatggttctgtagaaaatttttaaaacctcgtctgtgttgttgcatctgcactatgatgggattacccaattcttttcaatagaatttgagactcattaacttaggttgaccttatttaagttagttgcccagtacttgactgagtaaaatgttcactgtggagagaaaagcagcaaccacatgtactggtgaccagctgaaggttatagtcataagaacttttcttgcacagaaattgtaatttgcttaagaaatgaatttagccatcagtggttttttttttcttttttttcttttttattattattatactttaagttttagggtacatgtgcacaatgtgcaggttagttacatatgtatacatgtgccatgctggtgtgctgcagccattaactcatcatttagcattaggtatatctcctaatgctatccctcccccctccccccactccacaacagtccccagagtgtgatattccccttcctgtgtccatgtgttcccattgttcaattcccacctatgagtgagaacatgcggtgtttggttttttgtccttgcaatagtttactgagaatgacgatttccaatatcatccatgtccctacaaaggacatgaactcatcattttttatggctgcatagtattccatggtatatatgtgccacattttcttaatccagtctatcattgttggacatttgggttggttccaagtctttgctattgtgaatagtgccgtaataaacatacgtgtgcatgtgtctttatagcagcatgatttatagtcctttgggtatatacccagtaatgggatggctgggtcaaatggtatttctagttctagatccctgaggaatggccacactgacttccacaatggttgaactagtttacagtcccaccaacagtgtcaaagtgttcctatttctccacatcctctccagcacctgttgtttcctgactttttaatgattgccattctaactggtgtgagatggtatctcattgtggtttagatttgcatttctctgatggccagtgatgatgagcattttttcatgtgtcttttggctgcataaatgtcttcttttgagaagtgtctgttcatatcctttgctcactttttgatggggttgtttgtttttttcttgtaaatttgtttgagttcattgtagattctggatattagccctttgtcagatgagtaggttgtgaaaattttctcccattttgtaggttgcctgttcactctgatggtagtttcttttgctgtgcagaagctctttagtttaattagatcccatttgtcaattttggcttttgttgccattgcttttggtgttttggacatgaagtccttgcccatgcctatgtcctgaatggtaatgcctaggttttcttctagggtttttatggttttaggtctaacgtttaagtctttaatccatcttgaattaatttttgtataaggtgtaaggaagggatccagttgcagctttctacgtatggttagccagttttcccagcaccatttattaaatagggaatcctttccccattgcttgtttttctcaggtttgtcaaagatcagatagttgtagatatgcggcgttatttctgagggctctgttccgttctattgatctatatctctgttttggtaccagtaccacgctgttttggttactgtagtcttatagtgtagtttgaagtcaggtagggtgatgcctccagctttgttcttttgacttaggattgacttggcaatgcgggctcttttttggttccatatgaactttaaagtagttttttccaattctgtgaagaaaatcactggtagcttgatggggatggcattgaatctataaattaccttgggcagtatggccattttcacaatattgattcttcctacccatgagcatggaatgttcttccatttgcttgtatcctcttttatttcattgagctgtggtttgtagttctccttgaagaggtccttcatgtcccttgtaagttggattcctaagtattttattctctttgaagcaattgtgaatgggagttccctcatgatttggctctctgtttgtctgttattgctgtataagaatgcttgtgatttttgtacattgattttgtatcctgagactttgctgaagttgcttatcagcttaaggagattttgggctgagacagtggggttttctagatatacaatcatgtcgtctgcaaacagggacaatttgacttcctcttttcctaactgaatactctttatttccttctcctgcctaattgccctgtatttactctaatggtggttctgtacctgtgccaaatgatgatatacatggcagaattgactcctatcaggttcaaatataccacttgttctataattatgttggctatttgacttgtagttatattgtagcacaattaccgtaaacctaaatggaacttctgtatactctaacattactatatatgttagtttgtttggaattgttttttccccatatggctgtggtattcaggactagtagcaggatattttgtttcactttatgaaaatgatgtttttaaaaaacaggttcctttgaggttttcatggagttattaaatttctcagaaggctgtctcataagctctatgaaatggctccaaaccaattcagcagttacgcatttctgctactgaccggtaaattcatgcacggctgcatagtatatatgacacatactgttatttaaacagtaagtcatattaacattcggaaacttaccacattatggaccagaagctgtgatttgtatccaaataactctcagtagaatccagttatgttgctccattgagtgttgttggatagaaaaagaattgcttattcattcattatgcttaattaaaaacataagatacatctgccctggccagccttttaatccctggattcagattgcacaggctttgggcaacattaataaaatctacagaaggagtctatgagtaaagtactttccatttgtgcgtgcatgtgtgtgtgtgtgtgtgtgtgtgtgtgtattttaattttaatttttggtaggagtggttgactattctttgcatcctctattttaattttttatttatttctaaacaggtggcttgctttggtgaaggtattcatacagccttcctaaaggcaatgctttccacaggatttaagataccccagaaaggcatcctgataggcatccaggtaagtggtttgtggctgtgtgcttgcccatggtcatacatggtgagtggggaggggcaggatagaatgttaattgtggtatagaggaagggagatttgttttacgtttccgtttatggcaacttccaggaagaagggacatttgttctctatttgcttcctgattttgccttctgttgtatcagcccgtgcaaaaataaaatacagacagaaagaaaatgtttctagtgaagggatatttgttctaaatgggatgcagggtactttaaaaaatgaatctcttattctttggttttgtcttttctatatgttttactcttagctctccatccttagttcctgaacataggcattatatgaggttggatctcacttcctctgtttctcttgatatttctctgtctcttgattttcccccttgccaattcatccatgtctatagtacctactcttctatctatagctaccacctgtaaatttacatcctcagccatcccatatttccaacaatctgctggatacctccacttgaatatctcaaatccaacgtttctcaaactgaagtcatatctgttctctcctgaccatctccccttccttcctttcattcattcagtccttcacatttcaatcacttctaaatgccaaggattcaaagttgaatacattgatgttatttgattaaatttctcaacttaacactccagattgaaagtttttgaagggtagtgacttaatgggcctaatacagtcagtttatttcatagtatactgtagaagttcttgaaatattattcattggtaagccttctaggtcaaagtagggtgaaatgaatatctttatgcaataaaaaatgcactgtcaatttattgatgtaagttaaatataaatcttagggcaaaatgataggaaacttctattactatttggaatgctttttattactattcagaactacttttattactattactaattgcaagagtgtacaaactgtcctgtttataaatttcctgaaaaaatactagaggcttcccaactggtcattcatttttatttgagattagtaattcttgggtcctatgaaaaacaacaaatggtcttatataatatccctgctgtgcttttaataagctcaaactctgcatggctacataaaaatcaataaaaatataattagaacagtaccaggtattctcaagccagtgggtgattattttagattccatctcattagggtgtcttaatattagcaaattagactctggagactttacaggtagtggctttggagaagtttctgcaaagagtaacttgggattttgctttataaaggtaccagaaggacgacggtgaatagttagagcagaggctaacaagatgacttgcaattgtgaagcttaatggcagtttagagacaaatcacaccatatgatagactcatcatgttataaatgggtattaagtattattaagtcccaagtaggagaatatttgcccaacttccagttatggcttaaagtttaatgtgagacttgggggcattcagaggagaccatgcccttagtccacatcttcacatctaatcataatagtgctaacattttaaaatgccactttaagaaggcagtgatgtataaaattgtgccttgtttggttctagtgctgcagggaaatgtgaagcaaaaattaatttgatccctatgaagtatttgcgtaattttggcattagtggacagaattttgctttgtaggggaaaaaagggtttgttagaaaaaataatgttttcttaaagtagtgagagctggctattgaaaatctacctttcaatactttccttttaaaagaaataaatgttctagcagctacatgagttgttgcgaagaactttctgcacatgagagcatacggacacagatttaaaaatatattaaaaagtacttaaaggaacttaataaaattatacttaagaaaatatttacagccatggcaaaattgatcagctaatgcatagtttcttcattactatatgtaggattttcattcatggtgtttttaaaaatgcttagtctgataaactgaaaaagcgtgacagaatatactaaatggagagttaatagctataaaacttacttgactacttcttagttagtatggggccaaatctaatctcaactttttaccacagcttcatagcaattgcagataaagtaattagggttccatattttaggatacattgtacttttaaaaaacattttatttaacgtgatcctacttggtcagaagaactcatataaacacttttggatatattaagttagaactgaaaaatagcacaaaaaagactgctaatatataaatgggggttagggatagtaaatccaatggaaggcatctagttgaaggtgagttattatgaagttccaagagaacttgttatatggcagtctttctaacttttaaatttcttctctctttcccaccctactcctttacacatacagactctctgtttctggtcttccaaagttaaatccaataggtcaaagtatctgggaagtttgaaatattcataacatcaatcttataactaggacttaggataaaagaatcaagatgtagattttgtcaaaggattcttctcaatctattacattccctgtgtctctaccaaggcatttctaacataagaaaggcataacacaggtttatatggcaacaaaaatcatctttgattttcctgtaatatttctagccacctttcatcgcattaggatttatttttagttgctgtgagtaggcaatctgccttgttttgaagttttctggaagaccctttaacattaaatgatttactctagagtagatcaagagcactcactgtgttttcctctctgattgggctattcagtgatgcttgtggagtggcaagtaccaatctgacatctgcgcttcagcatcgctcagaaacacaaagcaagcattttatttgaaaagacaactccaagtgacatgaataaccttttatctttaatatggaatcattaggaacaaccatagagttgtcaatccagaggtccccgtagaatccacaggcatcacatagtattaacttggctttcttttctgtagccaggagttggataaatgtgaaaatgatcattggaggaaatatatatatttttcacttttaaaggactgtcttctttataaacatttccaagaaaataaatcagcttgtacttttcacctttcgtaacaaatggtttcttacacaggtattttcaatcagcttttaaatctgaggctactcagatgcaagctgacagctgtaatttctttttgtagagaggctgttttatgtgtcacaagtgttcaatacatgtttgatagaagtttataatgtgcctatggaagccaacacccagaccagaaggtagagtggtttcctggctgggaactgtcgatactgtcatgttggatatttatcttttccacctgggggacaacactgaaacagctccataatgaggttctgcctggtgtctgcaggtcttagaggacttgctgacttattttactttaaaatggcaaagaaaaaaattacattctagtactcctcccttaatgtttttcgtggtgattttagccaaggttaatgcaatcttgacttcatattacacaatgagtgaacgatagtcttcctatcccctattcccccctttctcaagcttaagtatgcatcaaaatcacctggagggtttgtaaaacaacaaattgctaggatccactcccagagttcctgattcaatagatctggggtggggttcaaattttcatatttttaataaattcccaggtaatgctgatgctgctctgccagggaccacagtttgagaaccactctacttgagcgatggtactttagaaacctggttaaaagttatgttagcacttattattgtcaaacatattatcagggaatttttgctaggggaaagtataaaagattgaggaaagttgagtgcatgattaatgtatcaattagcaagtgttggagatcattatgctgagccttctaatgtgatttggtacttactgaagtctattctgtgtttagcagagggtcacaatgtaatgttccatattaggggtatttaacaacatttggaagttcattttggacatttcatatatatttgttatataccaaggaatcttaaaacatgaaaaaaaatttatatgccatcaaatttagccctttgccttttctgaggagaatgaaacttgaattgtcttattcttctgtctaaccaattgtcctgatgtcactaagagttattctctaattttttacttgtttttttcttttacgtctaaccatgagcttcttgcatctaagctcatttctttctgtttggtcctaagtggaaatgaaaagctactttcctgggcatggttaaaattcatgttctataaggcagtcatgaataaccactgagcctgcctcagctgaaattcatccagttacatttatctattctatttaccaatagtttcctcttataaaactgcagttctgggattgagggggccagaatctgaaagaattttatatttgaacatagtctttggggtcttttcttaggatttagatctgtgctcagaaatactctgcaagtaaatattagggggtgttatgggctaaacattatcaaaattgtgcaaggatcacatgtgttttattgtcacagttcctagtttctgactctgaaataagatcatttgattttttccagccatcactaatatggtttataaacaggttacaagacatttgctgaagtaactagctcatgtcatctgtttaaaacctttttacaagggaaaccaacaagaatgttcctatttaaagaagaatggatatgtttttaacagtgtgtgattttaaatacgccagctcagttactcagacactcatgttaatgaagtcaaggtcagggtttgatctttgggtaggtcacctagtgttgttttctttcattctgaccactatcttgcaaacactagctcttgatcacaggaagtatgttcagaaatagggaactcctgatggcaatggtcaggaatccagggaaggtaggggctggacactagacaggtccacctggggtcctaggaaagacacagcaatggactacaggaaaatatctgaacagtgagatggagcattagggaagcctgtgtggaaatgaaatgcgtataaatgagggggcagtcagtttgggttgtaagtgtaatcgtgggtagaggaacccatgcttggaaactaggatgtaagggcaggaatctagtttttaggggggctgaaaaaacaattattgtaattataataatatttattaagaactattaataggcaagtaactgtgctaaattatagtagtaacacttaagtagtgcttacttctaaattagtttattgaacactcatactaatgtaagaactgttactattcctgttcaacagatgaggaaactgcatcttagagttgttaagtaagatattcaaggtaacacagtttaataaggtgtggagcctcaaaaaaaaaagttgaaatactactattgtcatcactgtttttgagtgaagaaatgaaggcaaagacattaactttttgaagctcataccactagtgaatggtgaaagccaggatttgaaatgcagctaactgactttagagctcattctttagctacaactttttattgcctcagagtaaatgaaaaaagagttccaaagattgagttattgcagggactagtgcataagctactaggaaaatggcctagttattgaagagcagtacaaaattagaacttagaaataagagcaagttgagcctgggtgcagtggctcatgcctgtaatcccagcactttgggaggccgaggtgggtggatcacctgaggtcgggagtttgagaccagcctgaccaacatggagaaaccctgtctctactaaaaatacaaaattagctgggcatggtggtggatgcctgtaatcccagctactcgggaggctgaggcaggagaatcgcttgaacccagaaggcattgcagtgagccaagatcgtgccattgcactccagcctgggcaacaagagcaaaaaaccccatctcaaaaaaaaaaaccaaaaaaaaaaaaaagaaataagagcaggttgaataggcaaaacagctagcctgactcggtactggctcctaacccgcatatcttttaagtcctccctgaccaggaaaaggatccttgtagaaccgaagtggatctgaacttacaaagaccaagtagattaaatagagaataaaaggagataagaacaaggtgaaaagcagggatcaagattatgtggatggaatttcattgacattgggatatagctaaaactcacactcaccatagaaggataaaaggataaaacttgtcattttttaatataaagcatccggcaacatgtaacattgtcttttaagatgttgtaaggaaataccatattgcataaatgaagagcatgtatatctagaaagtgaattttgtgaaattccttttcagcaatcattccggccaagattccttggtgtggctgaacaattacacaatgaaggtttcaaggtatgttcattagttttaagttgttttctgtcagcatggaatctgtccacaaatcaaaatattgcagaatattggaaaagaaatagcccaaaatatgtccttttgatatgaaaggtttaactaacttggtagtttcaaaacttagagtcaaatcattaaaaagactggtattaacttttaacaaaattaccacaaattcaatagaagttgccagctaaaaactgagaaagtttagcttaagcacaattgagacaaagtcccaacacatttccatatgtttttcctttttttgttttcatatgaggttatagattctagctgtgacagttacaggcaaaacttctttgcagtgaatacctccacacaaagcctggttgagtaaaacaaaattattcccaaggcttatgatgggcctgtggccatggggattttttgacctgctaacaaggaattagccatgaataattgagaaattattaaatttatgagaaattgtcattgaattattaaattcaaattaaacatataattattaaaatggaaatgcaaataaaattgaggttcttaagttttttaaatcactgcaaatatataaaaaatgtttaaagtgcccatgcctctggactgtgagtccaagtctctatccatggcactatactacttctcatgttcagcaatttcttcttctttatgttttaaattacatgttccataaaaataagaaatcactgtgatacggtaattgattttttcattttaaatgcagctgtttgccacggaagccacatcagactggctcaacgccaacaatgtccctgccaccccagtggcatggccgtctcaagaaggacagaatcccagcctctcttccatcagaaagtaagaactaggcatactgttttctgaaataatttagaggattaactttgagaaccagtatatgaatatttcaccttacttgattgcaagtcttttaaaacaaatttaaaaatgaatacatttgtggatgattgtcaagtttcactctccatcactatggaatacataacgtcatgtgtacatggtgatatgaaacgtgtttcaaaatacttcttagtaaggatactttccttgacggaaacaagtgagagcatgaagaatgtaatgcagcactttatatttcatgtcaaacttatattgtgtatagataagtacatcgagtataagatgaccagctatatttcactaaggttgtgcataataaatcaatttgttgagcacttactacatacaggaacctatgttgagtactatgatgatgtcatccattggattacctaattggtcattccttgaccaggttttcatgccttagaccatgtcatcattagattttgtacgacattttatttcagcagattgtgtgaatcttcaggaataccattgcatcaacccttaaagatctatgtggcataagtacataggagataattctctgctgttttaagatagtgcagcctacagaatggctgtgccattctatgcaatatgttatttgttagcgttcttgagaaaccaacacataaattattatcactttaataaaataatggcattgtgttcaaaccttagcaggcctccaaggatgtaatagctccgtgtttggggcattgtaaaacaataattagcactactaaggaggcaatagagttaatgtgggagtgggaacatgggggtgaaagggcattcaatggtggagggatcacctctttttaaaaaataagtatctatcaaattaccaattcttaatgagtgaacagatagcattttaaagagaaaacaaacatctgcattccattagacttgcactagaattccttcaagaacacaatataatccctatataagtgtaatttaaacatctacttagcaatagaggagggcagatggcagtcaactcagcatggcattgacttgaatggctaagagagcaatttatgttagtattttataaactaactataaaatatgccttgttgtctataagtttttgtttatttttccagattgattagagatggcagcattgacctagtgattaaccttcccaacaacaacactaaatttgtccatgataattatgtgattcggaggacagctgttgatagtggaatccctctcctcactaattttcaggtatagtcttttccttggatatagactggatgggagttttatttctgtgcctcccttaagagtgtaatcagtagatgcacatctctcttttcccctctttgtaactttcagaatagagaggaatttttaataatctaaaataatgatgctaacatggtaggtcatggcttaaatgggacagttggtgatcaagcaattgagataatcaaaggccatgaatggccatggctctctccttacaattatcctttgaataaaaagtgacagcatgacatggaataaagatacaaacttttatttcattgtttctaaatgaaagccaccatataaaagcaacaggttaatgatggtccagatgtagcacaagtgcttgttcaattcacagaaaatgattgcatgaggcatgttcagtttcacttggacatgacccatcgaatttatcacagggagaaacagagtggagactcattaactttctgcctatcatatttattttttatgcagaatcagttttaatccctatgggaggagaaataagcgtattcacagtgacatctgagatataaaagaaagtccccatggtgaggtctgagacatgggagaaagtctccattacataaaaaacttttatgccttttatcccatacccctttgaaaactggggacagacacttgtgacttttgtcttcattcattaaaaattcacttttatctcatggagggtgctgattcctaccattatattttcaggtgaccaaactttttgctgaagctgtgcagaaatctcgcaaggtggactccaagagtcttttccactacaggcagtacagtgctggaaaagcagcatagagatgcagacaccccagccccattattaaatcaacctgagccacatgttatctaaaggaactgattcacaactttctcagagatgaatattgataactaaacttcatttcagtttactttgttatgccttaatattctgtgtcttttgcaattaaattgtcagtcacttcttcaaaaccttacagtccttcctaagttactcttcatgagatttcatccatttactaatactgtatttttggtggactaggcttgcctatgtgcttatgtgtagctttttactttttatggtgctgattaatggtgatcaaggtaggaaaagttgctgttctattttctgaactctttctatactttaagatactctatttttaaaacactatctgcaaactcaggacactttaacagggcagaatactctaaaaacttgataaaattaaatatagatttaatttatgaaccttccatcatgatgtttgtgtattgcttctttttggatcctcattctcacccatttggctaatccaggaatattgttatcccttcccattatattgaagttgagaaatgtgacagaggcatttagagtatggacttttcttttctttttctttttctttttttctttttgagatggagtcacactctccaggctggagtgcagtggcacaatctcggctcactgcaatttccgtctcccaagttcaagcgattctcctgctttagactatggatttctttaaggaatactggtttgcagttttgttttctggactatatcagcagatggtagacagtgtttatgtagatgtgttgttgtttttatcattggattttaacttggcccgagtgaaataatcagatttttgtcattcacactctcccccagttttggaataacttggaagtaaggttcattcccttaagacgatggattctgttgaactatggggtcccacactgcactattaattccacccactgtaagggcaaggacaccattccttctacatataagaaaaaagtctctccccaagggcagcctttgttacttttaaatattttctgttattacaagtgctctaattgtgaacttttaaataaaatactattaagaggtaa

SEQ ID NO: 46 - DNA, 129982 bp, Homo sapiens
  source 1..129982: mol_type = genomic DNA
atgtttaatttaaagagggtccagtagtgtcctggcacatgatctggattgccatagataaccatctacctcacagctagggttgctctttagaatcttgcaaaatcatttgtttactcttgacaaaagttaagaaaacaagcccatcagagttgtttgttctgtcagcatgttagaagatggttttgttgcaatgataatcgttgtgcaaagaagactgatgatgatttttttttacattttcttaacagtatttgctatttagaatgaatgttgtctaattatttagccattttattttgtaaaatttatgttgtaggcatatttagaccaagttataagaaaatgcttcagccaaaattaagtgttgagtttgatttgtgtaattgttagtttctttactagttgttccatcatttacacaattatttctatttgaaatgcagtaattgttcagaacttatatttctatactgatgtctactaacagctttagatcaaatattaaataactcaagaataatgagatgatcttggcttacttagatatttggtttttatatctatagaacaaaggaattagaaaataattttgaagatttcatccagctatgtaaaactatctagggaatacatttactaggttttcaattttctacaaaacatctttcagcagaaagcaatcctgtttcctgatatacaatgtctgatacatagaaactactcagtacataattcctgaattgattattcttttggaaatcctagatttgatttctgaacaatcataaacatttaatggcatgaaattacccagattccatggttctggaatacataacttcaagcaataagatgcaagatagaaacatataagacattctttgctattttaggtaagtccagctgaatcagttaatcagctagaaacgtggctcacagatgaattagttttattattaggtggattactgaaaaattaatagctttatttccgtattaccttatcatttatttaatataaaacataataaaccagagaagttgtggttactttcttctgtctcattgttcagtttttactgaagttatgttttactgattttcacgaaatgcaaatatttctgagcatcagaaatccagcttttgctacctcccactcatgtattcttcccatcaaattgaatcttaaccaggtcactctttcctgttcattccatgctgttgcccctgttttctccagatataattgacatgctccaagaggatgaacattgcctaagacttgatttctggtcttggctttgcaacttactagctgtgtgaccttgaacaagctacttaattctctgagactcatcattattgtttataaaatagggatagcattagcttatttcaagaattgtttttaaaattagcaaggaaggcataccaatgcctagctcaggggatcaacaagtggcaagtacctcaactttcaggcaagatcatacttatcatcagtggagccaatagaacagatttatttaaataccctattttcacttactggcataacagcaagtggtgtacatatttatatatctctctatatagatgcagataatatactaatatattgtggttatatcttccaatgttttagtttctattgaggggtctttcttatttattacacaagaataataattattatttttttactttcaggaagattgaaagactttgcttaggactcctatgtgacatgattttaaatttaatagttagctcatggtcaaactccatttttagaattttaatttattcaatatttagctttttatgtgaacattgagtttcttttcttaaattccactctaagttctgctttctatattgggatttttaaattacagcttaacatgattaactttgggcctcttgctatgttttataattgctatatatgctttttggctcatttccatataaatcaatcctctacaacttttatttatttacagcttgtttttctttctctttttggactaacttacacgtgacctccctttgggtgcactttgtgtttggctatgtcttcaattttccaaagtcactgaattctgaatcaactttctaaggcatttcccactgttcttctcatttcacaaatacacaagaaacttcgtgaattcactggataatccactctgtccttttacattggcaataactcatttatatacattctttagcaaatgtgtatgcacataacattggcctagaatatatactccatgctgttgaattaacatctaacatgtctacttggtctgggagtagtgtcttttttaagcagaaattagcatgacaagatttactgtttataaatacatgctccttgtactgactaacttgttctccttaaggtgtttgcaaatggggtcttatgaatgatagctttttttttgttattctagaataaatcacatgtgccctgagctttaatatgtgaaaccaattttacaaggtctcttttccagcttcatttttcaccttcttttgtatcactccaaactttatgttatcaaatgttagattgataagcatattcatcataatttgatcctcactttctattcctcaaaatgccaattggatcttaatgaataggttttacttgattggatttccaaggatatctggttagtttgaaccctcatcatctaacaacatgatatctgtctgtcattttcaatccttgacatattgggaaggttttcaaacaactttaagtcttcttcctggccaaactttgaggaatcctcctaccagcttgtcctagtttctgtgataggagaaaatgtgtgccttttacatgggtacaatccacaccactttccctcagagatgccttcttcatccatatctttaattgtgaccgtgttccttgttatgatactaaggctaataaaaatcatagaactgaacccaattacttctaccttttatattctattttcacacatttctggtcaaacacaaaacagtagaactttcttcagggagttattgcacctccttttactctgaatttgtttgctctccagtcataccttactccttgctttaatgtatctcttcaaaaatagactttatagaattattgattgccaggttttttttttcatgactcctaagcatccttatttcctctcatgcttaactgatgtaattttatttgttcctgcttaaataatcatcactgatcaggcaggaattaagcacacagcaatccattcattcagtcatttttccagaagcatctcttgcatgcttgctatgttagagactttttgatagatgcaccaacttcttagagttgtttctgattcattacttaggaacatttcaagagggcagttggaagtctctgtaccttcaaaggaattactaacacccttattttctcttcattccaaaacctaagacctttattctctaagacatcctgttctcattttttttttcaatctgtagcaggtcttcccttgcttatgtcagtggactgtttaaatgaagagtggactgtttgagaagtggactgtttaaatcagtatagacacaggctgtcagtgtttctttatgtttcctttaaagacattttcgtaatgattaatataaatgagttaatggaaacaaaaatgtaaacagtagttgataaaagaatagtatcaattaaaaacatactgtgaagtattcaacttcaccagtgatttaaaatagaaatgaaagcaaaataatattttctacagcggagcaaataaaatgaaagataatacataatgttggtgaggacatttttaaagggacacccatatattgcactggtatgtaggtgagtacactctctttggagagaaatttgtaaatagtaatcaaatatggcaatattgacatgcattgtagcagcaatgaaaatggaatattttgtaatcatttaaagtaatgttttaaaagaactttgtaataacatcaaaatacatttaacataatattgcctccaaaaagcattatgcaagtcaatggcaattttcaaaactatgttctgagcattgacataaatgctagaagataatactttagtgttaacagagattatgtttgtgtggtgggttattatctattattctgtatttccacatttctttaaatatcaaatgaaagtgaatacaacctagtacttgacattttaacattttcaataccagatatgtcaataaggaattcataaaataaagtgccctgagggatttcacaggctaaatgcttctattttttaaaatgtattaatagaaaagaagactaaatctaaaaaaaaaaattcattttatcagagagtgactcataagtttagaaaacctttgatgacctggctcacaaagaatgtacttccaagtacacagggtccccagcctgatgtgtgtgcctgcattcatgcctgtcactctgctcagctgcgtgcagacagcttatatgaaggaggactgtgtacatgtggtcagagaagaaaaaaatgcttattttttaaaatgttttgaaaaataatctgtcctaaaagtgtaacatttccactaaattttttcatgtctgactttaacattccctaccaaccaactcttatagcctcaactcctttgatctatcctaatgtaaactccctcactaatgtgtaatatatttttttccagtttggttatagatttcagtctagcctgaacactcaagtatgaaactagccactattttatttattggctgttccaacctccattgtggaattataattgatggattttccaagtctctaattcagaatatttaatcaaattttccaaaatttctgccttctcctccttcattctgatgactaaagacatggaccataaaatatatatacatatatacatacatatgtatatgtatgtatatacacatatatatatgtatgtatatatacatacatatatatatgtatatatacacacacatatacatatgtatgtatatatacacacacacatatatatatgtatgtatatatatacacacacatatatatatgtatgtatatatatacacacacatatatatatgtatgtatatatatacacacacacaccgtagtttgcaagtctgcatctgggaccctttactgataaaaatgaaagcccattaaaactctcatgcccacatttctctctagactttagagtaggagaattctatcctagaattgttgattgttgacatttctatggaaaaacatgtttaattcatcatgctttgtagtcaactgctataaatggtgatgaagtcttttccttggtcaagctctggactcctcagtacttccactgtcatatttgattaaaacataagtgatgaagggaggaaatatattatagtattcattgcatgggtaccttagggtaatgggactatgactgatttaaatttattttgcatcctaaaaagtttccattagtgggtgcagcacaccagcatggcacatgtatacatatgtaactaacctgcacaatgtgcacatgtaccctaaaacttaaagtataataataaaagaaaaaaaaacttaaaaagaaaagtttccataatgaggattgagtttatatcgttttcttaattaaggaaagacaaccctcactacacacacacacacacacacacacacacacataaaaagacaagaggtgagatcaaggcgtaaactagtattggactaagccagtaagtactgcttctcagtcctcagttctctaggttgggagttttccttttgctattttcattctcctccaattcatttttcaatgatcttcaacacaaatttcgcctttatttcttgttcaaaatacttccatgactattatgaatactatttatggatgaaggctgaacattttaaggcatactaagtctcccatgatatggtaccttttcattttcccattctataccctgcatctaggcttttaaaaaatataccacatgacttcatgcctctaggctattgctcatgccacggcatcccttctgggttttttcccctctttatctacttggtgaatttgcatccttcagtataacacagctcaacataattctatgcttaaactttactgaaaatgcacaaggaacttgatctttctttcttattttccccattttatttattttcccattgcatttgggcaactttcatggcaccagttattttattaattatttgtataaactagtatgagcctattttgtttagctttctatcaccaggagccatgaagcactttgaaatcaaatactgtttgtacttgaatatattaagtaagcgtgaggacttaaattaaactttgttcctctttaaaaaaatccttaccccaactctagcactgattctatgttattgaagcttacaatctttatgtcattttctgtcatcttttctgttatgagaagacctaggtatgagtctattgcctttattccttggccttctttgcaagggtatcaaagaacactgctgcagtacttcctgttctacatagtcatgtgacttaagcaagagcatctgccagccagtgaggccccttgagagcctggttaaacatgggactgaagggttaagtgaatcactttttattcatgttgaaatatgaatgctgaagtttggaaaattttatatataacattttaataactaaaaaaacttgacttaggaatagtgcttatattaaaatcagtgtttgtcattgtttcatgaagtttttacaaatctaagaggcttaagagggatataatagtccactttgctttagttgtgttttacttgatattactgattgctttaactttgaaacacagaacaatgctatagtaagaatgtagtatactactctattaacccaaaacataatatagataggtttattgtatatttgtggagaaaagtttattctaacgttctttttacaaatagtaaaaatgctatttgtaggatgctctgatttttactttttgtaaaaagaacattgtctttttaccccaacagaaaatggcaagcgttcagctttctttgggaatccaaaatctcttatgaggcatattaggtatcacatgtgacataagcaaaagcctgtgatccttagcatgttggaaagttgctactctttaggataaggttgtccatgatgtctaggtcattccattcagctgcataaacaattcctttgatggatggctggttttctacaaccccagcattattttagcaggagaaggtagtatttgatgtgttgcaatttgtgttacatgcccatggaacatctctggacattacctcaggaggaggggttaagagaaggaggagctgtggctgaagacatttaatggcagaatgaatggaaattcaaagatcgctgtgcagtcagccttaaacactgactgcacccctcccagatttcttttacattaactaaaaagtcttatcacacaatctcataaaatttatgtaatttcatttaattttagccacaaatcatcaaaatgacgaggattttgacagctttcaaagtggtgaggacactgaagactggttttggctttaccaatgtgactgcacaccaaaaatggaaattttcaagacctggcatcaggctcctttctgtcaaggtaatacccatattgattgtttctgataaaatactatggggtatagtttagcagtgaagcaaaggtgtcccttacaaggcaaatacagttttgaatgtagctctgaagtactaatgtattaatgtttcctttactgtggaacctactgacttagcaaatgctaatttttatcttatctgagtaacatgacagtaatttttacccaacataaagaatgatgacaattcttgtgaacatgtaaaatgtaagtacactgcttgaaaaagaaacatcttttctttcatagatagctttctgtgactagatactattgcttacagtttggatttaaaaaatggagctgcttatatgtgtgtgagccacattatggtacacagtgtgttaaggtctgttctataaatagggcttactgaaaagttctcttttgaaatatcatttaaacattttaaaaacataattagaaaatatgtgtttttgagatttgcaggtcatcatgtagacactgctttagctttttccttttccttctggctgtttttttgggcaggctaaacttattattttcattttgtagagtaatacatagaggcagatagcagctgataattctgtccctccacaggtatctataattgagagggcaagcccaggaaagaaacattaattgcccttcttcctgccccccagcattgaattatgaaattcctgtaggaacctctgctccttcctgcaactttatgaagacgttcattatcagagaagcctgaagttactccataggaactttgccaatgaaaataatctttagtgactataagtttaagtaattatattagctttagatatattgcttctttagcagcaaaagctgtaaaatttgaaatagaaaaaacaaaagaaaacctctgtctgttgatgtgaaaatgggaactcacagtttggagtgttctgcttatactttgcatgctcattgagttgactaagcttctattgtttcagttgctcaagtcaggattcagtggggttttggtcctgacacctgcaaggccaaggaatattcatagattcctgtggctgccagggatagggatgggaaaggaatgggagtaaaagaaaaggaagagagatggagacagggggaggggaaggggagaagtgtgagggatgggagggagagagagagagaaagagagagaaactagctcaagatcccaggagaaaagaggaaatacatatagtagccttagtggtgtgttaacaacttcagcctttaacattgagaagattctaacaagagtataggaaattaccattttaaattaagaaaaccagaaaggaaaatgtcttttatgttgttacatattccaatgtatccaattttactctttttaaatggacatcatgttttaaagatagttaaaatcattaggatgtagttacataatggccataaagggcactgggagcagtcactaaaggttagtggcattatgtctagttatatatattttcttgaatttagcttaattatagcaaaagaatgggaaaggagaatattctaaactaacatcaaagacattgtaactagatgtaaactatgagaatttattgttagtaatacctcaaggtactcatgtatcagttcagagaaaatcaatagtaatgaaagttatcccctatgattatatgtgccatctaatacttcaaagttgggtgacttggaatatcttcttctcactctgtgagaaggtaggtatgtaggtaaggataggtgcatcttcatcagaccccagaaaccgcgaaattgagtacttacttaaaatggcacagatatgattgaaattagaatccaattctccaagatcacaataagtgctccatacaaccaccaccacaatcacaaccacgacaaaatggtctaattatgtggatggattactgtgaaagcagttctagctcatggtgacagatctgtttcaagggtctgtcacagtgcacagctaagaatgacaaatttgtaggagcactaagccatcatttcatggtgtaaaagccattactcacactcaatcattactggccagagttttggaggaatgccaagcacaaaaaatagaagttcttgaacttcacaatagtgaattaaaattccatagaacagcccaaggggacttgtgttattattcagttattgtgaaatagtcctctatctacttttcttcctgccttcactttaaaaactcaactgtcttagaaaaatatatccaaatttactatttttagatggacatcatattttaaagatagttaaaatcattaggatgtagttacataatggtcagtgaagggcactgagaacagtcactttaaaggttagtagcattatgtccagttatagatggtaaatggattgggaaagacaccctgtagtcacatctataatcattgccctgtaaattgggttgctttttcgacatatttagaggtttgcttttcctctctctttgatgacagagacggtgggtttgacgacagcaatgacgcacttataattttatgtggcccttccctgggtatttgtcagcggctaatatttatagagtgctttgccaatcggcacagttgtattttacttacaggaaagaggaaagaatttcaaggtgctctatattttaaagaaagttgatatcaagggtataaatgatcaacaaccataaaatactaaatactaaaaagttttagataccataatctttttccattagtactgaaaatgttcagcactcattattacattcagcaggctgtaacagtgtaatagtgggatatactctggattgggcacaaaaagatctggaatctaacccctgttatgcatttcctaatgccctgttcttggacaagtcacatattctctgaacctaagttttgtcatctgtatagtgcaaatgatgactgatttacttgacaaattatgtgattgtcacacatgaacaattctcaaaaatctttaaagttttaaatttaaaccattaaactgaacattttaaagcaaaaactggatatttaaaaaaaaattccattctatacattttagtagaaggacttagtagagggttagatcaaagagtccttatgttttttatggactacaagttgttgcaatgacaaggtatttgataagaattctcaaatatttataataatgatttgttcacctttgccttaatattaaacatctctaagaagatatttcttataataaatcagactcaaggaaaatgaagcaaataatctttttttttcagtatggcaaatttaattccaaaaggcagaatagacaccataataacctatttcattcattcattcatttattctttaataaacacggaacctctaccatgggagtatacaggaagaatgataaatagaaataagtggatcataagagtatagtctctgatttcaagaaacttacagacttcagaattctgagttcacaagtctgggaaagtcatcaaagctaaatagttttatttttacttgcaaatgaatttggaaatcaaaagtattaaattgtaaagcttaagttccctatgaatagaaaagtgttcaataagtactccttctaacattaatccactcattttttaacaatggtgacctgtgttataattaagctaggaacctaacaatccaagtgtcctctctgatacttcagctacgaatgagcactggtagtcattatttcttttgaaaggcattcatttttaagattttatattctgattttcacatagaagtatctatttagttccgtcttgaggagctattgtcatttgattagaaattggcaactataaaaactcctacaattagaataatttacttacattgtagtagctttaaagatagtcacaggaaatataactcattatcatattggagcctctgtacacgttagatgtaagagtggggatggggttatcacacacttttaagaataactattttattggacttttactacatatagacacattttaggacggatttcatctatggcaaactacatttttgaaatattaattgtgttcagtcccaaatgagctgttgcagaattagtttgcctgatggacaactttacatacttttggcatgcaatacttctctaattgggagatggcctttcttttgaacattttaattttttccattttttatatccccaattttctaaaatatagattcatttattagtcaccaacaacgccttgacattatgagcttcttgacataaaactcttgaaaaaactatagtttaaatgtcctagactaggttaagtgagtgaggtacctgagatgcaaaatttaaggaggctgtcactgttagtgtcatggtgtatctctttgagagttaggccctaagcacatcactcagtaccctagtcccagctttgggtcagaagctaagcattctggctgtagaactgcccaagggactagtactaatcttgacctgtgctttcctctccctcattccaatttgctcatgtctagccagactttctgacgatctagaggtgacattaggtcttattgctatggaaatggagactattcctctgcctttacatctgtattagactttcttcatatttccaacctgttccaaaaattgaggggtgctgtagaaagttttcagtatctcttaggcaatgggcatgctagaattcacttcaagccttcaggaggagtttggtatgctacgctgactgcccttgatgggatttgtatttcctggggcatttgcaatgacggaggcccgaaaaaagctgcgcgggccaaggtcaaagtttgtgttaggctccttagccctagggatctttagcttccatttgattttcttcatgtgatctaaatgagttgaacttataaaaatattttcaaggctactctgtttgctttttatttttttcaacttgttaaatgctatacattgatcttttaaatttcatagggaggtaactgactaatttgaagttctcataaatgaatcaatagggttgctacattatgaaagaattttactaagtttcttctataatgcagactgaaatataagaccattttaatttatcaccaccatacagtaaaaattagcttatgatatgtaggttcctccaggattctgaacaacttgccacatagcagatgctcagtaaggcatattaataaacctacactttatgaacatactttgtaatgaaatttttataaatgctgtattttatttacaatgagaaaccttattagaataaaaatgattcataaatcttaatcttttgtttataaatgttcaaacataaaagtacttaagtaaattaaccttttgattttgtccccttaacattggcttatgtttaaccaaagaccgatgacttaatattaacttggaatgttgtaagattattaactgagaatgtggtaaggcctaattgattactgctgttacagtgcttcagaattttgaagtgttaggccttgtaactgcagagaagtctcatgaaatatttcaaagacaaattgtgctgaaattctaaatttcaaaaatccatatcttaatagtgtaattccaagaataaaagaataagatttcatttacttgattttaactttttaccatattatctacacaataattacctgaaataaattctggctttaggctttctacttttcagtgcttagttcagatttattttttaagaggatgagtactgaggcgaactaatagcttagaaacatcaggtaagccagaaagcacgtatgttatatagccttaggccttggtgaaaatggaaaaaaaacatgtggggcctctactttttctgaagtgcaaatagtttacgtagataaatgattcaacagcaataccataatcccagagtaaattattttcatttttactactagctcaagggaattactgacttttaaatggtgtttttttttttttttcaaaccttttatggaatctattgctgaattagcttaaggctttacaggcagaacattttagtggtggagtctcatatctaggagaagaaacatttctgttcctcccatttcacagatatgtaagtgctgaagttaaaacaaggacacatggatgcctgtttttgtacgtaaaacaaaatatacattagcaaatttggttagaattttaattaggcttcaaacaacagatggatctttttaatttgaagttttgttattgtacttatatacccgatgccatagttgtgtttaacctggcttcagaatgttctaagtcatttcttctgctgttattttattgcttactcaagggctcatttacatactgaatgttatggcaatacgacacaaatttgatttttccttttctttttttgagaataggttgtttaaatcaaagcataaggaaggattcttgctttatatggctgtcaacaattatataaataggacattttagggcaatgctgtttacagttgacgtatttcttccatttcaacctaaatattgtcatgtgtttgtaacaaaacatgctgtttttcagtttcaatgtgtttcttcctcttatagtcctgtaagctccacatatacaaaagcctaatgcaattttaggctgcaagaaaagtctcattttgacttgttttccatcttgatataaaagacccgaagaaaactggttcgaagtaaaggatcgatgtccttagaattagttcagaatgctgatgggttgtgaaacaatacatgagcaatgagtagatgatttttaataacataatactgaatgcaaaggagaacctaacaataatgataaacactaggctgcttcaaaaacttttatagattaaattacaaattatgtttgaattttgactgttacttcctaagactaagccctctcaatcagtttagcatagcaccagggacagatgctcaaacctttttcaaggggaatgtagctgtgtgactctcattaatagctgttgcattattctgattctggaaaacactttgaaacatctacccttttaaactgaatctcagactgagtattaaagggtaaaattgcagtcacttatttgtggtcccataaagtttatgaatcatcttactaagaaatgaaaatatatccataaatgtaggcttacaatgaattttaattgtgaggaaaatttaaaacccctaaaagagatgagatttttagagaaatttcagagcttgcagtattctatcttgtaacatcattagaacattgaaatattgtttgacaatggtgaaacaataatatcaacatccacggcagacaaaccaaaacaattgagagtttattggaatttctacttatatgtaaccccccctcacaaaaatgtattttcattaaaaattacttataacctgtgaaagaaatctcagactttacaaatattaagaattgcaacattaaatttagttaacaatgatttttttttttttgagatggagtctcgctctgtcgcccaggctggagtgcagtgctgcgatctcggctcactgcaaggtccgcctccggggttcacgccattctcctgcctcagcctcccgagtagctgggactacaggtgcctgccaccacgcctggctaatttttttgtatttttagtagagacggggtttcaccgtgttagccaggatggtctcgatctcctgaccttgtgatccgcccgcctcggcctcccaaagtgctgggattacaggcgtgagccaccgcgcccggcctagaatgctcattttaaaagtaatataggaatgggggccggacttggtggctcacacctgtaattccagcactttggaaagccaaagcaggcagatctcttgaggtcaggagtttgagaccagcatggccaacatggtgaaaccccatctctactaaaaatacaaaattagctgggtgtggtggcgcaaagtgcctgtaatctcagctactcgggaggctgaaacaggagaattgcttgaacctaggaggcagaggttgcagtgagccaagatcatgccactgcactccagcttggtcgacagagagatttcatctcaaaaaataaataaataaaaataaaaataaataaataaataaaaaataaaagtaatatgagaatggagatcatatagctatttttgtaattcagtttaatttagaaataggagtactaaataaaattataaagtaagattaaacatggagcaattacatatacataggaaaattccgttttagtccttctaaatattgtgtgtgaaaaaatctgcagtcttatgaatcttcctccaataaattttctaacaaaggaaacatttagtattactaggccgtagagactagtaatttaatctttaatttttaaatttatatgaagtaacaagagaacacaatttttcaccgcttattttataacctgattggctcccagattcacaatacgtgtaggctccagactaaaaaatgccaaactgttagtggaaagtaaccttaaggcatttttcttgatatccatattagctacaatccttggcctatttctttggagtatgtttacatgttttatgaatataattacataggtgggagaagaaaaacatacaaacataatttcaaaaagatggaaataatgttaataattgcagccacaatttaaacatattggttcaaaagtttaaacgtatttctttgttttatgagattcaaacaaaatctcataaaaacatgagatttttagaaagtacagaaaaatctctctctctgtatgaattttattttaggcagttgcatgctaaacttgtgcttggttgttcaaataaagtgaatgttcacatgtggactccactcttgaacatcaggcaacttggaagtaacattaactttggcataaggactttgactgatcatttggtttaagtgcctagcatgacttaggttctctgtaaacaaatgctgagatgatgtttggggagcatgctctctattagggatcagcatctgtgaagcttcaggaagtagaactggacagagaactaaactgtaatgcagttttgataaagccttggccaacgggataggaagctgctgcccaccagactttcctggatgtggcctgaacctttctatccaggcctaacttagacactggtcatggggtattccaagaaagtcatggggcaatgcagccctctacagctgagatagaccctgaaaaatttgacagcaggagatggtttgctgacctcactcctcacagcagggcagcaagtttttccattattaatatgaataattatctatgttatctagaaattgaatcctccatcactggggaaaagggaggggggactgagaggtggatctccttattcatcacagcatctagggttccaacaatcttcagtgcttgagaactcaagggcctaggatcagtgcaaattgttctcgaaacctgctgattctcctcagattataatgactcaggtaattcatgacttgacatttcactttgacaatttacagatttatagataggtagttcttggttgacctgggcctgttgtggcttatccatggcaattttgaattaaggctcttataaataaatttaaatagagttcatgcttaaatttcttttaatcctcacttacgaaattggaaagcagaaataaaagtaagcttagaaaaagaaaaagaggttataagtcaaacagactgggttcagaaaccgctgctcttccagttgctaatagaatgatctttacttctctgaggctcagttagttcaagtgtaaaatggagatttcaatattacctacatcattattttttgtgaagattagatgagaaaacccactaatggctttaaagatagtattcagtacgttcatgttaactgttattaaggatgtcatagggaattgatcagaatggagttctcggtgacacaacatgctcccaaaccttacttttccaacatagcttcataattctgtttgaagtaagatacctttcccagaacagtataaatttattattcaaatccaaattctcaacttatttgtacaactgcatatagactttaataaacatagataattatatatgcaacccagtttatgttttaataggttatcagtaaagtaatggcagaaggtagaaataggatagtgacaggtcaatctacgtctaccagacatgcttaagaagtgttaacgctttactttatccaaatatcagtattacagcttttttaagggaggtattttaacatttgaactcacactagtgtaagtttaaagtatacgttatctttaattactatttccaaaattaattataccaacatttactgaatgccaaagatgtaccaggattatacatagatctcaacaacaaaaaacagtaaaaatataatagcctcagtatttttaatagagggagaattattattagttataacatagttggggacttggtatagaaatgtaatattgtaagcatgagaccacatcagtgaattaaaacaaacaaattttttgctgacatacagtaaaatttggcaagcattttagatgaaaagtaaaggaagaaaaagagaatgtttgggttatatatactgaatgcagctttattcttttccctagtgatggaggattagatttctacataacataggtaattattaatattaatgatagaaacaattcatgaggaaacctaaagaatgacatttagaaatcacctttttgggtcttcttctgaaggcattacttatatgacacctgaatggtagaagaaagcctaagggtactttttgggcagcaattgccacccagccttaactcattccttactttcatcttctatcttttagcatgaactatacctatgtgaaatatttgtctttgctttcaagaggagaagatgaaaattagtaaaatgaccagaagtcagtgagcatcaaataactattttgaaaacaccatagtgtcagcattgtaacatgctaatatcacataatgaagtacatttctatgcattcaccaactgtgtagtgagaacattactgtgtggacaacagtgggctatttcagtggggatacagcatggaattaggcattgtgttttccagatgtaacattgagaagttaaaatctagtacggtagataaatacctttagcaattaaaaggtaacacacaacagtatacaccaaatgcagtcagtggaagcacaagaaaatcagtgattaattctgatttagtacacaccatgggtactaggaagcagtaccaggatgtaaaaggcaacgaggaagacatttatgcacaaaggactgacagagaggtggggaatctaaggtattccatatagagagcgagccagatgagaggactttgaatgtgaattgaggaatttggggaatggtgtcacccaattaatgtttaagaaagccttaactatatttcataggacaggtagaagtaaggagagactggaggcaggcagaacaagtaggaggcaatagcaggtgatgatgggatttttgtcttgggtggccatgcaatttcatatagtgtgaagttaattctaaaaaccaataggtaactatttattagttagagccattattattattagatactatgtgatgaggtagaactatttttaattggagtattatttaaataactagcctgtaggaccagatgtgacttgacagttgtgactccaagatacactaggaaaatatgacaaagggagagaggttgagactccaagaaacttaatatttaaggttttaaaatattcgtaagactaaccactgctagaaaaaacgttgcattagatatctacattttagataagttccaccaataataaaacaagtgaattaagaatttgaaacatggttaaaataaaaaattatatgcagtgtaagatgaaaaaattactgtttaatattttcagaattaaaagaaataatcaggaggatgggtgtggggtaggagagcatatgctttttttttctactataacttttcctctcttatcaaattcactatttaatcatttagaaacattctgctaaatactcagttgattatctgactaaagtaatttcactaaagtgtgaacaaagcttagtgacttgtctactctgtgctagccactggtataggctggaggtgcactagtgcaagaagcagacccaatactctgcctgcatgaagttcactttctaatgtgatgaaatagataataaaaaaatcactagatggtatgttaaaaggtaatgagtattatgaagaaagagcagaccaaggagaaagagggctggggaacatactgtaattttaaatgaggccatcaaggcagacctctccgagaaaatgacatctaagccaagaggaaggaatctttaaattttggatttttaatacaaaatttggcaagtttttttattgaaattttaatttttattgcttaaaacatcagtggaaaagaaagggcaaattctttggttaaagcttaatctctcaagggaaaaatatttatctttgtatttccacgtatttcagtgacgcctcagtgatatccttattgaagttttctctgttttgtaatccattcccttatctagccttttactaaacgagaagactggagacattcatccatttatctacagagcctagcaaggtgcttgacacctggtaggagttcagtgtctgagacttgaatgtctaaatggtcttattggcatatacatttttattaaacacatagggatcatgtcatgataaggtcctttattttatagaactcacatttatataatcctttggttacttttcctgacattctacaagaatacactcttcttttcattaagatttcctttgtacttccccttttcaaagtaagacgtgctctggcagtaggcacttaaattatacttaaatgttataatctaattcctagcctgtggacctctgtcaacgaggactgaggatactaaaatatcttatgatagtaacaaggtgatttcttttatactccttggaatgaaatagcatttggggaactgttagttagaagaaaggattccaaataatagctctttgttcagtgtttgtccatcaattcatagataagtcaattggcactcatcattttaaatgcatcaggggccagtgtagttaggagatatatagagagtactttaggcagtaaacagaggctttgtaacaatataatgtgtagtgggaaagaggattggaagatctataaaaactgccaaaagaaccaaaaatataattaaagcagcaaaaagacatattgaacacaatctcagggactatttcacgcaatagcaaatgtctcttcaactacagagatggaaagcaaaatagaaaactagtttcatgaagggagtgagaaaaataccaaacagaattgtaggaataggctcacaagtgttgattttcttatgctaatttttacccttctttaaaatgatcagaaagtgtctaacccagatatgggataatttgaaattctcagatgagaaaagagaaaagcaaaataaaaatataaacaaaggtaatattttaagcaagcatgtctcagagtagcacagataaactgatatgtagaaaactattgaaatttacagtctacactcaaattttgccaactaaatacagttggtttaggttctatcaaagttacatattatctaaatttttttctttttcttttcattttgtaaaagcatggaggtttacacacgatttcctcaagaacaaaaaaaacaatatttccagtagaaaatatttttcgatggcaaattttcattacttagacgagaggtttcacctaataaaacacatcagagttacctggggagttttcctaataaacacacttctattcagacccattagcagagatatttgcatagcttataataatctttagaaatacactgaatactatcactcttactttctaaaatcttcaacttctgtcttgaattgtaattagacaaaaactagcaaattaaaacaaaatttagaatcagaatagcacattatcagaagaaacatgcgaagctgatttcctggatacagaagcagaattcagacttctgtattaagatcatttcttccatagaagtctggtttcactcataataaataataaataaataaattattgtggtttcctttgtgctgagtaactctaaagtatttttaaatttagtgaagacaaactccaactatttaaagtgtcaagcttgagatttcaaacactgggtcgaaggaaatagataaatctttaactcaaagataatttgataagcctagtaaaggacaaaatatttttggctaatcttgcccaggaacacacgcatatgctcactcacacacatacaaacacacataaaatgtacagtagagtacattgttcaatctttctcagaaatacaaacttgaaattcacatatcgtacctctgatttaaaaaaactaataaaattatctgttgagaggaacatcttaaacatatcctatcaattttaatggaaaacactaacatagttttgtgtgtaaatgtaagttaataggtatacacactcacacataaacaagacgtcggaatatagtatattggtttaaaggtaatcaagacattattttacattgcagaacacaatcattctaatgacaagagacttgggtgctttggatctaaaagaggcatcttatttctacagagagaattattatagaaaaataacgggctttcttcattttaacatttgaaaaattgagtgcatgttataaagcaagaggaacatagaaacaaaggtctagaaatcatttatggagttcctgctgcctactaaagtttgtgtgtgtgtgtgtgtgtgtgtgtgtgtgtgtgtgtgtgtgtgtgtgtgtgtgtatgtgtaatgggagtggaggtggggtggcaagatttaaaaggattaggcactttggcctcagtcctaaaactgtaagggaagtaaaatgaagaattagtatttttttttgtcttcgatgactacacttaaaccttgcagaaagaatagcacaatgaactcctttacttcaggaaattcgactcatggccagacttcttttctctatatgcctgtctatccccctgactgctgattactttgaaggaaatctcagatatcatactattttatccttgaatattacagtgtatatcttttaaaaggcaacaacttaaaaatgtaactacaatcctaagaagatcaatcttaaaaaattacttagtataatcaaatatcaatttatgattctaatttcctcaattattgcagatatgtttttctttatactttaatttttaaaaaccacattctaattagtttgtcctatagagtttcttagagaatctgtattttgtctcctaaggtgtagttgaaaacatttctctctcccttgaattttacggaaattgagagttagatttaaatggtttcaacaacagaatttagagtatttataaggagtagatgatgtctgcttcttaaatgtttttccagttgtccctcttcttagctaagaatttggtagacactggctcaaagattattatggcaaagttatcaaattccgaatgccatagtatagagaaggaagtagacatggatataattaactctaataaaaaagcaaaatacaatatacttctagaatgttccacagtgcttggttttgtgtcagcattaagagagtgataaagtttcagtttcttcatgaacataattctggcatggaaagggcaacccttgggacaactccatcaaacacaagagctctgtggaacacagtttgatagataatcttgaagattccttctggctctaaatctcagagtgatgatgagctgtatggtacaattcacaatgtttttgcaaactcatgaactttccttaaagctattcttgagcaaagctagggaatgataaaggggaaaagacagatacataacatttcagctaaagtgaagtatttctggcttgttaacaactctacaagtaaacttagaatagacaatgtatctgcatgcttcagttcctcttccaagaaaacaaaacaaaacatctgccagttacaagagctatatatttgaagaaaagtgacaagtaataggaaagcaactggaaatctgggcattatggtttcattaaatatactgtgcctttatttaatatgtctgtgtattttacctttggaatatttttgtgtgttttgtattatgtattctgctaagattcatgcaactgtttcttcaggcacagacagcacacattgtcctggaagatggaactaagatgaaaggttactcctttggccatccatcctctgttgctggtgaagtggtttttaatactggcctgggagggtgagtaatgcttttccaaggctttatttttcctctagtagagaaataactggaagatctcactcatggtggtaagttgaaatcactgcatcgtagtaagactacgtattgtcctgaagttgcaccatgccttgtgcatagcctactgctgccgtccttgaaagaaagttagacatgaacttcctgctactgtaaatgaaagacaacatgggcacactggtggtcccctggataaaaagaacaaaatgaattctagaaacttaggttgtgaggacacaggttatgtgagattaccaaatggtttctgtaaggggaggtatgggtctgattaaggtgaaaatcggagcaaggaaaagaatagatagtatattctagtgctatttcattaggaaagaatcaattttgcacatctaatatgaaatactataagaagattagaaagtccttgggtattttatataattttgcactctagtaagaaagttgaaataacagatacatttattatctttaatcaatgagggagcatctgtgtagatctaatattttcaataattatcaactgtgacctgccttagtatttaagacctgctaacatgtacagcaatgaaaacgagagttgctacagaaattaagtggctgcttttacctagttaataaatgtttgttcacctgggaatcaggaggctgaagttctagtctcaattctaaggataactaattatataatattgggaacatcacttaagctttttgagttctagtttcttcatataaaaagtgagggggttggattaaatactaatttacagctggggatttaaacaattatgtgtcttaaaaacatgactagattgattgaaggggtttccaatacagattcaatccaactagtattctatgaaatatttgataaattctttagagaaattcaagttagtctcataaagacaagggggcattaggttcactgatactgaatatactaattgaccaaacttccattatattattaatttatattctttcttaaactcttgcctccctgtgtgaaatgaagaatattagaggggtttttaaatagttccactggtgagaacattaaattacagtgtatgaaatctgtttgcaaagttttgcttcaccaggcaattatttaaacttttcgacagcactaattactagctgtgttaatatacctgccaacaaacaactgtttaatatagatcagcatgatggagggcactagagttttcttctctgtgatagtttacaggtaataaatcttgtcacatcacaaaagtcaaacaggagctgatggattaatttgctcccaacactgtagttctctaaaacaaagtatatttattcatttactgaagagtattgtaagcatatgtttaaagggaatggtaagttcttttatggaaagaaagaagaaagagaagtaaaatcaaattaattaaagtttttttttgatgtaggaaaaggtattcatctataagattagtccatagaccctattttccattgagaaatgcttctttcattcattacgtgcctcactcagtaaggtggttgataattaaaggggttattttgtttttcatctttaagcaatgcatttatattgtgggcaagccttggttaaaaaattatcagttcctgacagataagagacatctgagaaattagctgatggaagctgcggaaaaacaccacagccctcgagtcaccttagggattgcagagctgaaagactatgtattttgttgacaaggttagttctggtaggcgttagtctggatggtgttgaagaatttatgttgactactgcctgcgttaaactttattggtttcaaagtcgttgattctgtgcccctgagcacctaaattcactttcagttgtaatccacaaaaaaggatttagcttaactcattttgcagaaagtggacatggaagagagcaggaaaaaaacctcaattgcagtgtattccagtgcatggaaaaagtgtagatagctcctggtattcatgggaataacgtttcttcttcttaagaataagaaatatgtgtgtgtgtgtatatacacacacgatatgtatatgcacacacacacacacacacacacacacgatatatttgtatttttcctctcacccaaacttaaaaatatagccctcctgcattcctccctaattccatatcagtactttaaaatagttagttggcatcttttaacttagaagtcagaaatccctcaagtcaagtctgcgagatgaatttttttctaagcagataataactttcaaacttatatgcttctttctaaaattaaaatattttaaaaatcaactttattgagttattctttcatataaattaactcacttattctaaatattcattgaattttaataatcatatatactcatgcaaccaccactaacacaatcaggctactcttcagtatcctaaaaaatatcaagaaaaacttttcaatgtttcgatggttactatcttggtgaaactggcagccctcaacagtaaatatcagtttgggctcaatgatatctggtaggccagggaaatctttagagtatctgcaaactttaaatagagcagggatattttaaaaattaagatgctagcaagggatttttaaaggaattaaaaaatttaaagaaattgagggaataaaacttatatgaaaatataccttggtactcacgagttggtttttctttatatcaatgacatcgtggtataaatttttatattctgtcataacatttccccaggtacgttaaaatctagagacattcttgttggattcttctcattttcaagggttaaataattcagagcatgtatgcagattatagctttgtagttacatacattatttgctgataattttttggcatgtttacccaggtacccagaagctattactgaccctgcctacaaaggacagattctcacaatggccaaccctattattgggaatggtggagctcctgatactactgctctggatgaactgggacttagcaaatatttggagtctaatggaatcaaggtagtaccagtggtggccatttaaaaagtctcaatttgagggagtatagttgacttattcttaagaattaggatggccaaactttcttcctcaatacggtagtacaaatcattaagctcatgtattcaatcttattcctaggtacatgagaataatctttaacttgacagtattttgagtttcatttctcagggcactttgaattttaatgcgttggatgaaacttggcttaacttgaaaaaaatgttataagttcaaataacaactatgctataaaaggattggggaagaatcaccttttaaaaggaatttggtaatgaattctgtatcaattatttgctttttaatcttagcctctaggggatgatttaaagatagcttttatgccagtctaaaagtaaacatattaagatttcctaaacaaggtaattttggatactctcttaggaatatatatcatataaacaattcaaaaatttatattccaaattcaatactattttttcaccattccatttttgaatgacttcaactgatcatttaacttagttttcactatttctcacaatttcccatcaattttttctctgctttaagtataaattaaaaatgattttgttcatcatgtgcattaagccagtaattattaattaaattcttgataaatgccatgcatgtcagaagggggacctagtttagtctcaggatttaccaagccaggtaagcctgctccctctcaggataattaatgcaacaattacatattttaaaagaagggcattgatttttttttttttgcctcttgtttttaaaaatcctaagtctcatgtcagtggatatcataaaacttaaaaacaaatgcaaattgactcacaagagttggataatatcttgtgataacctctttaaaatgactgtctgtctttctaggtttcaggtttgctggtgctggattatagtaaagactacaaccactggctggctaccaagagtttagggcaatggctacaggaagaaaaggtaagaaatgtaatagggcatccatcatcacctaaggaaggttgagaaggtgcctgtagattcagaagtgccaagcagacagaggaagatcatgtagtttgggatctttgcatttcagagagggattccttctcttactacataaaggctgaaatgtctgaattcctccttaaatgctgatgagcacatattttcagtttatccactaggtggcactcatacatgcttggtagcacttcacatttgggaagggaggggtaagataaaattttagcattttctcttctctttagcaattgagtcttttactctccttcaccgttttatctagaatgtagtaatggaacttgcttcatgggttctagtgttctagtaccagctctactgttaactggttgtgtaactttgtgcaggtcacataatcattctatgcaatacttgcatcatctctcattcttatgagtataagcagattaccatcaagtctcgttgggcttcaacattatgacatgtaattatatataatttcatttgacatattaataatgtaagaaaagggttataaaactttatcttacacttttagtttaaatattaatttcttttcttttttttgagatggactttcactcttgttgcccaggctggagtgcaatggggcaatctcagctcactgcaacctccacctccagggttcaagctattcacctgcttcagcctccccagtagctgggagtacaggagcctgccaccatgcccggctaattttttgtatttttagtagagacggggtttcaccatgttggccaggctggtctcaaactcctgacttcatgtgatccacccgactcagcctcccaaagtgctgggattacaggctcacatgagccaccgcgcccagccataaatattaatttccaatgaaaaaagagcatttgccttgtttggatgttagaagtacttaagttaatggacctgcttcaattaacttcatctccagtgttgctgtagctgctttttgttcaactgctgggcctgtaattgacagaattttattctacgaaagtgctgcctctccaatgagtgtctatctatgggggctaaacattgctgctttctgaaaaataaaaaaaatcttgatcctggctctttagatctcattctttctaaattttaaaagggagaagaaggcatccatatcatatcctgggccatagccattttcttctcaactattatctgaatttatcttccttatccaggcagctaatttctgtaatcgtcatttgggagacacttctctccccccagcccccaacaacccaagctttccttttcctttttgttatttaggacacttgttctcatagcttttctatgtcagaactaatagttttagtgtaagcctaaccaacggcttgtaagttcgttttttaaatgtgctttgaaccttcttccatgatcacagacatgtagagtagaaaagaatccaagataataaccagttcacctccttcaatttaccggtgagaacaaatacattgcttaaacatttctcagataattagtggaagaaaaaaaaactagaacatgttttcattttttaacctctttttaaaaaaatcttattttagtaaaaagcctcccgtgggatagaacctgttttcttgattcctaactcattactctttcattataccacatgtgtctctatccaacgtagtcaaagaaccttaaaacaaatggtggtcctgcctgatggactaacaggatgatcatgttttagtacaacatgactactcaacatggcccttcagaaaaatgtgttgagtgcctactctgtgccaggaacatttggctcaaaacatggatttgcatattattgcttatgaagttcaccaatgtgatttaacttacttaacatcctgggttaaaagcaatagaagtgtagcagaagattgatgttcagaatttctcatttttttactctgagaaagaacctgggtattaagagtcctatgcctaactgtagcaacaatttactgtgttctgacaatacagtcaccctgggtcagagaaaagaaagagtggagaaattatttactgctcaagaagatagatgaggccaagtttgtaacttgaaaacaatatgctggatttaatctcctccaatttcactgtcactacaatttttttcttataggttcctgcaatttatggagtggacacaagaatgctgactaaaataattcgggataaggtataatcatcatctttagccaaatctatgtttcttcgggtgtgtgtgtgtgtgtgtgtgtgtggtgtttccctcagtgcctaagggatccattaatatgtaaaggagtgaatctggccagcttctgctatctgggtctctgttattttgttttactattttcactgtaattttcaagattgaatacttgattggtatgtttttaactgaatggacttgagattcattcacctggcagcttattgagtgcccactatgtgttcattataccaacaagtcaaggaatttataattcagctcatgtgatagaactttagtgaaacaagtggagaaggtaacaaattgcataacaattttgcctgaagtgaaaacctacatgctgaaaaatacactccaggaagtgtacagcattgttactgttatttgttttgtccttgtgaaagagttatttgtaaaattaatgcattatctttcatgaatgtgccaaataagccttgcatgcattacttcaattatatagtctttgttgagaccatatcaataaccaaggtgataaaagggaaggttatcttttgctttcagtgaagtctgattgctacaacatctgacccctcctctgagaatatctcatcaccatctgcttgttgagtttattattattttacttgaaatttccatattccaaatctgaaagaaacattacgtcactaacgttaactaaattccccaaatgcaactaaagttttcttactaaatataattacataaaaataaaaagataaatgacacaatttgaaactacacatgtgggctgggtgcagtgggtcatgcctgtaatcccagcactttgggaggctgaggcaaacggatcacttgaggtcaggagttcgagaccagcctagccaacatggtgaaacccatctctactaaatatacaaaaactagccagttatagtggtgcacacctgtaatcccagctacttaggaggctgaggcagaagaatcacttgaacccgggaggcggaggttgcagtgagctgagatcatgccactgcactccaacctgggcgactacaggaccctgtctcaaaaaaaaaaaaaaaaagtacatatgggaaaaggagtcttcaaaaaatttttttgtagatttcttgttaggatatatacatatatatattgacacaggctttctgtaaacagaaggaaaaaacagctttgaaaataaaaacatggccaaatacccatgaccagaaggaagacagtgagagtttatgccatcattctatcccacctctgattttattcactctaccacgattttcctgagaataggtgttagtgaaattatatatcccagggagattcttgtgttctctcagcctaatgatgtgtgtgagcagtaagcaatgacgaggctatgagggcgggaaaggaatacagttgggaaaatcaattcagatggcagaattggcaggttgaataaaatatagtcaggcctaatgattcaggaaaactttacaagaccgcacttgtctttcatgtgatatgttaggttaaaacgagccctccttttatcataggcagttaggttttcaaaattggcggaatagattggcacagacaaaacagtattgcctcatatttctttatcagtgatggtggttcatattaaaaatgtatattatggctttcacttctattaaccttaatttgaaaagtaagatcgtatttcattcagcatgttttaagaaaaggggaaggagaactaaaaaccaattttcaaaattagggatccataaatatagacaaggggttatgcgacttggattataaaagtaaatacaggccaccatgaaatgtagtaatctactatggaagtgaaaggtggtttttaggtagtgttcccagacttagaggcagcactctgaatttaataacagcactgaaacatccatcatgcttgcatgacacataggtactttctactctcacttacccccaagtgacttctccttcaaggaatacatttaaaagggaaatgaaagcttccttctatttccttccatgcaataatttcatcagagaagggcatatcaatgaattattttgaatttttacccctcaatagaatcttgattactaaatatagcatgccatttttctaagtagttcaaagcagacttactaacaaataagtaaatctcaagatacagctgaaaaaaggtgacattgtcgtgttcaagctagcaaggatagtttgtgaaaactttacagagggttgaacattctttcaattcaggcccataggaacacttggatatgaacatgcctaaacagtgaatattttcatttcaaattctagaagtttatgacttatgttgcatttcatcttctttgtgaattaatattactatcataatgaatgaattcccgctttttttgtgatttttagattccttattgtctcaatagattttttttgtccatttctctcatgaaatgtctttaggtcatatacgctgagtagtgtaagtttactaaatatcccgatttgcatcagcctggagcctggagacctgaattctgatgccttttgactttgccttcatcaggcaatggtgtcagccctagaagaactaattgtatttccaagagtatttcccaaaatgtatgtgcaaattgcttaatcttttcagtttgagaagatgaagatcttccatgatggttacgagtagttataaagacatctaagtcttgcagcagctgtttaaagtccctgtgagtttatcttgtcaacacctttatcgttgcttccttttaactgtctaatttttttaatttgatagggtaccatgcttgggaagattgaatttgaaggtcagcctgtggattttgtggatccaaataaacagaatttgattgctgaggtttcaaccaaggtgaggggttttcctttatattttgtagttttatttgatcccatttagaccttcttgaaatatcaaaatctttatttaggcagagtttatcttccagaagcaccagtgttcaggggtagaaagggatctcatagcagctaaaatacaccttacaaaatcagtgcatttaaagctggttttacttacaggcttacatgggaaacttcatgccccaatttagaggatttttactaaatttagtgttccttccaccttttctgattcttcagcttaggattttaacaatgtaaaataaaggaagcactgaattgccaaagataggtccagtgatgatgaggagtcagagctagtaacctgccagagagccaagagaattttacagaaatcaggcacagtaatcagaatctgggggcattttgtgcaggaaaaatatttattcatacactaaagatttattgtgttatagctttgtttcaaaattaatgttcgtaacgatgactgagtcaccctaaagtgaaatatctttagtatacatttataaaaaggtaaagaatacattttagaaagaagtccattggttttgattgaatatctactaatgtaggtgtgagtgagtttcttgagctacagtctctgtccttggggagcatagagcctggtggaacaaacaagcaagtaaatcaccatgtgcagaatcctgtgataaatgctgtccttggagtgttcatagcatgctgcaagggcatgcatggggcagcattgaaatgggataggtggatcagagaaggccctgtagaaatgtgagtcctgttttgagacacaaagagcgggtagtaacagtaaggtagatgaagaaccaggagaactttgtttcaggcagaaggaatggcttgccaagaggcatagaggtacagaacaacatagtatatttgaagagttacgcacagtttgggatggctgaaccaaggggttcacacctattggtttacacacttgggcaaggataagtggagatggactgactgaagctaggtctagaaggtttcatatcattggctaatcagcacttccagaaactattgtcaactcatttggtgtcattttggagcaaagtaaagctgaataaaagagcaagcaactagaaggttattgtaacttatcagaacaaaactcacgagagcctgaactgagcagtagtagcaagaacagatacggcaacctaggccgcttatacaaatgggaggaagaggggctgaatgaggtcaggtaaaagatcaccttactttctcagctaaggatttcaactagttaggttgagcatagtgattatgtcatttgatatctgagatgtttatgggatactgctatgaaatttttttaaagaaaagtttttgatccgctttgaaacttaaaggaagaattgctaccttctgtttttactacatacaatgggagttaaaaatagagcttctctttcctaggactatgtatttggttaccatggggctttacatgtggagaatttagccctgtggaagcctatgtggcatcacagctattggctggttctaccttggggtttatttatactatagcagagatggctacaaacttctcttccatcaccagtgtggcaatggaatttctcagagaaactctactttatccaagtagaaagtgagtgttattttgacaaaggcgattgaaattcttagaaaggaaggagtagaaaatgtacatgtggacgcaaaatttgattttaaatagatgtattcaccacaacattttatttctagatataacatacacttttttgcccatgatatttcataattatcgtggtccattcaatgtggcagctctggtcttcaaggaaaataataacaaccaagcttttttgaacactcagttaattttcataaaaactccatgtcatagatgaagaaactgaggcttagcaagtaagtctatttaaaatcaaatgtaacttgcccaagtttagtgtcaatttgaattcaagtgactccagagtctctgtggctaacctcatgctatttttctttccattttgatgggagtttgacggaaaagctttaaaaagctcaatttctagatttatgttccatgaattcaagaaacctcttcaagactccctgtgaaccaattttctatttggcctgcttcttacaaggcctgaatatgtttgtttgcttctctacgtagaaatcttttcccatgctttctccttccccttctcgcctgaagaagtcagtttcaagagtcagctcattgttcctttgtgaagcttccatgactcatctcacctttggatcccatgtcatttaataaatagcttcagtataacaaggatcaaattgcatttaactctttgaaaggattgtctctttcacttgtcttggttggctctttgaggggagaggccatggtttacttatttgaatccccagcactgcctatagtacctttcacatagtacatggtcaacaaataatgaataaataaaggaatatacaaagccagtaaatggtagttacagttggtggtaaagaaattgcacattcttattttcccttcaaatcctttaatcagtgtttcttatggttctatgacctccattattaatataataaaattatcattattactaataactgtaagtcttattaataaaaaataggcacgatctattgagtacttattatctgctaggtttcttctcaatgctttacactgattaatttattccatcttcagtgtaattatatgagatgggtattattaggaactcatttactgatgaagaaactagggtgtagagagattaaataccttcttcagtgtgaatggccataggattatacataggaaggcttggtctagtgtctgtctctcagaaaacatcatcccatactgcctttcaacatagtagaaataatagttatgcaactaacagttatactattagtaaccatccttatactaccatgtgataatattcaaataagtttacattgtttcactccttataccttttacatatgcagagtaaggattcaagaattttaaatcagaaatggtaaaatatgtgaatatgtgaatagactggaaactgactctgcttgtatgggtatcctacccgctcctgtgacaaaaccttgtcattgagagtctttagaaaggatgttcccatgcccttcctgacacctgttcatctgggaaatgattcatgttgtgatacagcaccaatcagaaggcgtatagaggacatttcataaggaagagttccagcgtgagagtttttaaaggctttaaaaaaagttattaaaagagtaaaacagtctgatcagtaacatgtaagactcagagaaaacacacattgatattatctggtattccggctcctgtcacgtgaaaatgagagacaaggattttgggttcctagaaattagtactgagtcgtgatgttcatgtcgggcagggatgtgcattcaaaacatgctgaagcctaagaagtatgtgttgttaaagaaaatcaattttaaattagatatgtaattacttatatgtatggaatttgatcatggtgtttgcaatactcacttctgatttttaattttaaaattggtcccattcatatgacttccccttgttttacatatttccctgtgaaatgatttagtttgaaacacagcatgatagagggtgatgatagatgatagaatgttagaattgagaactgccttggtggtttagtctagcatttcctaaactggaaaacagtggtgtggagcaattcatcttaaaaaattctgtggtcaagcaaggttgcaaaatgctgcataagatattcctctctgttaagtccaagcacaaatccatatatgcaagtatccatgaggtcttgtgtaacttctgttattcttatggacagtatttaatgtgtttgtgtagagaccagcaaaaatgagcatatctgtgtttttatctgtgtccaatcaagggagatgctgcagtggtgaaagctggctcctttgtttcttaatgtcagtgcaattaaataatattactatagctatgataaaatgcgtatttgtatcaggagattacatatattttgtgagttttgtttgactacatgccttggaaatgttgataacttcattcattatcttgtaattacaattttctgtagctacaactagatggtaatattgctttattttacatcagaagcctaaggttaagaaaagatctatactttttcaaattatttgatgagaaagattacctgtgacattcaattcagcaataactccccccagatcttgaaaggattagggtatttttttttccttcagaatagtcagtgggagaaaaaaaaccccagatatagtttatatattttttcctcaactacagtctaaggattataatttcacattctatacagacttagtggagaggtagatatttcagtcaaaataaactgttctttcaaatactcagtttgtacttttcatctgaaaattttcacaaacgatgaaatcatcctaaattcatagcgtgctagctaactctcaaagcaggaaccggtgtgtgtgcccacccttctaggctttctctctattatttctccttttatgactttggggagctgcttcttgggttaatgcctgtgaaaatagatctgcctcccagccgtgcttcagacatagataatgattatgatatgctctgggatctttttatgaaatctaccatttaaatgcaaacaattgcacggcaacctaaagggactggtggtctatacctgcttagcaattcctgtgactcttatactgattttatccattaggcccaactgcagaagccttatgtacagtaattcagctttaccccatttgatctttactgcaagttgaggatcaagtggtatttaaagcatgatgtatctattgccacatctgtctagtgctgaatcaggcaataatgcttaaacatttcattgctaccagttgttaatgaggcaaaacatgagaaagatggttaactatgcatgcaaccagtttcttagagatcattgttattactataatcaaccgtttatataaaacagcaaagtctttttttctcataaaaaagatacagtctgtggcacttgttgtgcctttcttacaaactgtttgttaactgccagtcactccctagtagttaacaatcaatctgttaccaatctaagttcaaaacattgtcagatgtgtttatgattttggtctgttgcccatagctgggacttccctctcattctctggtttttaaaatggcaggatgtcaaagtgtacggcaaaggaaaccccacaaaagtggtagctgtagactgtgggattaaaaacaatgtaatccgcctgctagtaaaggtaagtaatttgttcatttcaaaggtgagggtttgtcatattgaccattagtgttcagctaatttcctctgtcacagagaaacttatgcattctttcagaatgtcaggggtctacattcttcttgttgcttttgatttacaaaataacacatttatccctgttcaaattaaaaatatagactgctatgttttttctttaaaaaaaaaacctcaagggccactaaaacatggaagaaaatgatgactgttcttgtcattaattgactgacagtctgagatgcatcatgttcactttctttgtggtatagagatgaccaaaaagctagagtctgtctgatagcatctcctttgggcttacatttattttgtaccacacgtttgtaggaatcatgccctgacagagtacgaactttcacattgtttttatatcaactcttagacaaccagttaaaattaaaccttaaaaattctcaaggagaacttaaccatcataataatgtttcttaaataaagttttgttaggatttttccttctcctcactcctctctcagtctgtctctgtctacacatctcccctccatacacatacacacacatacacacatatttgcataacaccaaattagcatgcgtattgggagactcttcatcgtacctccttattagagaataccagcaatattcaaatcatgatttcaaattcttgtcaattttattaacaaacatttgcatggatagcatgcatggtagcagatgctgtggatggcctgtgtatatctcaatctcaagttaccattttaattcatgttgcccatcttccaattgcaaatatctatatctctttgcctgatggctggagcctactggcaggcagtaaatggcatagaattaatgatctctggagtagcccccaaccaaagcacagaaaaagccagtgtttaaccaccctggctcctttgtcccatggataggcagtctctaaggtaactattccacacgggctctcagagttccctactgggcttaaacttcacttatccctagtggtaactacttgctaatgcataatttattggggtgtttcatgatgtcacttcctctctgtttagtatggaagtaccttccaaataagcttttgttctcttaaatccttgtttcaggaaatgcttcatgggaaaccctcaaagacaccttcctatgtgcttttatattaaaagaaatttctaagttttccattcgaatataaatcttacagaaaatgagaaaaccctaggaaagaaggctgattaaaatttgataagactaaaaggcaagactgaaaaaggtctgacgtgggccaacttaacattttcagaaaatggatttatatctttttgcaactggtcgtgtgaaggtaacctactctcctgtcagtccagtcatggcatttgtaggcactgaaacttctcttgagtgcaggagagtgcattatccattttttcaggatcaaaacttttaatggtgtttatttttatttttatttttattttgagacagggtcttactttgttgtccagcctagagtgcaatggtgtgatcttggctcgctggaacctgtgactcctggactcgggtgatcctcccacctcagttttctgggtagctgggaccatacctggctaatttttgttttatcttttttggtagagatagggttttgccctgtttcccaggctagtcttgacttcctgggctcaagcaattcccccctatcttgagcttccctatgtgctaggatcaccggcatgagccaccaagcccggccccaaagaaatttttgctcagcattatttattttaaatgtttacaaatttttccttccctttaaggaatggttagtcaagagaaagtctagcaaaattatactttggcaaagaaacatgttattaaattcatcattcttgtgtctcttttccagcgaggagctgaagtgcacttagttccctggaaccatgatttcaccaagatggagtatgatgggattttgatcgcgggaggaccggggaacccagctcttgcagaaccactaattcagaatgtcagaaaggtgcaatgaaccttgaattcatgtgtatctgtgtgggaggtgggggcttccgctctataccctcaaagggctgtgatacattttatttattcaggcatttttcaatgctggtatttgtgacttctgaggcagtgtcagtagagatattctgtaggggaaccaatgaggagagaatatcagagaaaatagggtttttcttcaggcaaagtaacttggggatcatgtccttgagttaaaagaactggagtccaatggccaaatgtattttgctttacagttttaaaccgacaactcatggttccttatcatgaccttgggacccataagacctgcaggtctctaaagaaatattaaattagatttagtttagtttgaatgtaaagtacatcttaatgaattataatgctacaaatttgtcaattatgtccttttttatattcttctttaattcagttactattctctttaccttcttaagaaaaaaggatacctcatttttgttcattcagaagcaacattttttggaactgtactaattggttaataaaaattctccctgatttagattttggagagtgatcgcaaggagccattgtttggaatcagtacaggaaacttaataacaggattggctgctggtgccaaaacctacaagatgtccatggccaacaggtgaggtattttcacttttgcttacagtaaaccagctctgacatactaactaaatacaaagaactcagagcacttacctgccatttctttagagtaaataaatgcacatgtaccctaaaacttaaagtataataaaaataaataaataaataaataaataaataaaataaaaaataaaataaataaccataccttacgtggttgacagttgtttgactacctgataccacttttgttgcatttttggaaagcagccttctctaatgataaccttgctataatttaaagttattttccttcccttggcataaattgaggttataatactcaatcaaatgatattccaagggaaattgttctgattttaagcttgatttcagaacattgtaacattttaagaaggtaagtgtgacttaagagccgaggaacctttagatcctcttggtttctcttttttgcctcaaacaatattaatttattaaacatcaggctttttcccatggcccaccctctacataaattataattcaggtctgagcagtcatctctttgttatctccctataactctcgggctttaaaattattgtagttctcttaaagtaagtcacttatatttcttagtttctgttaagccggtgagcaaccctttttgttatgagtgcaatgcccccctttctaaaaccgattatagaatttaatagacctgcgtatttaacacacaacaaagcttcctgaattgatttttgttgggaaaattactgggattaacaatctgtgacttttctcacagagtgattttcactaagcaattgaaattttgaattttaataggctttacttgttcactactttataaggaatacatttatattattctcttcacttttccttttccctattctttttctccttttctctccagagggcagaatcagcctgttttgaatatcacaaacaaacaggctttcattactgctcagaatcatggctatgccttggacaacaccctccctgctggctggaaaccactttttgtgaatgtcaacgatcaaacaaatgaggtaaatgatgtcaataaacctgttcagttggtgatgagaaacgcagggcttttaaaaataattgatacataagcattgtatatatttatgagatacatgtgatattttgatacatgcatatcatatgtaatgatcaaatcacactaggataaccatcacctcattttttatttctttgtattgagaacatttcaaatcttctcttctagctgttttgaaatatgcaataaattattcactcagaatattcacccagagtttttaaatacactatgatgcaaatacctttctcctgtttgtttgtgatttttttggggttgagtgttgaaaaacagctataggttttctcccatagccctctgtgttttaaaacgtcatttctctctcttattctctcatcagttgacttgttaagattcactatttgagttattaatcaacaactatctcatatattcaatgttagtgggctgttggtccaaatctgtttgagccccatctgggtgggtctctgggacttacttggcactggtgtagtgtttgagaagacccttggaaaagtaatttcggacttggggataagatgaggacttgagtttactctgaacagaacccagaggggtcccaaagactatagaccaaattttttatttatttatttattttaaaggaaaacacattcagttgagtcttcattgacccattttccatacttaatcaaaaaggtcagatatgtaagtccttaagatatcggaccatgttacttaatagtactgttagttacaaaaattttgttaagcatctaactcagtttttaaatttgagctttattgttccctgaataatacatagccacacttgacattcattgttacagaaggaatttcttcctgtttcttattcctttaggggattatgcatgagagcaaacccttcttcgctgtgcagttccacccagaggtcaccccggggccaatagacactgaggtacgtcaaaaagatgaggcctattatgtatgcaaaaaaaaaatgtatttgtgtggaaattcgagaaaccaaaataatcaccccagatgatcttgagcagaacattctcaagaagagtgctttggtaacacacattttgtattaaaatctccccatgaatgtcacagaggaaatttttatcttttttaaaatttaaagtgggaaagcccttaagaaacccgaagcgatggtatttttatttaaacccattatcattctaatatatttagttctgaaatttacaattgttgtactatgcaaatgaattcccttttgctctctctcgttctcatgactgaaatgaaattttaatcccccatctgtgacttcacaaaaatccctatggcaactggttgtgtagccactaagggagaataaacagcagcaggagaaggaggggaagggtgttggaggggagagagggcatgcatgcacatacatagatgattcagacggcttcagaaaagaaccacaaggaatgcttagaggagttttgtatttaatctaaatatttttacttttttgtgtgtgagctcttagttcattgttcaaacccatctttccaaataaattcttctggtgatatccagaaaaatctgaagtctattgtgacttccccacacccaggggcctccagtagcaaatcttcattgtcagaactctcagaaaagacttcgaggtaaaatggggaagagaataagagctttctttctgcaagctctgctctactctctcatgtctgaattgccgttttagatatttatattttgttcttgttttaatattattaggaaatattggttcttaatagccaaaatcagtattatattaccaacccatgatgaaactcataaatcaaatttagttatgtgtatcatctaacacatgctaagtagttttttaatttaaaatttaaattagcatatattagtacttcggattaggaacattgcaattaagatgtaataatatccactgtcacataattctccttttttgtctttccaataattgcaaaatgaatattctttgttgtaatttgtcatatctagtgaaacaacagaagtaaatcctttggcaaagattaagaataatcttcagaaactgttttttagagccgatagaaatttaaatttaaattagtatttctaattttctatatcataagtgatatagcttcaattgttatatccacctagaatttgatttagaagaaacaaatgatatacaatttactaaaaacttggcattctcagaaggtatctgatatgtttactgcttgttggaaacttcttttttataagacttgaagtgaacagaagtgtttatttgattaaattctcacactaacagatatttagttattgacaaaaaagcaaaaaaagctgaaatgctataataaaaattatttgttgcttatctgaagttcaaatttaactgggtatattgtgttttatctggtgaacttaggaattttgaagcttctaactagttggttgtatttttttctagtacctgtttgattcctttttctcactgataaagaaaggaaaagctaccaccattacatcagtcttaccgaagccagcactagttgcatctcgggttgaggtcagtatgtgggcttatttttggtttatgaattttggattgtccctatcacatgaagatttttaaaaactaagtgatgtaaggcatactagtgtttaataaaagatgactggtaatattgtaatagactgtcattttgtaactaattatttggttccttcttgatgatgtctagtggaacttctcatgttttgatttaaaataatgtcttttaaagtttacttcttccagagtatttgtaataacataacaaagaatagtgtttagtttagaatttatttcccattatccaaaaagccatagctctatgtaaacatgagatacatttcagactacagaatcattatagatgatagaattctttttgtttcaactagaataactgttattcaacatcatgtactgagtattattttacctctaaaaagcaaatggacaagaatataacacttaaatccttaatttgaatatgtatgttagtgtgataaagtttttacccatttccttcataaactacacattcatatcattatttaaaatttagaaggatatatgtgtatttgaaaaaataccacacatagatatatttacatatatgtatatatttttggatatttatatatgtttaaataaaatgtaaacctctgccaaaaattttttacttaagagaaaaaccttaataaactttggaagtcacattgaaatcagagatgttttaagttattagtctttttccctatatattacatatttttcattacattagaccttagatgaccacataaactcagacaatgtggtttgtcttctccaatcttgaaaatgccttatttcccccattttagcagtaataacagtgtctttttcttattgcttataggtttccaaagtccttattctaggatcaggaggtctgtccattggtcaggctggagaatttgattactcaggatctcaagctgtaaaagccatgaaggtgagagaatatgatccttactagaattaatatgcttcctttaatgagtctaattagtattttataatttagatttatgacactacctcttttcaaagttgctataattattttccttaactgtgcctttataaatcttgtattaaagaagcttgatcacgagcaagaatttcaactttctgtaatgtgcacatctgtaaattgaggaggttaatctccaaaattatttaggttattgcctccttatagtgaaaacatataaagccacatttatttatgctgtttatttcttttgaggcagtgagtttttcaaatatacttatcttttatgtgaaagagaaattttgggcatctttggtgctttaaagtatttcaagtgctctacaggatgcttcgggcatctctgtggttgaaatgggaaactccagttggagaagcaagggcaacagtacattttgttcaggtgttataaattattatctgtcactgggggacacagttctcccatcagtgcctgggaaacgggatgatatggcaacattttcaagtagaaaaaaagatttgatacacaggtgtggaaggacatccttcctgtttctttaaactctctggagatctcccaacacttactgtagtaaaataaaactttagaaaaattccgttgtatatttaatgtatttctcttgaggagttcagttggtacccctcgttgtgctaatcaggccattcggaggcaatgtgagctcttggtgacattgcctcaggctttgcagtgtaatgccattcaccagagaccaggctagtagagtcagcatagaatggcaacagaagactaggacagcaaacctgggaaaaatagttggccaaaggttttcttatttttctttttgttagtattctatagtcaaagattttcacctgatgggcgtctgttgaagaggtagaacacagtctcaatgactttactctttttcccatttgtttttattttttaatactctcctccattcatgtgcatgcatactcacatattttttggaataaattttcaaaacgatgttttacttctttgtattatgctttaatttctcattagataattggagactgtccagtggtttagattagttagtacacaatctaagtgtgttcagagtttagaatacatttaactgtatacagtttttattctatttgggagttttgcaaataattagaatttctatagttttgtattttaatgtgttttacatcaattgggtaaagttatatagttttaactaaagaacaggaattattagattagattgtgatcacttagaaggttaataactagaggtggatttttaaactaaaaaaataattggtgcatatattgcaacaagaattagaaaaatcagaatgatttaaaattaagattgcaataaggtttaaaataaatgaacactcatcatgtgtatgtataggatcttttcctgtataatttgacttataaaaaatcgccatattcattgtatagaacattcagaaaaatacttaaatatactaaagtttgttggtacttttctttagttgtgaggctttctataacttctgttgctggtatgttctcagttgggactcaattattaaaattcatcacatattataaaagcatttgcttacctgtttgtatcttcctgacattttgttaataatattactcttaaaatcttgagagatgactcgtattgaggaaagagcataggatttgaatcataacatttgaattagagccctaatattgccacttattagctatgtgacctttagcaaaccatttaaccttactgaatctcaatttcttcatccaaaaggttgaaatctctttcatagtcttggtataaaaatcaaatacattactaaaaagtacattacaagcattaagtcactatttgaatttaaagcagcataaaatatatttaatgttttattcagatcctccccaaagatatgtggggttttcaataataatttctatacttttatctgaatattttgttgactttttaggagaatttaaaattgacatgctaatgtatgaaataattagaaccatctggctgtatgttataataattattttgctaagtgtcaccctcatcttggtttataaaacaattatccttagtagcctacataaagaattattttgaaggtctctcccgatgtaaggaatgagatagagctatgaataccttcatatatatacacacacacacaaacatacacacacacatgcatgcatacacatagttttatttcttttaccatatggttttttaaatatgtacaaacagttgtataatgctttttgttaaagcactatagcaagcatgaatctagaaaataaatagaaaccagcagaaggctctcagtgcttccagcaagaagggagcacattattctgcattttaaatgtacattcaatgttcttcttagacaaataaatacaagggggagcagcttttttttttaacttttattttaggtctgggggttaacatgtgaaggataaataagatcctttttgaataagcaaatattgagggaattcattaccaccagactagccttacaaaatatcttgaaaggaacactaagtatagaaagaccactaccagctaatacaaaaatgcacgtagacacacagaccagtgtcactgtaaagtaactacacaaacaaaccaacataataaccagctaatagcacaatggcaggatcaaatccacatatcaatactaaccttgaatataaacaggctaaatgtcccacttaaaaggaatggagtggcaagctggataaaaaagcaaaacccaatggtatgctgtcttcaagatacccatctcacatgtagtgacacccatgcgctcaaaataaagggatagaggaaaatctaccaagcaaatggaaaacagaaaaaaaaaggggatacaatcctaatttcagaaaaaacagatttcaaatgaacgaggatttaaaaacagacaaagaagggcattatgtaatagtaatgggttcaattcaagaagaagatctaactatcctaaatatatatgcacccaacacaggagcacccagtttcataaagcaagttcttagagacctgcaaagagacttagactcccacacaataatagtgggaggtatcaacactccactgatagtattaaacaaatcattgaggcagaaatttaacaaagatattcaggacctaaacttgacattggaccaaatggatctgatagacctttgtaagaactctccaccccaaaacaacagaatatacatttttctcattgccacatgacacatactctaaaattgaccacataattataagcagctttcgtattgcctctagttccattttatatttactaatttaaaatttttggaatatgttattcttttaaggttgattgaactacagggttcagtaatatttgtggctctctagaccaattatatagaaatggtctccagctttgccaacagtggcaaagatcacctcatggcgatcttcatgagacagccaattcttttggatagtttcattttcaagaatttcttcatttctttgaccaaatgcttgtcttcctttaacttccattcactagtcctgttacggatctctacggcccacagataacctaaaagcttagttaccccatgtctttttatttaagtgtggtcattctcttctttagaccatatattcatgtactggattcttttgtttctttcaggaagaaaatgtcaaaactgttctgatgaacccaaacattgcatcagtccagaccaatgaggtgggcttaaagcaagcggatactgtctactttcttcccatcacccctcagtttgtcacagaggtcatcaaggcagaacagccagatgggttaattctgggcatgggtggccagacagctctgaactgtggtgagttcttataagcttaattgcagagttttgacatatgcactgctgtgtaatgtattttatttgagctcatctaacaattgtgctttgtgtgttcataaaacctttcctctactgtgtgagaaagcagttagcaaacagccacttaatatagtcatatgatgaatactactagttaatttcacaaaatagctgatagacaaagaaacctttcactttaatgctccagagtggccagtaggtttcttgcatttctctactctatcgcaggatattgcttttctctgttgctattgaggtcttgagaactattatgaatgaaaaatgagaattaacattggttaagtgctcttaggtatcagccctgcagcaatttcctctcaaacacattttcatgatagcatagatcagtctttctactattacttcatacttctgctgagtctactgctttgttctctttaaaattcttcaaatctttggaactggatcatgaataagagtctctttagctagtttgggtaagcaattggtgatataacttgtatgtcaaaaaaaaaaaaaggactaaggcaaaattaggtggctaggtagtggaaacacaaaccattttgaggataattttttagcccaggtaggtactcatatatttgggattttttaaattatagaatctcattatagaaatggactttaggaggaaagggaatatattgaaatcttaaggctcagtataatactatgacttttattaataaggataaaaatgattttcagaagatggtaatataagtaaaagtagcatcagtaacatattttgtcagaccgtcttcagaatttttatttcaatttttttccctaagtgcaattctattgtagacagtggtaacttctcggattttaagattaaaaaagtagttgtattcagttgtctattaaaaaaggcacaaaattcaagattttaaaaactaatcctatttggttcttctttaggagtggaactattcaagagaggtgtgctcaaggaatatggtgtgaaagtcctgggaacttcagttgagtccattatggctacggaagacaggcagctgttttcagataaactaaatgagatcaatgaaaagattgctccaagttttgcagtggaatcggtaaggattctttgctttggaaaaacaagggcattatttgtcttgtgttgtagggagaatgatttttcatgcctaataataatagttaagattattatacttgcatgcattttcttctagaattgtgttaatagtttagaaatattgtgtattacagcactcaatgctgaaattataggtattaacattttactttatgcaaagagaaacagaagtccagagatgaagtggtttatcaaggcttgaagtgccaatgaatctcagatctcctgaactgaaactaagaaccataccaacttgcaataacaaagcaatttttaccttgtttctgggatcaatcacatattttgcatgtgtgaattccctgcaaatgagaaatttgctttaaattttttttaaataaaataaacattttagaataaaatggatccagtcattaaaatgactggaaaacctgtagtttagatatttaaggaagatttgcttttctgttatttatttccattgccccttatgcctatcaataagctattaacagttaccaggaaaaagaatcaactcactttatatctgtttttgcccctgactttatttttgacttcaggctcatagctggtgaagtggaggtgctaggggcagtgttaaatccaacttctccatggtagaaacaggcacacccttaggaataaagcaggtactgctgggacaactaaaaatgggttatgtatgtttcagaagacaatgctaccaagtatcttttgtgttacaaacttgtcaatcaaataatcccaggataactctgctgcacaatttgggaagctcttgccatacatttgttctttcattgccagatttaattatgtccttgcttcctcaggaaaagaaacaggcatatgggaaaggtgtaattacattcccattggtagtgtaataatattccatgacagaaaaatatagccaccatatgttgtattctgtaagttaaaaaaaagaattccaagcttctgggactatgctcagactgaacttgaaaatgaaaaatccatttatatacagtgttcctaatggcttattgtggtaacatcaagctagcttcagcagcagagaacctggtttcattaagacagagacttttaagctgcatgtaaaaatcgtaaaaatccaataattcaatatggctgccattctcaaatgaatgatgattatttctgctttgaccatggttctgtttcaataggacaggataaaatttaccgcaaaagtgtatttcttagaagatatatatatatatatcctcccttctagaattttacttaacatttgagtaacaacacttgcttttcagaatgagatgagggaataatagaacatttctagattcactctccccacataagttggtttacctgattgccagactctcttggtgtggtctgttctgccagtgtgctcagcttttaaaatgttgagtccttgttcttgttgacagattgaggatgcactgaaggcagcagacaccattggctacccagtgatgatccgttccgcctatgcactgggtgggttaggctcaggcatctgtcccaacagagagactttgatggacctcagcacaaaggtatgtatttttgtagacaatattcttaccaaccaaaaaaactggcttgatagaccttttcaactagagaaagttatgtagatgagaaattacattttctttattaaatcatgatcatgttctccaaaagcgtattccaaaagatgacacttttgcgagagcatgcagtgcaactcttcatgccaggatgcaatgataaaccacatggttcaaggtaaaccagtggtcactttacctcaaattccacttttatagtacaatctattgacttcaaggagatgaacttaattcaactccttcttcctttgtttcaaaatctactctcaaatatttaaaatgctaaaatatgttttagtggttaaggaaaaataggacataatgtctcatttttaattttttagaaataatgtggctggcatgggtgacatccagaaagtgaaacaaagcacattgagtagtttgactttactcaaaattaaggtgtctaaaatatacatggtataaaccactcaatacagtaaatgactgaactccaccaactgccatatactcataaaaacacgagagatttgagggtttataatttattttctatcaaaatcactttaacatattaggaactacttctttctttgcatgttagaggaaaactcttgagaaaagtaagctatgctacaaaaactaaattagagactaatgcagaaaatatgctccaggaaaacagagacttttgtctatactctatttccacaaaatagaacagtgcctggaaataccaggagttcaataatgtctttgaagaatgattacacgtgcagccaagaaacctgtgtaacttacatggcagtcatagaagtgaatttgacagaattactgtaagggctattttgggaattatttaggaaatagctcacggacagcttattgcttcatctttacttactttttgaactgaagtgaaatgagacccttgaattgttgacatagaattttgaaaacagataagtacaattcagcatatttaaataactacaatggcagacttacatataaacaacttgggtttcgtttttctaaagttgtgaaaattacaaaaaagggaaacatacctcacataaatgtttcttgttaccattctggacatatgaatcacatatttagagcaaaaacatgtttttgaagatagaaagtttatttcctctagcatgttagaggctccaaatattttcaatattaacaacttcataactgccaattgtgacagtgtatacatattctctattaatttttttactctataagaaaccaatctgaagactgaacttttcatgtaagaaagtttataataaagagaattttggaatgaaatagctttcaattatttatattgtactcaaataatcaatagtcccttaaatggtttttcttgttgaaaaaaaccctcgctcttcccttgagaataattagtcatatcattatgtcctaaacaatcccctattctcttgaggttataattagcaccattaaaagctgcattaacttatccaggtccctaaattaactttttacataaaatcgaagacttcaaaaaataaaaataaaaataagctgaggaaacaggtgaagataatttcaaattttccctgtatctaaatatccattttacttcattagaatgcaaaatacttttccaaatttataccctttgtttcctagatttcttcttttagcaggcaaccggaatgatgaattaatcattattaaattgttaacattggctactgaattttctaaccactttgagaacctcatcgtgggcagctgtggggacaaatgtgtcacattttcatttgcacgtgctggagcctgtagtgatgactgaagtttaaaaaaatcctattaaggcacattacagaaaaacttacattaaattattattttaatgcctattaataatttgaaaaaattcaaactgctttccctttcactgtcaatccaaatcaaatatattataagacaataagacatttctcccttggattatcagccactgcatgtcctaaggtcaaagattaccactttcctattttgggttcagtattctacccattgtgggtgtgccgtaaatatgaaattataattatgctaattcatatctgtctaatcaggcatacatgatatatgactcagagtatttaagcatttaggcagtgattaaccataataatagtcccatatgattcttctaattctcaagttttatatgccatcttggctaaccgtttacaaccatcatcatctcctttctcctcctcatcaacatcaactaacttttattgtgtgtgtcactgtacaaagcaccctcagctattttagagagagccagagtctttagacttatttttccatatttattcacacttatcacattttctggtttcacagaagcctagctgctgaaataatttcatttccctctgcctgattgctcaattattttctctttttcctaaattagtttgatttactgtcatatcagcactttgaatggcaagcctcaataatgtaaatcaagcatattcactgcaggatgctattcctagtacctcactgattttctgacacattgtgccttctgtgcaggggagaatggagacggggtttgagagttcagtgctgaccaggatttatgccagggtattttgccaaatatccttgttgaagccagtgctttttcttactctttgatatcttttgtcaccaatttctaggcctttgctatgaccaaccaaattctggtggagaagtcagtgacaggttggaaagaaatagaatatgaagtggttcgagatgctgatgacaattgtgtcactgtctgtaacatggaaaatgttgatgccatgggtgttcacacaggtaggcaaagtatcttcaagaactatagtaatgctttcagttcatgtctttgatggccaaggcagtctttataaagttgttgcctttaaattactatttctagttgacagactagtgataacattttggacaagcatagtattttacagtattgaaaatgttctcacatttaatttgatcttcacacaaaccctgtgaagtaaggcggatattacactgagttaattgaggaagagccaaaggtaagcaatatggtagaaataagatccataaaacttagtgttgagaaataagaagggaggttgagacagtttaaagcagactgagctggtaatcacccagtaaatgagaaaataggcacaataatagaaataagtttttcagaaaagtacactagttagataagagggcaaagatgataacttaggatttaaaagtgctaaatttggggtgtgagcagagctgtcaaaaaagggagttgagaatgtggagatggaatttaagaaataaaatagaaataaataagttgatacaaagacactggaaactgttggcataaaaggggaaattgaagttgtaggcatagacaaagtattcaaggacataggtatagaaagaggagagaatagggttgaactttgaactctgggaaacatttagatttatagggcaggggaaagaggaagtattactgttgaagatagaaggggagaataaagagttaagaggaaaatcaggtagtactgtaccaactaagccaatgcaagaactattttataaaagagctttgtttttggcagtatcaaatgctatgcaagaccaagactgattatttaatttggctcttttggatgtccaagagaacaatttcattgcaaagtcagttctgtgagctctattaaaaggaattacatggtatcaagtggtaagcagaattggcaaactttcaagaagctcattcatgtaaagaatgagagagaagctttgtatggttgtctggcaatgttgggagaagacttccggaggcagtgaagatctgagcgtgtttgaaggcagaagggatggagactaagattgcagatataaggggctatgatgagggaagtgaagatggaaagggatgagatacagaaagccagctgatgagccagtctgagtgataatattcaatgaaaggaagaacttcagaaataatttgagatgaagagcagggaagttgaagtcaatctagtaagtagacgattgaagccttgatagctacttactagatagatgaacttgggaaaggttagagaggtttctaaaagtactgtatcagagtaatatgggcaaaacaggaattgggggaatacctgatatcacatatatatcccaacaaaccctcagactgttctatgtcttgcatcgtgcaagtagatggttaagtcgctgaagttggttatttcaatatgccaccaagtaatgagtgcttcttggatatataggtgactcagttgttgtggctcctgcccagacactctccaatgccgagtttcagatgttgagacgtacttcaatcaatgttgttcgccacttgggcattgtgggtgaatgcaacattcagtttgcccttcatcctacctcaatggaatactgcatcattgaagtgaatgccagactgtcccgaagctctgctctggcctcaaaagccactgggtaagaccagaataattgaccatgggtttgcagattcttttcagatagaaatgaaaaattgacagatagtggaagactgtactgcatttacaaactatgttccctttttctgtatgttagctccaaatcatttatagcaccctgaggacatgattattaatgagcttgttgccagattgaggtaaattatattgctagctggctttgtttgcaggctaatctaaacgaatcaaaatctaggtggctaaagcaggctgtgaaaaatctgcttcctaattgcactttgcagatgttgttaaaagtgcagattaatccttaattttagtcttcagctgttttcttcaggtgtatagccctatagcaaatagttgacagaaaatatagctcacttgactcaagcatgcaatacacattacttttattttatcaaaactccacaagactgaacagtgcggaattttttcacaagtaactgttacaaccaaacaaatacatctgctgtctatgtaacagccactagcaggcatgattggagggaaaggtaatcaaaacctttggtttctaataatatatttagcaccttacacttaaattatggcatttaaatgaacacaatatttacttctttatattttttttacgtagttccacagcactgcgtggagtggtgaaaggcatgttgccctgtacaggagtcacaattctgcattctcacttggttcttctgttgaccgtgtgattttgagcacatcactcattgtctttatcagtttcctcatttgttaggtggaagttgtactaaagaactcatttttaattctatagttctatgaattattttctcaaacagaataacccaaactgacattctggatgaagatagtcaagttctcaaagtgttagttttgtaaggagcccaaagttcaaagataatttggagacagagcaaggacccaaacttgaaatgcctacattttctgaccattatgtactctcttgtactagctaactccactgtattcttaggtacagatatgtatatgtacagatatgtatatattttctcaaaaaatattttgcagattctcatcttagtggaggttaaatacaaataaaggttaaactttatttatcaataaagctatcgattttgggttgaagaggtgaaggttgagcgttgtagcaatgcatgtagtgcacagagagtaaattctcctgtgacctgtgcctctatactttgtatcatgactcctattattccgcaagtggctactaaatattgatgcagaacagagaatcaagtgtcttataccctgaagtagaataataccagaaattttaagaaagaccaatttatgttttggtctgttttcaataattgctcgaagaaaaaaaaataaatttgtcttctttttatagctacccattggcattcattgctgcaaagattgccctaggaatcccacttccagaaattaagaacgtcgtatccgggaagacatcagcctgttttgaacctagcctggattacatggtcaccaagattccccgctgggatcttgaccgttttcatggaacatctagccgaattggtagctctatgaaaagtgtaggagaggtgagtccttggtttattacgcttttcttcttgttctcagttattttgttaaatttgtgacaccattgacagtgttaaagttgcctggataccatcaacacatggacagtgttaaaggtgcaattgacagtgttaaagttgcctgaatattagcatactaatatgctaacagtctctatgtgattgtttacatattacatatgttacatggccattttgctggatttgaaggtcttcctattcaaaaggtgaggccatatatctggctatatagtatagatacacatatgaaaacacattcatatacatataactgagttgtaatatattttataaccaaatcaagaaagtaatatagaatataatatatcaaaaagaccactgaactgagcttaagaattcaactttagtccattcatgcaaattgtggctctaacttcctgagacctcattccccacatctataaaagaagaggctggactagttcatctctcaggatccttccagctctaaaattctaaattgatatgagcatagtagattattaagccctctttaattatactaaaaagttctaagcttttaacatctttagaagattttttagaatgtgctgttatactatttgaaattaaagttagcctttgattattgcatcttcaaagatgcagtgttcttctgtgtgagaggaaagaaaggaattcatatctctgctgagattcactcccttgcctccttccaccaagtcctaatcattttctgcatccagaaggtttgggatagtggagaaaacatgaaacttggaaccagctggacttggatattactcttggcattgccacttattagctacagactctcaggcaagactgagtttcaggatccacacctataaaatagaaataataatacctaccttgcaggattcttataataccccctcttaataaatgtaatccatcattattgttattattaaattagtattcataaatgttgcatggggtagatgagtgctgaagtatgaacaaatctcagtctttctctatcatttgtctatctaccatttatcttagtttatctgtatctcatctctatttctgttgtggccagtgtgggagcttttagtctatgtatctaagttgattagagtacagagcaaaaggctgtttatgacatatttttccatattgttctttatttgtcccataacacagattatagcctaaacccaggccagccatttcagaaatgcatgtcactaatcacagaaaatatagattaaatctgtcaccaatacagggaaaaagaaaaagaaatgctttactggtctatcatattcacacatgaaaggcagaattatttctattttggcttccttaatttgtaagatactaatgaaagattttaaagtagtaacaaatcaacaaattggccttttaaattaaaatgtcttactagttgtaaaacactaaatattagttttttctccattatagttgttttaaatcttatttttcaaatcatactttttagtgtacaaaagaaatagaacgcaaataccatgaaaatctatgttgctagtgtttgcaccaaataaacaactgttatttagtttacatttcatgggaagggtcctttttaaataatgttcaccataaaattggtagttcaaggaacttgagaaaattatgtaatattttcatttggggcttcttatctgagggattttgttgtcaaacaaaaaataaaaggtaggggggagttttgttgtctaacaccttacatttagttcaaaaagtgagcaaacatttcctgagttcttactaaacgcaagacactgggaggatttaaaaaaggaatagattatagataattgagatacattgtctgcagttggtaaattcagaatacctaaactgacccgaatagacaatgaattattaatctctggtaaatattaaaagatagtacttatatatagatgctatgagaatatagtagaatagggttgaggaagcccattatagtcattccactggaaaatgtgaaatagtcactcaaggaaggtgcattttaatagtatagggcaaatgtggtgggaggacgacttgagcccagggggtccagtctgtagtgagccctatagtgccgctacactccagcctgggtaacagagtgagaacctgtttcaaaaagcaaaaatatatagagagagtattgaaaagcacaatttttgagcaaacatttatagatacatattcctttgttatacacgttttttttttaattgaatggatcccatgtaccattatatagattgtgcttaagaataataaaaatatatggagagttacttatagaactaatttcagataaattttaaatatgtaatacttcaaattttcttaaatatacccaaaatatttccttaattttacagaacaataaaatgtctgatttctggcagtcttttccatgcccaggctagacaatctataaacatattgtctaactcttcaagataccactatgacttgcaaattgcatatctgaattgcattaacaggttgtttattcctgctcttgtaaattttcccttatttctaattaaatttggaacagtgtgaaaaggttatctgtttggctttagtgatcattgaatatgtatcttgtcacataattgacatgaagatttcctaaactgacattagtggtaatttgagtctatttgaggaatcacaaaagtttactgaaaatagcattatgactgctattattttaaattggagaccaaaaatgcatagcaatctattattctatgaaaagattcaaacaatgtttatccagcgaaaataactgggtaggttgcaagatcaatttaagtttagttctgacatgcaacttgtccaaactaaatcaccacataatttttctaattgattagtgtatgatgagctgtaaagattgtggaaagacacattgaatttgtcacagaaagtttagtctcctcctacgttcaaaatcataatcatcagtatttgttatgactctcaaggttctattaatattaatgcttagctgtaaggaaagccaacctgtcttgaatactgactgatactcatttacaaatagtttctgtttcagtgttaatatatttctggtttctttttatttgccttccattctaaagaacatgcgcataaagcaagatcttactaagaaaaggtctctatgcttcaaccttgaatttcttattttaatactatggtccagagcaggtacaggtgatttcctcatcaatctcagcaaatacagctgaactccctgagtggtaaaagactgacctaatgaagatgcattataccaaaaccatggagaaagtgagagaggaagaaaaaaaggaacacctttttttttttttaatttgagaggctttatgatatattttttgttcttatttgttttataaaatatattttacgtccagttcagttacaaattaaagatacataagctctttctttcaatatgaggtcttaaacatgtattacaggtcatggctattggtcgtacctttgaggagagtttccagaaagctttacggatgtgccacccatctatagaaggtttcactccccgtctcccaatgaacaaagaatggccatctaatttagatcttagaaaagagttgtctgaaccaagcagcacgcgtatctatgccattgccaaggtaagatgttacaaggggcccacagctactagttgcttttccagaatgtagtcagtctggacattaaaataaaactgaatcacaaagtggttttaaatcagggatttttggaaaatttttaattcttttatagtattaaactggaaacatctatagatttcattagagtcttttacaattaatgataaattatcatttttatttgactttaagcctggatttaagggcaaattgcagttttaaaggatgattaaatagataaaatgtccccctttttaagtatacttagtactaatactcaagtagatttgactatattgacttgtcctttactattaactttattacatgttccttgaatgtgtaaaattgtattgtagaaaggaaggtgcatacaataatgtcccttagtatgtgccacttgagtctagaataatcttaatttatttgcttctctttctgtgtttaaaaaacagcaacagactataaaggcccacatgattatagggttttccatgtaattattttattggtcttactttcaggaaaaaaggccctacatttctcacttccctccactacttgcttctcatgcaaattaaatgccatgttaatctacttttatatttactgtgcttagagttttgaagtttcagctcatctgattttataaaaggtgacttgggcagctggaatctgtctggtcagaaatccctgaaaggctttttgacatttaaggaagcacaagcgttaatcctccaacagtatcaaaccgcactggttctacaaagctctactgaccattttatgtttgtgtgtgtgtatgtgtgtgcatgtgggatgagtcggtgaaaacatgaactttctctttaaaaggattcccgtctttgtaatttgcctgtgtagaaacagaaaaatgttgttagtgattttgaactcatcgcaacttttatgtccatattttgagtccttaagagacctgaaggagaggaagggatatttccttaattgcatccaatgtatattctcctcgctcttatggtttctaaatggaaaatatttaagccctactgaaattctgggagttgctattatctcttgatggacattttcccatgttgagtttcaaggtaattagaatttttctctggcggtggcgggtgggatagcagtgataagaagttattttagaaagccatttcaccttcatcatttattatccctatttcagtcttttatttaagaagcagctcatgacattcatatgtgtgtgtgtgtgtgtatatatatatataaaatttttttctcaggcaaaggacagtaaatagattttttccttaagtctagcaatcatgtttctgccactttgaaggagatgaaaaaggcaagcatttccaagttcccagctaagctgtaaaactcaagcaaatctctcattcttttctaacagacttataaaagatgagaatctgggaaaaatgtgtggaggttctttctttcacagggtaccctatgtatgagcaagaagtgcaggggctgcgtgtaaattattgcctgctcgagtgctgggagaaggaactgatttctgtttgttagaggtcatcattactgttcatttcaacagcagccgggaacttggtgattttgacagagagtgtaaggacggtggagggctgaaggggaaaaagaatgaagggagtgtgtaaatctttgcttgctttcatgagtcttagaaagagcaacttgctctgaggtctgatttttacagcagtcttatttcaggatgactggatcatcacctcttttgatttggggagaatgcggggcattatttttgatttttggaacattaaagtaacctcaaacttgtttgggggtcattatagacttcattacagtgatgttacatagcaaagctgcagtgcttggagatgaggtcttaagactggcaggatcttgcttgctgttgagaaatcatggatttttttttttatccagtctatcattgatgggcgtttgggttggttccaagtctttggtattacgaatagtgctgcaataaacatacgtgtgcatgtgtctctatagtagaatgatttataatcctttgggtatatacccagtaatgggattgctgggtcaaatggtatttctggatctagatccttgaggaaatgccacactgtctttcacagtggttgaactaatttacactcccaccagctgtgtaaaagtattcctatttctcagcatcctctccaggatctgttgtttcctgaatttttaatgacagccattctaactagcatgagatggtatctcattgtggttttgatttgcatttctctaatgaccagtgatgatgagcttttaaatgtggcacatatacaccatggaatactatgcagccataaaaaaggatgaattcatgtcctttgcagggacatggatgaagctggaaaccatcattctcagcaaactaacacaggaacagaaaaccaagtaccacatgttctcactcataagtgggagtggaacaatgagaacatatgagcacagggaggggaacatttcacaccggggcctgtcggggggtggggaggtaggggatgcatagcactaggagaaatacctaatgtagatgacaggttgatgggtgcagcaaaccatcatggcccgtgtatacctatgtaacaaacctgcacgtcctgcacatgtatcccagaacttaaagtatatatatatatataaaagaaagaaatcatggatttgactgtagtcctttccttccttccagtgaaatgactacaggattctaggccctccctcactgtatgtgcttgtgtgaaaacctcctttgatctcttaaaagtttcagtaacttaaggttctctccacctcacagtgtagatggccgacagctaattgtgcctttaatcacttagaaagtaagacagaatattaagtctttgggaacctgactgtaattacagggagaattaaacaaaagaaacatacattgactaggaaatgaacatggctttgagtatttctgttaaatgtcatcttactctagtcaacaaaattatgagccatgccatatctcaacaattataatcatggtctctctgatactatcattatgtaaaagctttaagaaaagtaagctccctgggctgaaatataccagcagagttactagttgcatatatttcttaatgggtcttaaaaacgcagtgtgttattctaaaatatgttgttctggaatattttcagatttttcacagggtatatacacgtacacatacacacatacaagaataagagtagacatctttttgtataaagattttggttttgagagtttatctcttttttcagttaaattttctactcagcttaatgacccatagttgtagttttacttttgagaaattgataaagtaagcttgaggaagaggctgagctgcctatcagaacagaagttattactacattgttttggaatatattaggattttaaaaaatgcctgccttagcacaaaaatcatagtgactgattcaaaacaattttttatttgaagtcctctgtgaggaaatattctggaggaataaagccaagccagatccgacccataaattctcactgactattgtatgtttgtgtgaatgtggagtgaggtgataaaaatatgctatctcctacaagataactatcaacactacaagttaagagatcattatattaattctagattttcttaccaatttggcttaactgtagtttcaagagactttctttaattccaaagagatgtaccaaatttagggtataatgggtaacacaatcaaataaagaggagcgagtcaaaacctgttaggagatttttctgagaacacaccactcaaggcaagcacctactctgtatgccatttgtggatatagttggcaccatctttatgtttattggaaggaatgtcagtgatgtcagtttcatgttttgtaactcagtctacagtctcgggctctctaaataacacacagaggcatgactgctatgtattttaaaccaaataagacatttagaaaaatgtttgccaaagaaagtatctcttctcctcttggcaggccattgatgacaacatgtcccttgatgagattgagaagctcacatacattgacaagtggtttttgtataagatgcgtgatattttaaacatggaaaagacactgaaaggcctcaacaggtaaggcagtgctgctctcattcatgccagacaccttcagtgcaatttttaaagagtcttcttcctactcttaagcatttggtctacattgtgattcaatgaggtagatagtgccattgttggaaaatagtacccgtagccagaagacaaatggcaggtttttttttttttagatgtttacctttagaaatgtatccattaatctttttaatcatcttctattcccacccttgtcatcagacatagtaataaggtcttttgaatgcacaaaattggtatacattgatgaacgtgtattatttaattatgaagtattatctagatttaaattttattaatcaattaaatgaatatttgttttctataaattttcctctacattctgaagtctgttttccccttttaatatcaatctatacattgctgtatattgaggagaaaatgcattccttttgcgctctactgtttttaaattgggacattcagttcagcatacaattaagccacattcaggtttctcttaacagactcttcacctctgactaatttacatttttatctccatcatggccaattatttttaaacttcattttatgttgagaatattttgataatgtagtccttaaaatctacttttaaatttttcatgggaaactgctggggcaccttaggctgatgaaagcatggatcagttttaaacatctatcttcaataagaggagcatttattagcagattaagaaagacaatatagtcctcttgaacttcttccctctgaaagcactctgaaatacactactattggaaagacgtcttacctgcaaactagggatgtgtttagagaaggaaaaattttgtttgtataaaaattgttctcaaatgatttgacaaaatgtagatactttaatcacttaaaatatctttgaggacagtggaaaatctcaaaacctggattgctcaactatttagcaattgcaacatatacttgggttactgtatttgcctgatcaatatgtgtacaaactaggtaataaaacacttgcttttctttttgagaaaaattaggttctttttcatctatttaattattgcccatgtcaaatgcttggttttgaaaactgaggaattctatctgacaaagatgaaaccagctatagttgcttgtaaatcatcctttctagtgatcacataaaatgaacagtagacagcaaataatttaggaattgaacctatacatttatcttataattttgctgacttaagtttccctttcttggtttatgatgccagcagaacttctgtgtaaaattatagtctgttctactgttctcagtttcaggcaactgatttcaaatgcctatgaaaccactccaattaagccacatgggggtgctagaaacttatagtatgccagtcacagcagtggaaaagacctggggtggaaaatagcagatgttattgtgatttaaatttccacttgacatacgttctgatttttggacaaattcaatgttttaattgaatagttttcgttacaaccagaaggcaggttgagattctaactaagcataaataagggtatattgatagtgaaaaaggtccttggaggattaaaacaacacactgttacagatcatttataatatttttctgacttccacattctgttgcatttatttgccgacaatttgacattttcaatctccattttctggcataaatatatttgtaaatagggatattttctattgttcataatgatctacatttaaaactctttatgtaaagctttatatcatttcaaaaatttcaaaaacttacacttaaaatcatctctactgtataaatttgtttttgatccagggaggttgaagtgtctattatatagcaaaagctaaagtaaacctgaagtggaactcacagatgatccacggcgttagcaaacctaaaccctgaactcattatctgagtgtcactttatggtttaattcctttctttttgaagtgtcattgatgcacgcatagcaatttgataatgattgttatttagcggtattagataaataacaagaatagatggccactaaagctacctgtctccatcattttgtggcacataggggtctgaagttgaaagaatacgacagctgatggaatgaatgttaagtatgtaaggccttgagtttccttgccctattttaattatactcaccattagtctgggtctgagtcctctgctttttctcggcccctcaatatccagggaggcttagtcatcaaggtacgtactgctccaacagtaacaagagctccctattaatgacctatagctgacttacatattgcgagtttggagagaggctgagaagattagttgttctttttcatttgtatttatttatggtttactttgaagatctcaactgcttctgtgttagaatggctgtctttagctgtaggcctaggagctagcgatttatttggtgtgcgttcagagaactccaaaattctcctgcctcaacatctatctctgctgccaatgtaccgcactccctttgtacttttcatagagatccttgagaagacaggcagtggggctctcacttgggaaaagagaagtaaattaagagaaaaaatatagaatgctagacgtgggttttctggttccacccttgtgcattggaaggagcagactatggagccagagattggtgcgcagtcctccccactgtagaatcagacgtacatcacctctttcatttctccagattcatgttctttctcttaatctctgcttctagtttttttgtgaagcttaatttatataagtataaatgacatctgacatattgtgagggcccaagaaaatttttcctcttttcccctgaaaataaaaatgctacttgttgtaataaaggttactttatgattttagatatgtattatatattatgattttagatatgtagatatgatagttaaatatttaaagattcattttcagactcacaatttttatttgcttttatattttgcaatgtatcatttcttaatttcctttatgatgcatcacttattttaatatcagacctattttttaaaggaagcaattgatagctacgatgcaaatgctattcttattaaaagataaatagctttcccttatgctaatgaataaaaattcctactctacagttgttaatcaatctcgagttctaaagtccgataaacacatttaatagcagaggatgagcatatcattaaattgatggtcagtctctgacttgtgtttacatatagtcatctgaaatgaagttcagaatttgagtcccaaatagactatacccacgcatggacacagggaggggaacatcacacaccggggcctgttggggggtggggggctaagggagggatagcattaggaaaaatacctaatgtagatgacgggttgatgggtgcaacaaatcaccatggcacgtgtatacctatgtaacaagcctgcatgttctgtacatgtatcccagaacttaaagtataatataaaaaaagaaatataaaaacaagaacatagtttatgtttgaaatgtaaacaataaatgtgcttatttatgcaatagcttcaaacaatatattttaagataaaatacaatggaaattattaaaaaagatatactcacatatttagtatatataaatattcacagactgagatggggaaaacaaaacaatgattgtaactaggtagatattatggaaataactgatgagttttccatgcctgtgagatagtagaaattataatcagaaacccttctctttgaaggggagagataaacatgtttcatgttcatgattacgtatgaagtctcatctttctgcagggtgatgagacaagagggataggtgtattaggccattcttgcattgctatgaagaaatatctgagactgggtagtttatgaagaggtttaattggctcacagttctgtaaacttcacaggaagtgtggtgctagcatctgcttggcttctagggaggcctcagaaatcttacaatcatggcggaaggcaaaaggaaagcagccgtgtcctatggaaaaagcaggagccagccagagagagggagtcggtgggggaggtgccacatactttcagacaaccagattatgcaagaattcactcactattgccaggagagcaccagggggttggtgctacatcattcatgagaaatctgctcccattatccagtcacctcccaccagtccccatctccaacactggggattaaatatcaatctgagatttgggcagggacaaacataaaaactatatcaacaggtatcagaataatcaactcagcatcctagctttgagtgcttgccccctcagaactcagtatgctgtctctaatacctgaatatagtagcaatggcaaccctcacaagacttctgaagcaatatctattcttaccagcttaggtaataaccattatttagacagcttcagccaaaaaaagatctctttcctgtttacgctcactgactttctccttttccacttaaactgcttattgctacccaagggcatggtagggaagctgactgttctaggcagttccccaaatttataggctggtgtagtagcattaactgacctagggtgataacatatttacagtggatttctttaggatttgagaagtttctttttactcagtacgatataagttgtgtcatgtaggattcgaatacttgttatgtgtatgctttggaatttagatgtttaatggtcaccaaaggtcttttaacttcacattgtcagatcaccctgcaaggagtttgaggaaaatgaagtctatataaatttttagtggaaccacaacatgtgcataatctctgtccattagctttcactgctaagctattgatattttagtctatttttcccatactcactctcccaatgccgacgctttcacatattgtgctcttcccatgtagtattttaataaataccaaaagaaaaatatccttactccgatctgtaagaaattataaaaatctcacctatagttcttttttccattagtgcatagattcaattttggtcatgtaaagatctcctgcctggagagaggaaatgcaggtaccataaatcaaataaagatgtcaaatgtcttcaccaactaggttcttctgatatagcctattccttattgtaaccaaataatgaatttataactcttaatactgaaacttgaattttgattcagtttaataattctgaatgccttccaagggtaagataataatcacaaaaatttttggactacatattaagcactgttctaagcacattattttgtttaattcctaacacaacattaagaaatcagtgattgtcctaattttattgatagtaaactgaggcactgagagattcagcagtttcctctacatcacatactaataaataacagaattgggatcaagtctaagcaggactccagaacccaggatacttgctatttaaccccttatatttgatatataattatattcttatatactttttactttagtaaaaagtaaacattgtttttatgtacaatgttgctatttatgtgagcaatattgtggatgaagcttagaaagaatacttacatgtaagtatatacctacatacttaaatatcaaatataatatatttatatttgtgtataccatagatgactgcttaaaaataatacatatatgtgtatgcttatatacttacatatcaagtatatggtatgtaagtgtgcatgtaaatatattaaatatatgtaaacataagcatatatatacacacacagaaacaggtttgcttggggtatagaaacagatttgtttagaggtgtagataacatctagaggaaataagaagtaagactacctaaaatagacagcttcagtttagaaacagtagccaataaaggggtgatagtcctatcatggtagaatcagcatatataatgaaggtttctactatattattaataaacaagcacaggtacaaatatccttcagttggactccccttgctataagtatgtaaggaattcaactataatagaacttgtgagaaagaactatttcaggactttacacccccaagcattattatttataataccaatttggattggcaattttatattgaaagacaatcatgatacttaaaaaaaaaaaaaagacacatgaacaggcaagaaaaaaaaagtgagagtacaattaccagctttaagcatctgcttatccctctggctgtaactgtttttaatttttttatttccttattttgtttttttggtttctttagctatttctgactgacatatccagcttggagattttattatacctgcctaaattgtataatttcgctcttttactggctaaaactaagctgaattaagttttgaatccttgcttcaagtgattatcttaaagaagatggccagcctctgcttttgctataccatgttaaatcatcaaagtgaaggttttctaccatttatgatgattgcttgttcttgtgcattccattcattttgggcaattttccttcaatggtccattttgctctcttgtttttatgtacaatgccgctatttatgttagcaatgttgtagatgactacttaaaaagaatctattttcattcattttacacgttcaaaagtaggagatataaccattgtgatacaatttataccatacgagtattggaagctaaaatttgtatttgtttccctattgttgacataaactttactatggatttatttacaaattatccagatattgcttttgtctaatattctgtaggtttcatgtggtttttttttgctatcttcactctaataactttaatattctctttcctctttactgcttatagtcaatatagttttaaaaaaaagagtaaagtgcacttttcaagggtccaatttccatccgaaatcactatgttcaatgtgataaactatgtccattggtgagtggtgaaaaatcataggcgtgcctattgcttaggaaaacaatctaggacaaccctggtgagttccacttgggcattcaagtgctaaattgagctcagtaaagttggccatttccctgcagccacaaacttctggcagatgtaataatgcaggtgtcacgttagctggaacactccctttgaatgtcctctcctacacatgctaacttctattgactttttatttaacttgctcatgaggcatggcaaaaatcaggcaagaacgttttgtgcttatgcttgattgaagtttctgggggaaaagtgtcacctaagagttgttggaacttagatataagaaacagaagggtcagtactttactttctgatgacaatgtatattttctggtagaaaaaaatcaacaactttcatcttaaactactaaatatacaagtaatttaaagaaagataatataacatataatcacattataatttttgtgatactttactatgacatgtttttgtgatagcatctattattttggatatagaaatgagaatggagatgattgaacactttagtggaacccattaatttgatttgcagaaaatggtcttatgtcttctcatattactactaactcacacgatattctaagcctcagtttcaccctagtaaaaacaaaacaaaaagaaacaacacaaactcccttcttattttactggtcagtcatgcagctagctgaatatatactatatgtgaagtaacaaactttaaagaaaaacagtcttaccagttattacatattaccattctatgctttcagtcttcatactccaagccatttatataatgaacctcttcaggtgtactaaaaaatggggcttatatatacaagtacttatttctttgtaagagaagagtaataccatgggaaattttataactctgtgaactaatgccaaaaatacattttatttttaatttgcttttatgttccatgtaataaaaggatattttaggtgatgtcataggtttgataggactccactaatttttaaagtaataatttattgagatagatataaaattttacatcaaatatttaatgttctgagagtcttcatttgttatttaaatagtgttttcatagttttggcaaatgattgtgcatttttgaatttgtgagagagtacttccgagtctggcatggacaagatgaatgttttgcttaaaaggttttcagagtaatattcagatgactcataaagtgcctattatgtttctgtatattaattattgtatgtttgctagttcataagaatatacaacttaaaaattttaagttgatttaaaataacacatactcagaatatgtgtatatatatctataaatagtcaataattaatacattattcctgtgttaatgtctctgaactaagcgtgatgggatatatatttacttgatggcatttctttttattaggagctggtattagaccaaatggtatttgttcttctattcagtcattatgtattgggtacctactatgtgtaaggttttgtgctagttccaaagccatttgttgatgaataatcactagttattagaccaaatggtatttgttcttctattcagtcattatttattgggtatctactatgtgtaaggctttgtgctagttccaaagccatttgttgatgaataatcaccagtcattgaatctataatataggtttataacctatacaaagagctatatatagacaggacacattaatggacatgtgagaagcagaaatatgaattcatgaaagtttagtggaggttagaaacaaaagctcttagctaactttacacatgttatctcatacaagtctcgatgtacagtttttaggaggtatgtgtctctatcccatattttatgaaagaaatgatgactcagaatgtttaagtaaattctccttactccatattggagccaggttttgagttcagaaatctctcagtccaaggacaatattctttccttcaatatatcccactgtcatgggagccaaaggaagaaggaagagagaatttaaaataaatgaaatagaaagacactttcaagaggattgcatggtttagagagagaagagagaaacagaattaagtcctcatttgatgttgggtaggtaggagtggaagctaggctataaggtccaaacacatagtgagaaacaggtaggtaaaggtatgaattctactcaggaactgacaaattgtgtttgctctttatcctatttatgctatttttcataacagtgaaaatctgactatgaagaaattaagatagtataagaagaaaaactaaagtggatattagctacctgtttgttcattgggtgaaatagttgacgccacacagtcttacttcattgttccgtaaatattgcatatatcctaatatcatcccccaattaaattgtgattttcattagggaaagtatccaataccataatgtcttaatatgtttttattataggtctttcttagcaaaaaattgtgttaatttgtatgaatgcagaatagagttcactgtggcataaggtataagtcataatttctgaaacagatacaaatggtttccaattctttatttaccatatattttcttgggaattgatatatggtgctttgtataaacactcaacaatatttgtatgataatataacaaataaactttcttggtagaaagtgaaaatcatcatttcttagtgatggcaaaggagggggaattgtagtggagcaaaatgcatatgattcctggttgttcaaagggattgaattcacaaaattcacaaaattattaattagaaaatacatagcccaagatataaactgactgtgttgggaaatattgtaaaccaacatctctaggttttaatttcttaaagtagttatgtatctactaattagctaggaaggctctgaataaactgttttttaataaaaagagatttatctaattgttttatattgtcaaagattatatacatgtaggcagtataggtatatcgtgaaatctctaactcctggtgagaactaaccagtgtttgtgtattcttgatcttcaaaaattattcacgttttcaaatttttgcattttctgagaagtttttgtgagaaatattcacagacattttcaactatatgaagggatatgattttattaaccagtgaagaaggttaaggcaaaaataaatacttatttaaaatacaggcatctactgtatatctccggtgaccttaaagtacatttctattataataaaggtgaaaaatatcactatcctatttttatggatggtgaaactgaatcacacgaggtgtgtgtcatactttatgtcacaccaatcagaggaaaacaaggaatctagcccagggctcccactttcagttttagtcactaacccttttcaaaagcttcttttgcgagatatgacttttaaatcagacagctggagatcagttcctgcttagcggtcaagttgtgagccacctgcattgttgaccccacttagagaggagacattgtgaggaatttgcccttttccaaaactcttgggggaaaacacaggaagtctggcagggagaaagccccagcaagtcacctttgaaaaatgtaaacaggattttcaagggtacaaagacccaggataataattttctttttaagttttgctttatttataataaaagatttgtatatatttatacacaatatatgtctataggtatcttttctttaaagtacaaataccttgccttccatgtttagggaggtgtgagtaaaacaactcttgagcgtagaatggaattaaatttacgcaaaataggctgccagagctataattacagaagctagataattagttgctgaccccagaatttcttcagctgctaatttatacttgagatgcctttatggggcataaagcctttgagtctgaccttaggatagagtcatgcacttcgtatccaaagactataaggcagcgaccatgcctcctaacagtggagtaaatacccgagagcactctctctctagaagatcaattttgacttgcagggagtcgtaagtatggtggccctcaccacctcaaagtgtgagtacagaaatactacacaggagaggaaagaaaacaaagggagctgaggtgctgggccaaatgtaggtgacttgctagttttgctcttctaaacttctcctcctgcttcttctcttctttctcttcctctttctcctccctgttggtctggttctttcccttcctccttttcctccagcaattgtatctattaagcacttattaccttcttggtgttgtgctgaacacttgccacatttattattttatctggctgatgagtctttttctcaggatggtggagcatgactacaggttttgggcaaaggtatttgcctatctaaggttgaagtaggtattttgacaccatttgcctatataactataatgatgataatgtaatggccatcacagcaatatccacctggcagtattaaattgcagttacttcttctacccctccccttctacccactcttcagctgataaactgacaagtatacagttgtagtgtcaagtggatggtaatttttgctttcatggattttaatgtgcattttctatgtcttcttatgaaaaaccccagataataaagatatctgctttccatgtaggtagtaagcctcatatcaacatagactgaatatgacatgtcaccaggaatttaattctagcattttcccacatcctcctaaaaataacttctccttttcctcctttctaaaaatggcttacattttttccttcaagaactagaaaaatgtagtcaaaaattattcttatatatcttacatttttctaggaaaaaaataagcagtagttattagtagataggcttctgttaagtttttaggaggctgagacaggcagatcacaaggtcaggagtttgagaccagcctggccaacatagtgaaatactgtctctactaaaaatacaaaaattagctgggcgtggtggcaggcgcctgcagttccagctacttcggagactgaggcaggagaatcgcctgaactggggaggtggaggttgcagtgagccaagatcacgccactgcacttcagcctgggcaacagagtgagactctatctcaaaaaaaaaaaaagttatttattttaacaaggctctaagtaattctttctagaagtcaaagaaagatatattgaaatatatttatatatttgttgcttggtacaacctaagtgatgtttggaaaactgctctgtggaaacatgatgatttaaacaaagatgatggagatgttttaaaatataggagtttcaaataaatttatttgcaataacaaattgtaaaacatcaaagagtgcccattcaatccctattttctatgaggccttataaagtgtttcttcttatctgttagatttaaattctgtacacataaaaatcttatattcaggggaaaatccagagttttgcttactgaatacatcttctttattttggggaaggcatacattgaatagatttaaaattataaataaatgtattcatcagaaataacagaagcaacatttcatagtatggacttaacccgttaatccaattggctcaagcaaaagctatttgattggtatcagcatcctttttttttctttttttttgagacggagtctcgctctgtcgcccaggctggagtgcagtggcgcgatctcggctcactgcaaggtccgcctcccgggttcacgccattctcctgcctcagcctcccgagtagctcggactacaggcgcctgccaccacgcccagctaatttttttgtatttttagtagagacggggtttcaccgtgttagccaggacggtcttgatctcctgacctcgtgatccgcccgcctcggcctctcaaagtgctgggattacaggcgtgagccaccgcgcccagccagaacactttcttatatacgaattgacataacttactactttggttaggcagtttccatttgtttttcatcttggtaaagacgaatggtaaaattcaaatttggtaaaatcaagggcagagagagagtcattgcatcttaaattaagaaccatgggccgggctcggtggctcacgcctgtgatcccagcactttgggaggctgaggcgggcagatcatgaggtcaggagatcgagaccatcctggctaacacggtgaaaccccgactctaataaaaatacaaaaaaaaaattaaattaaaaaaataaaattagccgggcgtggtggcaggcgcctgtagtcccagctactcgagaggctgaggcaggagaatggtgtgaacctgggaggcggagtttgcagtgagccgagatcctgccactgcactccagcctgggagagagagcgagactatgtctcaaaaaacaaaaaaacaaaacaaaaaaaaaaaacaaaaccatgaaaaaacaaaatgtggtttattatggctcaaaaattgcaattaacctacattaagcgtttttcttcatcattattccttgtattcatagagcataattatgacattatattcaatactaaatgagtggctttaccagattaagagtaatatcatgatatttctggattattagggtcattaaagattagcaaaaaagaacaggaaattcagaaaattaaaacttgcctatttaaagatatctacattatcagtttctcataaggtttcctttttaatgttgattttactgttattattactagcctttaaggtgaaatatagttttaagtatgccattttttgaaaactattacttgtaacattttagcattattgtgatagaatctgggtccacttagcactattagataattttcttgatgccatactgtcacgtgaacattggatctaggtattatttgctctgtacaagaaatataaagattcaagtcttcttaaattccttcaaagacctcattcctgtatagaaacagccatggtactcaaaaattaagacaaaatagtagtgcctacccaattgcctgggtttttatactttgcttttctaaatgccacttctatttttgaaaattgtcttttgcatttctcgtaaggaaacacatagcaacttgtctccttgaatgaagagaggtgacaaataatttctccactgatggcattattgtgattgtggcatggtcttgaacccgtgaaacgccaaaaataataagtgaagcagtaaaaaactcaagagagaggctagtgagggttcatgagtcagagaacatatatcttactcaattctcttattaaagcagatgtcattactgaacgtcaggcttagtttttttctgccttttggagtgttttttttttttttttaaagaggataataataaaattgcaaacccattccataattgtaggccaggtggagtgctcattttcacattagagcttgtgcaatctggagggaaatttggtttagtattactcgtgagttggtggatcagatgaaagccagtcaagtggaagagaggactgtgtgaagtgcgctggctcccctgataattagaatgctgcaggcgttcctccagtcagctaatagatttccccagctcctctgtgccaggtgaaaatttcctcattaaggggaatttattccatttccttttatcatttattattgaagactaagtgtgagtggaggaaatttcagagatgacagggaggaattttaaacaacaacaacaatatctacattggaagtcttagagaatgaggagaaaggcttgtattgtttgtaaaccagagaacacaccagagactttttgctatagaagccgagccatgctgtctcaccattaaaagattatggcagagtgtgtaaaagtctgatggtctggttttaagacatttttttcaccttctaaaatttcagtcattttgtgctgctaagtagaaagaaactgaagattatgaaaaggccagcatcacagccatttggtgtgttgttttattgtatagattctattatgcaatgatgaaagtctaaccttttgtaaagtttgcccttgaactctcaaagcaaggcaaactggcacgggaaagaatagttgtatatataatagcatattttagaggacacagttctgaaatatggatttaatgtgtatatgttcaaaagagtaaaaattaacataaaatactagtacatacaaatatatatcaaagaacagaaggataatttattatgcatattttaaaattgtgtgcttttgtgcaatatgctttcttcagctgatcacatttctagctgggcataaagctgtcttgatttacaacataatataaatggagtattccctattgaggtttcaaaaagcagtgttgaattataaattcagtatttatatttcttttagtaattattctgttttgagtttgtttcaaattaaggtttttattttccttcagaaaaataaaaatgttatagccttgttttgaaaataagcttttacctagtttgatcaaaaaaacaaaaacaaaaacccaccatgatggaaattggttttggcaaacaaaatggagggagcataatgtgggcagataaagatgaggaacatctatctgagtctccacattgttaaatgagctttatgtttgcttaagattatgcatcttgtatttatttgactctgaggagatttaacctgatctaaatcactgccccacaactaatgaattgtgtctttgaactgtctttttttttctttgattataatgggacacacaatacaattttgtatcagaataagctgggactaaagtcaattttctactgtgtataatgacatctcagccagcctggtgttacaccaaagagagaaaacagaggagaggaaaggtgaggacaatacagagaattgacctgcttccattaggagtaccttgtggaattaggcagcactgactgtgggaagggatctaacttgcctgtgcctctctaatggccctggtgggtcagtatcaacaatgatttctcagtgaggaggattgctaagtgttttgcactatttcatgatcatgtctaaagagcagaaataaccagagagaccatgaacaaaatactatagaaattacattactttggacatccaatgatcacacatacccaatatctgtattcaagttaaggtagatgaacatgaatgtactaatataccatttcaatttaatacattctaatttttaagacatttaaaaatattgtattctgttattgatctagttatttgaaaattgggcagaagttgaagcagtttttggctcaccaagaaaatgtcctaagaatcaactagtgagattaaaatatgcaaggtgcaggtctagcttgatacatctgtttcaaaattctcacctagtatgatttaaagggatgcctatgtagaaagttttcactcccattctgaagtatcattcacaatcattattttgtgttactgttgctcttctcagacattttctttaaattatgaaaactctctggtgtgggaaatgctatgggcaggggagcagtaacagttgagttagtcttagtgacagatggcttttttttttcgtcaccagagctgagtacaaaattaactcacttcactttttaatgcacaaggccaattcttatcaatcaacctttttcttttctctcttctttctcgttctcccttctttcttattatttttatttctttgctgataagtgttcagttttattagtaggtagaggcagaagactttgtatatttgctagagatgtctacatacattctgttagactcttgtggtgaaaaagaacaagagaaattatgcatattccagaaatgaaaatactacattcctgaatgaaaatactgcattgctgaatgtagacgacacaaatgcaaatttattgcatccctaatagaaatgtgaggaatctaattttttcttatttaataccattatttataattttcattttaaacaacatagcgacctttgaaaacctgactggtattccatgtaagaaggaatgcaaacaaataattaaagaccctctaaaaattgcaacaacaaacaaatagaaaaacctgactgaaaaagctaaagataactacatgacttctgcttatcttagcatttgaagaacccgcacttatggtgctgccgtgttagcccatggtcacaattatagatgtgatggttcttttcaaggcatgtgttttaagtgtatctggatgactgttcttcagagttaggattttagtcatttaagtaaaagtggttattgttctaatttagaaaaatcgcttatttgtcaagcacttccaccgaaaggctgagtgcatacttgcacataaacaaatgagcaattggtttgggagcatattcttggcaaggaaagtggaaacatacctttctaaaacaaataacaacaataacaaaaaaaaatcttcgccaggcgcggtggctcacgcctgtaatcccagcactttgggaggccgaggcaggcggatcacaaggtcaggagatcaagaccatcctggctaagacggtgaaactccgtctctactaaaaatacaaaaaattagccaggcgtgatggcggacacctgtcgtcccagctactcgggaggctgaggcagcagaatggtgtgagcccgggaggcggagcttgcagtgagccgagatcttgctactgcacttcagcctgggcgacagagcgagactccgtctcaaaagaaaaaaaaaatgtttcctctactttcaaaattaatttctctctctctctctttttcttgaaagtaaaagtaaccacaaactttggtgtttccaaggctctctgaagctctaaagtcacctctggggtaaagcctttccagacttctccattggcagctggggtcccctgccctgagccacggcttcaacttgtgcacacttctcccacagcacctctcatgatgtagacatatcattggctatttgtgcttcctaacatactctgacctcctaaatgtaagagtacaatatttcatcttccatcattaatacaggcaggacaggtctgatacagagcacgtactcactaaatgttaaagcagtaatgacaatgaatgtggctaccctcaccatccagtttcctcagtatgtttcccatacgtgccatgtccactgctgctctcaaacaatagccaatactgttgccattgcctattgtacacctgtcaactcctttatctacataaagttgaactttgttttttcttttttgaggtggagtctccgttgtctgagctggagtgcagtggcgtgatctcggctcactgcaacccccacctcctgggttcaagtgattctcttgtctcagcctcttgagtagctgggattacaggcacctgccactatgcccagctagctttttgtattttttgtagagacggggtttcaccatgttggccaggctggtctcaaactcctgacctcgtgattcaccctcctcagcctcccgaagtgctggtattacaggtgtgagccaccacacccggccaagttgaactttatttatagctctgttctcatccctccactgctgtagtgtttctcaagtacaacctttcacactattatctttctctggcctcacgtagcaccacatagcttatccctccataaagtgttttgaatcactatcatttcattgtctcaaatattgtttccttatcttctggggcagcactgttcagtagaaatttctgtgatgatgaaatattctgtaatctgcactgtctgacactggagccactgaccatgtgtggctgttgagcacttgaaacctggctttggtgactgtagctctaaatttttggtcttaaaagatttaattagtttttcaatttaaataaccacatgtggctaggggctgctatgttggatggcacagttctaaagcacagggcttggcacacatactaagtcagcaataatacttaatattggattgcattcaagaatttgacaggaaaatgcattgctctgagagaatgcttatcaaatacttgggaaaactaaattcaaaataagaataaaaagagaagaaattaaattcaatgggagatttaacacactgatttgagacagaagagaatttaggtgcaatagaaaaagcaaattgactaggaagagctgtagctgcaaaaatttaaactaatactgacactggaaatccagggaaatagccattatatacaccagcttgattttttcttctccaaactcagaatatgaattaattaaagcagattcatgattagaatgaacaaaatgcaatagatttaatccaattacattttattaacagcatttcatgaaaatgttttcttaaggcaagttagatcttctggcaatacactattttaatttcattgtattgactatcaaactattataattgaattgtattgtattaacaattacatgaaatagctggcccacaggtatctggttaaagatgcttttacagtagtattttattcttctgtcccttagctctttacaaattatttttgcatgcattttgaaatctagttatgagctaatttcaatcacttctttgtcttttctataaaataaaaacctagggaattgaagtttttatatttatccttcatttatttataatttatattcataaattatatttacatttaatttataaaatatatgcattttatttatatgtttatattacttatatttatccttcatttatttattttcataaatatttattgaatgctgtctgtgggccagataatgtggtagatttggggagtaatctggtaaataagccaaatgtattctttgcctttatggaacttaaatccagcaggaaaaagcctgattgacgaataaaagttaggagacattaaaagtatcaggtgataatggacatgctaaactgtatgattctatgtccatcgttccaagcaaaagaggcagtaaaaagcacaagaagttcagtgtggatgacagcaaaccaaaaggcttcacaaatgaggcttggctttagttggactttgaagggctgctgagggtcagggagaagttgagaaggtaaaaggaatgttaaaggtattacagatgagagaaacaacacaaataaagtctacgctatggaaaggagtagggggaaaataagacaaatctagtttgagtggaaaacaattataaaatgacaaaactgtcttctcaacatagacagatgggtgatattagtaagtagaggtaatttagggagaggatatccaaactgatgcaatgttgggacacctaggtgaagatgattctcaaagttcatatgcataaagacctggagcacaggtcagatgttggagaaccggccatggatttgggaattgtcaaccagtcatgctacttgcacccatgacagtggctaaatttagagagggagagagggaagacaaaagcaggtaacaaagggtagagccgtgggtaggggtagggggaaacccaaaactagtaaatggtagttttgagtaataaagtagagcgagaagccacttagtagaagccagaatatctttttaaaaaatagatcatcaaaagggtcttgtgatgacaggttgaggaaaatgaaaactgaaaaagggctcctggatttagagagtgaggtctctgattattactaatgagcacatttattagaacagtaaatgcacttgccattttttataaaagcagcagggaagaggtcgcatagagtgtgaaagcaggagatcagagattgtcagctttgcaaatagaagacttcatagaggctagaagattgagtgggttagttatttgtgtatttttaaaagataacaagacttaaatatgtttgaaggtggaaaataagaagcccttggtgttcttgaaattgaacttgtcaccgctttttattgtttttggtctaaacttgaatctctcttttctattaaatcctagtgagtccatgacagaagaaaccctgaaaagggcaaaggagattgggttctcagataagcagatttcaaaatgccttgggctcactgaggcccagacaagggagctgaggttaaagaaaaacatccacccttgggttaaacaggtaaaggagtttcccttttcccccatcccccactgacaggatttctgtggtaaaacgtaggcacccattcaaaaggccattgttaataaaaagaggagtggaattaagaagtgacaatactcatccggttgatgctcataatgtcaccaattttattcagcaagtgattaatttttacttaaaagggaaagaaggaaaggacactaggatgtaaagataagagtgagtacctgattttcttggcctaactgaacaaaacaaaacaaaaatttaaactctcctctgctttttgacctgtgttcaaatatgtaagtagttaagaaatccttagtgtaattgaaggacttgaaatttcctagcatggtggctgaccctcttgaaaataatagttatctcctttggcagtaactttttacagggtaatactttatattaagtgccccatgattatggttcatttagtattcattgtgatagggctgggcataatgagctcatctagtattcatgacaatcacgcatgaacattcataggtgtgctgttgtgattttttttcctttggcctttaatggaagggatgtcttagtttaaagtaccaccagctggtttttgtcctttaaaatcattgacttttcactgtgtgctcaaggggcacgtgcatacccttaggtctcaagctttttgctaaatattttccactcagcgattattatctttcttccttctcacctgccttacaccagcttgccctgtcggccccaaattcttgctcactaagctgagttactggcccttgagagtggaattgatttccaaatatgttcaatgagatcttgttctccccccgttcatcccctatggctttatggtagttgtgtcatcccaccgctcagtgccacaggccacttaaatcctgcgcattaatttgcaagccaaagagatccttacgtataggtcattttgctcagattttagatttcatatacagctgcttttagagagctggtggggtaagtcttcctagtaaccagttgactataggaccactttgcgatgttcatgagagttactattactactagtgatccaatgccctgtttctcaggtgataactagaccacatcactattttctctctcttattttcagaattagaaagcaattccacgggtcatacattttcctgtttgcatactttacagtaataggaattaaaggaatatgtatataaagcacaaaaaatttagtcttgaaaaaattataataacattcttatttgtttattttatttgttttctcttacagattgatacactggctgcagaatacccatcagtaacaaactatctctatgttacctacaatggtcaggtaggaatgggcaaattggcctatccagaaagctctagatttcatagacagttcacattagggaatatatattttttacctctttggatatctaggtaataaaaaaaggcatcatggccgggcgcggtggctcacgcctgtaatcccagcactttgggaggccgaggcgggtggatcatgaggtcaggagatcgagaccatcctggctaacaaggtgaaaccccgtctctactaaaaatacaaaaaattagccgggcgcggtggcgggcgcctgtagtcccagctactcgggaggctgaggcaggagaatggcgtgaacccgggaagcggagcttgcagtgagccgagattgcgccactgcagtccgcagtccggcctgggcgacagagcgagactccgtctcaaaaaaaaaaaaaaaaaaaaaaaaaaggcatcatgtgtgtcaggtatgatgatatgtttctgtactcagtcttttaagaactgccttaagataatgaaatcaaacaaatgaaaaattaaggacaatgactacatgatcatacaattatgctatgttctcatgactatttaatttaaaaaattctgccatatctattttttataaataagtagggcttgtataacactttatacttatgggtttccagagactaatagagaatacatgttaacaagaggaagatgagaaatacatacttaatgataggacaactagtttaattaaatggaataataacacttaatgatttctgcatcttccttttcttatttcctcaggagcatgatgtcaattttgatgaccatggaatgatggtgctaggctgtggtccatatcacattggtaaaataataaattatgtgtatataggactttacacaatttatatagttttcttcatacatgttaattccattattccaagaactatatcaaataaatgctgtaatatatgttttgcaaattaggaagctggggttcagaaaaataaaacccaaatatatacagctatttagtggtagagtgggactcaaatgcaggtctcaactacaaattctatctcctctcatttcactgtgtaacttaattttcatcctttttaactgaattgagcctttcactggagttgggaatggattagattttgacctgttatcttctagcatagtttttcataaggatctacatttactcaaggactttatacattagccagaaattacattgcagataccacctctgacctcatcctacgtaacatatatgactttcgtttacctcaaatgcaaaaatcttgtctgtttggtgcatgggtagagcattatgtaggtgaattaaaacataatcaccagagatatgacatttctctccagtcaattaaataaccactaaagattattacagatgcaagtatgtattttaatggacagtgatattagtcaacatatggatttaatatttaatctccacaaagcattataatatggaaatgataaaaatctatgatttgaatatatttaaatcttattctattactttaagcatagtttatttagtttttacaatgaactaagagcttcaggatatgttagtttaccaatctttggacaaatcttgaagtaggacaaaaatgttatatctttaccaccttagtcattgtcttagtccatttgtgctgctgtaacaaaatacctgagattgggtaatttataaataaattctcacagttctaggggctgggaagtccaaaatcaagtgccaggaagttcagttgtctggtgagacataggtctctgcttctaagatggcgccttaaaccttgtgcctcctataaggaaggaatgctgtctttacatggcagaaggcacaacagcacaaagggaacaaattccctccatcaaaccctcacccccagttttttctgagacaaggtcttactatgtcacctaggctggaatgcagtggtatgatcatggctcactgtagccttgatgtcccaggctcaagcactcctcccacctcagcctccctagaagctgggcctataggcatgtgccatcatgcttggcttatttttatttttattttttgtagagatggaatttttctgtgttggccaggctagtctcacacttctggactcaagcgatcctcctgcctcagcctcccaaagtgctggtattacaggcaggagccactacagctagcaagcttttctataacagcattaatctattcatgagggatctgcacttatgaactaaaaccctcctaaaaggccccacctcccagcactgttgcattggtgactaagtgttctaacacatggatttcaggagacacgttcaggccatggcagttatcttatggtgaaatagcctgaccatttcaccagcatctacctgtctactctctggagtactttttcttccttttcaaattttacctattcatgcagtaattctgcattatatcaggatccaaagaagactagtcaagctaataatcaagtgtgtgcttacttgatagttgccattaatatgccagtatatttgaataacgtgttttcacaagaatttttagaagacaatatcttaatgcaaagaattagtacaagtctgtggactttcaattctatggcatcccagtagacgtgatattttgaggtgtttaggccattattacacttcagatttctttatagaaggtcactcactctgcatgggtggccttgccaagtttaaaaggatatgcttggaaaagataggactcttcaatcaatcaggatatgtcagagctgcaaggcacctcagggatcattaggttcagccctcagacagcagattaagtggaaaggctgaaaaaagagcacaggtatcctcatcactggattaactatttttgtgtattgaggtcaatatattcactttgaatttcttttcagtaagtgagggttatttttatcattaaaattacctcccattaacattgaagttctaaatacttcaaatattgagattttctattgcagaatttagcatatatgacaagcccaatatttccttgctgtttaattagtacccatttttcctactactaatacagtatgcatcatgggtttgaaatttatatcttggagtttaaaaaattgaattgaaaatcattagcttccttagcctggactgactggtgatacatttctgcttctctttgtattgtaacttcgtgcttctcttatcccttttgccaatctcattgtctctgcaggcagcagtgtggaatttgattggtgtgctgtctctagtatccgcacactgcgtcaacttggcaagaagacggtggtggtgaattgcaatcctgagactgtgagcacagactttgatgagtgtgacaaactgtactttgaagagttgtccttggagagaatcctagacatctaccatcaggaggtaagaaaagaaaaacagaaaaaaaagaaaaaagaagacagatatatgtagtatacactttatatatatgcattctggtatatagatgtatatagtaattcctcttagaagaaagggctgccagtggcatccattgtcttattttgtagtaaaactctaaaaaaaatcactccattcttatatttttgagcccctggcccagagtgattatttttcacataaagtttttatttacattttctttctaagggtttcagctagattgaaaactctacttggtaacatgtgccagatacatattaactaatacaagatgatccctcataaatatcttgcagagtgattgaattggtcatctagacatacaataaacagcctctttctagtttgtgtgatgtggtttaatgataaacagttccagttccctgaaaatagtcaattgctcacaaaagaccagttaattccttgttccatcagatgaagccattagtcttcagtttaagatcaatgagttcattgtgaataattttgcttcctttatagctttcacttacagttgttcctccattcccatcccaatattactgagtatcttcactgtgaattcatgtgattgcagattactataagactgtagaacaaaataaattatcttataattaaaataaaagctactggaaaattttagtgatgtccagtagttaggcctttgatattattacagttattattactttttaccagaaaatcatctctatgtggaaaatatggtcaattagaaggaaaaaagtactaaattggaaccaaaatacttaaattttagttttgactgacaacctcattgatttctttaagttacataaattctccgtgctttatctttattttaaatgaatcgtctgagtataaacacatgctacttgcaaatactgtgaagttaacatagagtttatggccgaagtcagattgtaaagtataaagtatagtgctagaataatgttattattttactattacaaaagaaagtagacaagtttaggaaggatgtataattatagttgtctacttgggcctggcctactaatcctttaataaaattgatccattaaatagaatatatagcattttttagacctctctctgacatggttgtttttaaatcactccttaatattcatttgagatagacaggtggggatcaaaataagtgcatcccacaaatatttctcgaacaccttgtaaatccaggttcagtatgatagacagctggaaaaacaggttcttatcttcaagacattaacaataaaactagtatctgtgatataaatgtgaaaagtcaaatactaatttaaaaatattaaaaaacattacagatgatagcagcaggcattttgcatataattaattatgtcctcatgaaatggtttaaagaaagatgaaaaacttctatgactgcttttggatacaattatacatggctattaatgagatttgtttattaaaactgaagtcagtattatagaaagaaagaagttggcccttctttgaaactaattggtatttaaaatatagtattactatatattaggaggtaatttaaaatatgttggcggacataatatgatgtacatatgtaaatgtagacaatggtacttctgtcacaaaacaagttaaatgaatgaattaatgacagacattaattagtgataggcaaaacccattagagaatgcatgactcgagacagaattgaggttcatttatatcatttggtttaattgtaattaaatgtaatcctaaaatactgcctaaactataaatcatttttactaacatgtaaattagtaaaatataaagcatcatccttctcattggcaggtgtacagatagtagaattttataaattggagataattcataaaattccaaaaaccatggccatttgtaatgaggcaaatactacttctgttagaaaaattttctcacatgacattctttccataatacatctaatttgtgcataaaaataaggactaaccaaagtgattagtggccaggataagttaagatgttctcaaataagcttgaagtatttccttttcatgtttttctattgaaaataagtttctggttcagaaatattcttgtgctatggtaagttagtgatatcaggttttaaaaaacagaaaactaagatgggtaaaaaggatgcaaacagatctaggtatgattaatggaattttgggagcttaatggaattttgggcctaaatattttagaaatctattaaacaatatttgaaatttagaatattttatttcagtagatttcttgaaactattcaggcctgatggctatgataaggatgatgatttacctgtgtgggttaccaggttctcatccctttgttcctacatgtcccgtgatatttggtgttggatcaatttgagattggattattccataaaactgtgctatattaacattttacaaacatgttctcatactgaattccttttgccctgtgggaaaacctgcacgacaccatcacactgttactctaaaagattcctgaggccgtgatttgtcttcccattgatggtctctgattctagtcgtcaatgatgagaatttggttttgtgctgaaagcttttctactactttccaaaaaaaaaaagtagttttttaaaaatagcttttctcttattctttaacattaactacacctgaaatgagccagaaaagtagagttaacttaagattctaatatttggtctattacttcagcatagctgaaagtgtattagtttcagcatagttgaaattacaatctatagagttgagttcaggccggggatggtggctcacgcctgtaatcccaggatttggggaggctaaggagggtagatcacttgaggccaggagttcaagaccagcctggaccccatctctactaaaaataaaaaaaattagctgggcgtggtggtgcatgcctgtaatcccagctactagggaagctgaggcacgagaattccttgaacctgggaggcggagattgcagtgagctgagatcatgccactgcactccagcgttcatgtacaagctctatacatgtatttgctagataagggatatgggtgagtcacttcacctttactgagcctcagtttctttagctgtaaaatggggacagtaataatcacctcagaaggatagtgtgaaagtcaaaacagatagtccaggatacatagtagaatctttattaaagagtagcagctattatcttactattgttttgaatttattgcaaaacagaatttttaattccttaaaaagcagaaatttctttaaaaacaagtcaatttaatacagctaagttgaaaaatattgatgtgtttattaaagccttttattacactttaagctcctatttagtctaattgactcaaacttttgctataagttgctacttctccctcagtttaaaaaaattattctaaaatccttcatataagagattttttgtgtccatttaatggagtaatttgtttttaagtctctaaaacattaacaacactgctgataaacccaacataataaggaaataaaaagattatagccaagagagtattttaaaggtttttgcaaaaatttatattgaacatattttaaaataaaaatagtttaagtacacttataaatatgcaaaatggtggattattattttcagtactgtttacaatgcctttaagcactcaattgcagggtgtttgtttagttacacagtaccgtaattgctctcatcagacagaaattagcctcatcccttataagagtatttcagaacaattttaaataatgacaaaatatatttggcacatatctatcattttggcagttctactaatattcattagtgggtcattaggacacacacaaattatgctaagctcaatggcctatcagatatatgatttttgatattaataatcatgtcttatttatttatacacttacggtatataggacctttaatgtttagtgtttaggcaggtattatcctaattttatacacaagaagactaaacgttgggggaaagttcagtcttgttgtctataaaattagacaagaaggggtgggtggtacacagaaggaaccaagttaggaagggacttcgactggaaatctatttcctcaccgtctcacgctggtttaccctcactgctacaacaacacctgtcttgagaaactttgagatttagtggactatttttttttttcttgaagttttgactgctaataggagatttggacttatggaagaaaatcttacacaaatgtctgaaataaggctaaagattctggcactgtttgtaaagcaagtagtgaggcagtaggaactaaaatcagttactaggtactgttgacaggtaccaaggctgcagccaaggagaggggaaggtggaaggtcatcaaagtggaaggacatcaaagtgggacctgagatctaggctggaactaaggggtagctaaaggttagataagctggaagagaagagaaaggaaacaacagccagggaagtttcagtggtgcagagaatttgttagtgggaaaatacctagttggagctaatgagtagtcttttgagctgagaggggtgataatagataagactggaaagtcttaagtgccctgggggtcaaaagtttatgctttattctctaggcagtggaaacctttggagaactctgagtgtaggagcaatttgatgaagcagacttgcttaatctgaatgtgaagtgctgagatggaggtgtacaggagaagggagtgttaaaagaagaaatctgtattcagttaggaatttccagcagtagtccaggaattaattgattatagcatagagtacatagcaaacatttattgacttgattttcctttccatttgccacacatgtgagtgtcacaaatgatattcacgtgtacttgtatggaaatcttgcacagattttagcatctaagtgccagaaagtaaaaattttgtggcatcatttaacagtattcattggtaggagagatgtaaatatcacagtcaggttaagaattatcagtaaggaaatagacacaatattagcatagttgtccattcataatgaagttattccaatggctgatattgtgagtgtattttccaggcatgtggtggctgcatcatatcagttggaggccagattccaaacaacctggcagttcctctatacaagaatggtgtcaagatcatgggcacaagccccctgcagatcgacagggctgaggatcgctccatcttctcagctgtcttggatgagctgaaggtggctcaggcaccttggaaagctgttaatactttggtaaggagagaaacaagtatctgtttctaatgttctattttgaagagctgcaacctgaatgttgactgaatgttgactattggatatgttaactacagggcagatagaatgcatacacttagtgaatttaaagttgttgtatatccatgattgcagttaatgctgattatgagttgatagcagtattctcattaagattcagacaatgaaaataatttcaaaccagttttgaacaagatttgatatttagaatcagaagctaggaattttatgtatttcagtgtccaatttacatttaatggtgcctttagagaataaagaagctgggctaccactcgagctaatgatacattctgtaattttattgcatattttaaactactcatacatttttattgttgtttctattaattagaatgaagcactggaatttgcaaagtctgtggactacccctgcttgttgaggccttcctatgttttgaggtaacactgtatattgttttccaaaacaatgattcaaaaattgggagatacagaaatgcatgctgtatgctaatagcactagggttctatatgtagtaatttataaatccattaacaatttccaaaccatcacagccagtttaaggaccaatgtgtggtcttctagtttaatgctttcccttcagggagtggccataggaagactacagttcttcatctagaagtgtagtgtaaggcatctccttaccaaacagagagggtagctttatattaaagaacaggacaatttaaaaaagacacacaaattgaggtatctctcgccagcgtgttttctgatacccagaaatgacagcttatctttgactattgtcagcaccttctgatagtgcctttgttttaaaattttcagtttttgagatccgattgtttaatagataaattataagggtgaggaacaggaacagtgaggatcttttatattaaactttaaaacaaagttttatcataaaagaagaagttgtgaattatcacttactttcttcagatgttaccacatgtaaggaacaacttcaccaaacaagggataataaaagaaacacaatttgctttgcacaatttgaaagtgtaaatggaatttgagatgggttcctttaaaatgatgaaaatgaaaaatttcaaacgaggtggaaatctttttatttaaatgtcattttgtgtaaaccatagtctaataatactacctgtttgaggagttaatgtaaactaatttaaacatgcacacatttaaggaaggatggaaaataaaacagctttgactatcacacttctttttccttttttgcaatctatatctttgttccagtttcacatactctgaatgataagcattattgctctagccttcctctcttaaacaaatgaagcaactgaaagccctttaggcagaaatttgtaataggataaactggtgaggtgatggatatataaataacttgattgactttctataatgtatacatagatcaaaacatcacacaatacctcataaatatatgcaattactatttgccaattaaaaatacattttaacattaaaagataaatttgtagtagtgtaaaagaggtaaatgctgctgtttaaaagcaaagtaatatttttcttatttttatttttgctttctgttactcctcctctcctaccctcccaacccattttgcaaatgtcaaaattcagagtaaattgatttcagatagcattttttctcaagcatttaaaaagaaaggatatagttgaaaaggttttattcacatactgcacattgtattagcaaatattactttaaaaattgattcatttgcaatctggttgagggagtagcataacctgctttgacaacagagcagtaggctaagatcagctgttgataatgaactctgaagaaacaggttagggaaatcaggttctgggctgaatcctgttaaggcttaagaattacctggaaccagcagagtgttaatgtagcaaatcagaaagggcaaactttggagaagtataatttctagagctaccaggattccctttgggaattaatacaggtttactgaccccctacactttaccttcttccatcctcagcttcgtcagttttatactttggttgattgtcctggtgattaaatggagaaaagtctcaatttagcaagaggcaccttcttattcagccccgactggaactataggttgtctggaactgttctgagaaccagtcaagtctagtattagcataaacctgacctgctttttttccccttccttttccagtgggtctgctatgaatgtggtattctctgaggatgagatgaaaaaattcctagaagaggcgactagagtttctcaggtagtgtccaatttctttgtagtgactgttatctcttaataaacatgtagtgacatttatctcttaataaaatgtagtgacatttatctcttaatgcaaccttactttgtatgttttcttttcacacaatgtgttagaatgagttttcttttttcctcttctaccctctagtctcctaaaagaatgagaaaccttgaaggcattaaattataactagacttttaaggttggtggaaaaagaggaatacctgtgcatattttatcaaaacagattttagactccaggagtctaaaaggacaatgatttttgtttttctcatgaattagatgctggtcagggtatttctggaattcccagtctcaagggctgctcaaccatgctcaccattaacaagtgaaagctttcctgatttttaattttcacatctgggaactttgcctagtcaaacatgcaactttaatagtaagtccctcactcaactattttttattttttcctgttggcacattcagtttgtgagttaatacaagcatttcttattttgtggcaactcagccaccttcctccactgccccccagcctttaccttctccttcagtgttacctcagcatgatccatttaagatttacccagtggggttattgatcttgtattgtagaggataaaagtaatgttttccttttaaaagctttcaaaagcttgttggggcttttttttttaagggggaacaattcatagagaagagtttgatgttaggcaagtggaatttggagggaggaagagtgaaatcaggagcatttcaaagaggaataaagtgcgtggactgtttctgcacacatgacgctggatcgctcttctgtgtatgatagctgctccccaaggatgtttgagtggtaagagtagataagaataaagagtgagaagaggcaaagagtgtaaaagaagaaaaccaggtagactttgaattcatgtttgtgtgcaaatcagatagcttagaagggaatctttccagtgggccagttttcactaatggagtgagacaccaactgtcttctctattttattcctggccaggggtcctgccatgcggcccttttcagaggctggctactgtactcagctggtctcatgtgagtgatgaggcaggtgtcccctcttgtctgcctcgaacactccttataggatctcagtacaatatttttaaagtatttttcctttagcgtatggatagaatccatatgggaccaaagtttaataatagagatgttgtgattgagtactttacagttcaatgttccctatcaaactacagcagcatctgggatactgaattcaatgactctagagtaaaaccagccccaatcaatcagtaatctatgtatgtattcatttatttatagcacctgttatatggtggcattgttctcagtatcaggaattgtaatcgtgaaaagaaagatatggtctctactgtcacataggacttctttttgctaggctcaacagacttcaaataattacaattaaatatgatgagcaatgaacatcgcaatagagaaaatacaggatgttgagggagagtgtgaaagtcttgggctccagtccctgaggaagggacttttaaattgatacctgatggttgattcagaattaactgggcaaatggcttacattgtgggagtaggaggaagaaaggaacagcatttatgaaggtctgaagatgagaaagagtagggagtttctcaaaactgataaagcattccttatatggctaggacatcaaacatgatgctgattattaatgatggtgcagaagtagtcagggaccagataaaggagactttattggtcattataatgagtttgaattttagtcatattttttattttaaaaagatgagtgtgctgtagtacacagagtgaattatggggcaagaccaaattcatggaaagaggtgagtgagttgttgctatagctcagggtagagatgacagtgcctcggattagagtaatgacactaaagatggagagaaatagtaagaacatgcattgaaaagaattagtgaatgaatggaggtggagggtgaaagaggataaaggataactcctgagttttctgccttggataactgggtagacagtgatgccatttattgagatagggaacactgaggaaggagaaaagtatagagggaggaattatatatttattttttaaccttttgaatgtgaactgcctgtgaggaatccaagtggatatgatttaaaggcaagggttattataataggtttggaattgaggaccaagatcatggctagagatagagaaggaaatatagattttgaaatgaatagcatatcactttaatggaagatttgagaatgaaagcaatcactgagggagagagtatagaagaaaaggaacagctaagacagacactggaggaatactggcatttaaggcagagaggagaagaaagaaccacgaatgagctgaagaaagaagcacagaaatgtagtttacagataccaaaggaagaaagtgtttttcagaaggccagccttgtataatgctgcatttcatgatagtggtcagaaggagtttgtgttcagaggcaaaagggatattcagagaaggattcagggaggagatagcatatgacctaggccttgaagggtgagttgagatttgaaagatgaagctgaggagaaaagatagaatacacgtggggaagagacacatggaagcaagtgaatgcagggcctggtaaaaagacagtggcccaggttgttttagcctatggtacagaggagaagatatctaaaccctggagatcttccctcaacctcttcatttagtatggagaaaagcaagtggggattatgttgtggagggcatcccgaccctgacatggaggaaatgagtgtgggaagcacttcaagatgagaagtgtctgaaacagccaagaaaggaaggacttttgaagattaataaataaaaatacttgattttacagttacaaatgtcatactctagaagtggcataagacaaatcaactcgaggtaaaggatttcatctttggcccaataagaccaaaagaaaatgtcactctcattctgagttctcccacaattctcaaagagaaatatgatttagggagttgtagtgcttagaaaagataagggtagaaagaaagaaatattctgaaccaataataatatgtcattataaagtagagaaatattcatgattctgacagcagagaaagaagccatattctgcttcctccttagtcccctcttttctctaattgacctggatgcctatacttgaggattcagaactcatggtcagtttgctgagcactcaaagttggagaaagaccctctgcctcactacaagcaaagaacaaccttgttcttacagcacagattaggtaatgagtttatgtagttatgttcagccttgagtattttgcaagtattgccctgatacttataatacttaaagtacatggcttattgacactatatacatagcgttagctaaatgttcggctcctctgttttccttcgtgacaggagcacccagtggtgctgacaaaatttgttgaaggggcccgagaagtagaaatggacgctgttggcaaagatggaagggtaagtgctttattctcatctccttcattcctgccttctcatcatttttttctttaacaattttgaaatattgacaggttagaattcataatatctataaaacaggtctccagtaatagtggagaagctgtaaaaaaaatcaaattctctgacaattcagttgatgtgtcatgggtatcatatttcctatgtttcatactgttagaatttctctgatgatattcaaaagtaattatcatcctgtactcatcattccttttgaatagattttctctctcattttcttttgtctgtgtctttccttttatgtttcaatggctattatgaaaacatctaatacttttctttctgaagttcccaatcgaatcctggtttttcttctttcttcatttcccatcctcctccctttttattgggttaataaaggcaaagtcaaacagagtaaagtggataaggataataatattaaattggcttaccatatcacatcttgtatttctaatacaatgaatacctccaacttcaaggagaaatgaaaatgtgaagaatattttactttagttttatagttgtattaataatgcatttgtgacttctcttaaaatgtagtaagttatgttgtagggagtctatgccattttacttgctttaaggaaaaatacaaacttagcattcatcttctgctttgcaaatacttcaaaacactactgaagatgttaaatctttttctctttttccttccagattagcatttcagagtagatcttgttaataaaaatggtaatggtatctacttacaacagaatcacataatcttgagttgaaacacctttagagataatttattccagccctccaccctccaagtcagatattttctttacagcatccctggaaggtggtcatctgttttcttttaaacactttggtgatacaaagctcaacacattgtaagattatatattgtggtcacttttttttgacatctcaggtattctttatcttgaactaaggtctgtttccttggaagtcttatccctgattttctgagtttcagagcaaaaacttaatctatttccttttcaacatcttaagtatttgaaggttgagatataaaataagaggaacgtgatacctatatatggaagtggagaatgtaagactggcctagagacatttgtactttttcaaatactgtactggtaaaataatgctggtttgttggctttatttggctctaggtttgccagcatatgtgctttccctaaggttttctcagatatcaactattgcacatcgtcctgtactccctcttttggaaatgttccaggttattcacatagtttttaaattgccatgttaagaaatggacatagaactgcaggttgctgagctcagtggggtggggtgcctgagctcagtggggtgaatgcctccccttttccagacacttcaccaaaaaatgagctcttattattttataaataagctcttgtaaaaaatgagctcttacttatatgtggtctgttttatccttacaaacattctatgagcaggtaccattgttattcttatcttatcagaaaccaagactaagtaagtaaagcactttgcccaggtcacagaacagaaggatggaaactcaaatgtcactgttttaagacgttgctaaatctgataagcaaatctcttatgtaatttatttaagtcttttatacctacccaattattctcccttactctcagctgcatcatttcccaaggacacacatattattaacatataggttatagtgattgagaccacagactttggaatctgacagataatattcaaaatcctaactcagtcacataccagtcacctgaacctgggttatttattattacattacttttatttccttacttctaaaaaaggactagaatatttttcctttcgactccttcctctttcaaacttccatttaatgatctcttgatgagatctttgagacttatttttggtccacctaagttataccatttacctagatagatattgagctctcccaccttcttttctttcccagtgcctaaaagataaagatattttaagtgcttttcaaatgctttagcttcctatcctgttcttaaaagtcaatatgaattggtttagttttactcttttcctattacttatacccatgctaatcagtggatgagggaggtaggctctcagccactcttagctgcctctacaggaaatctgttactgcacagagaggcagcattttctactgctctcatcaggaatgtagcaagggaactacttagtgctcagtgcatctgttaggaccaaaggggaggatgagggagtagcttccttgaaggaagtacctgaaaactttttctaaaatcctttttttttttttttggccaggttatctctcatgccatctctgaacatgttgaagatgcaggtgtccactcgggagatgccactctgatgctgcccacacaaaccatcagccaaggggccattgaaaaggtcatcatttataaataaaagtggaagggaaaaggcaacactcagaaaaaaacacctaaggttttttttttttttttaaagctaggtagcaatgtaagatatgctgcaggttaaatttaatgatgaggctaacttccttgctctgagtcacctgggtattctaaagataacaattttcttcactgtccttttgagcccctttggttgtatgcgagtacaggggttctcaaacttgaatgtgcatcacagacacctggagagcttgttaaacacattgctggactccatcccccagtttctgatttcatatttctggatcgggctccagaatttgcgtttttcacaagtcctaaggtgatgctattgctgctagtctggggatggcagttagagaactgctactcctggggattctaatgtttcagggccacacacaggtgagcggcatctgaagcaatgcttctcagttaggagtggtgaaacaggtgtggaccagtcacttgagaactttctggaatctatgctttcccttctcacccttgacttcacctccaaacagcactttttgatatctcttttgagctccgagagccagccgtataaagaacttaacaaaaataatgactctgccttagtactcaatatgcactgctaggtgtacatttagaacctatcatctttttttttttttttttggagacggagtctcgctctttcacccgggtgggactgcagtggcgcgatctcggctgactgcaagctccgccttccgggttcacgccattctcctgcctcagcctcccgagtagctgggactacaggcacccgccactgcgcccagctaatgttttgtatttttagtagagacggggtttcaccatgttagccaggatggtctcgatcctgacgtcgtgatccgcccgcctcggcctcccaaagtgctgggattgcaggcgtgagccaccgcgcccagccgaacctatcatcttaaataagctttgaggaggtcccattagtctttaggtatattagatcaggctcaggctcagctctttttagtgagcttttccagtgaccctgccatcagaattcaggcagacctgtctctctggttgtacattgggctggattctgaaggtctttgttctagaaggtagaggtagcaggatactttgtaatagcagaagcattaaagaaaaaagtccttggatctcaaatgtacttcagtttctcatgtcaggataaatgatcctcagaactcaggattttccaaatctctcagagctcaatgtgtcatagactctacttcgttttatacccaattacattgctgaaccactcttgtgagcataatgagtgaggagctcttgctctttgtaatcaatgccccctcttggtatagggacattctggctctggttgaatacagggattcctgtatgtgacatgcagggcttccctgcagggaaacactgtttccttctgaacataatatctaaccttgtagagtccagggcaacagaaaagcaacacaaaagaaatctctctggtttctttgcagtaccatgtaatttcagggcctgtacctcccagcaggtaggtcattacattgatatagaggttggactgcagtttctggtgctaaggcaactagactgaaaggatttcatttaaccctcaatgtaaaaccaggttatataattgtaggtagataggggaatttggcagagagataatcgtgtacaattatttgttcttttcctattattttgtgtgtatttattgcatattattttgttaatagaaacctaatagtgccctccattataattattaatgtagatatatagctgtctgtgaagagaaattaaagacatccaaatttaaggtactgtgccttttagaaagttttcaaaaactaagatatgctctttagcacactatacgattatgctttttaattcaggtgaaggatgctacccggaagattgcaaaggcttttgccatctctggtccattcaacgtccaatttcttgtcaaaggaaatgatgtcttggtaagaaatgccaaggtgcctgagaggacaccaccactgtgttacgtcatgttggtttgcatctctctggtaatcttctctgtgaacaccagacaaagagcaactgagacccctggatctgtttgtgtctgagtgtggaatgatgcatagcatataatgtctaccttatttgaaggcccaggctattggtggcactgataagtcagttacagctttgtaaagcacactgatccactgggaaggtcactgtatgccacctacagtatagtatagatggatacggtgagacagactatcataaataaatggaatgtgtagagtagtcataaattctgtgtactgaaattctgctttactccttacccagagacgataccatttgcaaaaatgataaatgaactagattagtcctaattaatttagtctacttagtttaactaatcggtaactgccttagtctgttttgtgttgctataacagaatacttgagtctgggtaacttgtagagaaaaggggtttacttggcttatgattctggtggctagatagtctaagattggaaagctgaatctggtaagggtctcaggctgcttccattcatggtggagagtggcaagggagtgggcaggtgcagaggaatcagatggtgagagagaaagtaggggagagaaactgaagaaaccagactttttaacagcccactgttgtgggaattaatttactcctaccagactctgattatcctttttaatttaggtgaaggatgctaccccaacaggatagcattaatttattcatgaaaaatccacccctcggacccaaacacctcccactagtctccagcttccatcatggccacactggggaccaaatttcaacatgagttttgatggggacaaaccacatccagaccatagtagtaaccagcattgatttacctcctactcgcagtcatttggtggctgcaaaaatgtattaagcaagcctctgctctcaaaaaatactgtaatttagtgaaggttgggaagaaggtaaatttgtagaaaactataaagtagagtatcacagttgctagaggggatgtacaaataaaatggtattggaattatagagcagagagaacgtatttgccagtgtgtgtgcatgagcatgtatttgagcatcctatgcttggttaggggtagatcataaaagacttcaaggtagattttgtattgtgaactggatctcgcaaaacggttggaattttgacaagttaacgatggtagagagattattacacatagatagaacatcatctgtaaaggtgagaaaagagcatatttggagagagtaaatagttcagttgagtgagatgattttactgagtaaaatgggtgaactgggaaagtaagattgaggccaggagggtagtataagataaagacagtgaggtctccaatgaagcaagaggacagaaggccttcagggactagactttaatctgaagccagtggacatccagtgaaggttttcaggaggggtatggcattatttgagctctgcattaaactaaacctgtcagcagtgcatgggaatgcaatttggaaaaaggcatgaaagaaagttagagttcaaagatactgactgaaagtatcaggaaaaatccaagcagtaaggagaaaagagacaagattagcaaaacaagagctggtccccagttaataacagctggaaaccagtggtagagagaatattaatattgttgttactggctctcaatgtcctctttctcattttgaattttatctcttcaggtgattgagtgtaacttgagagcttctcgatccttcccctttgtttccaagactcttggggttgacttcattgatgtggccaccaaggtgatgattggagagaatgttgatgagaaacatcttccaacattggaccatcccataattcctgctgactatgttgcaattaaggtaacattttcaaaaatttattagtcattttatgagttctagtgaaattaaaagaacaatttgtcatcaaaaatcttgttacttttaaaaccttctaactaaagggttggactagggatttacatttcctttcaataatgtactgcagttgtactataggcaactttatgtgaactgttgtacatttcaaaaaaatttttaaaaccatctagaattgtataacttcaaaatcaattagctgagtgaattataagctttttgtgcagctgacacatgatggtgctagtttagctggtaaatagaaatccaggacacaccttgttaggataaagcttgaattgtgccaactcttacatgacttttgtaaaaagggttagcctgtggggttgattaaattcctaccacattgaccacctttgcttagtatatattttcttcagtggcatgatttttccatttgaaaaattgagacagctgttgctgtatatggtgctgtgcggttgttgaaattgatgacacctttataaagagtgaccaggaaaatttaaagtttgttcactaatttccaatacatatgtatattttaaataataccttaataataaagccattgtgatctcctagctgcatcagtatgatggtgcacagaattatgacctttaactacttggctggacaggcatgaggattagtgatatataaacgtatttgaattacgtagatgaagagcacaatgaaattaatatatttatgtaacattaatattgatatatttatgtaaaattgacaaatttctgatgttttcaaaaggtttccgttcctatatgtactagtgacttcaaccataattgtgttacagctcagacttggacttttgacttttatgatgggaactttaagttgaagttgtgaattaaaaatcttgtttaagctgataatgtaggatgccttgaattttatagtgcattgagatggaatgtgactttttatgttgggaggagaggtggcattttattcatggagactgtgacaaacatatattgttaaatcttttagtagaaaaatagagaaattttttttgagaccaacgattagtagccactgaaaaatatttttttccactggagattctatatatggattttaagttcatgtttctttattcatagttataggagtatgcttatttcttttagtaaattgatatatgaatttttaactaaaaataatattgatggatagatatgcttttttttttttttttttttgagacggagtcttgctctgtcaccctggctggagtgcagtgccatgatctcagctcactgcaacctctgccttccgggttcaagcaattctccccctcagccccccaagtagcccccaggtagctgggattataagcacatgccaccacgcccagctaatttttgcatttttagtagagatggggttttgccatgttggcaaagttggtcttaaactcctgacctcaggtgatccacctgcctcggcctcccaaagtgctgggattacaggtagatatgcattttttaaatgcactgtatcttctagcttactcattccctagttagctttgtatataaatcttagtttttttcaaattacttagtaattgtcaatcttaatagccctagtgaggctaattggtatcaacagatggggaaatagggaagctgaaatgcagaaatatgtaacttgaccaagatgatccagtgaaatgactcccaagctagaattcccatcataatttagaatgggtgccagaatcaatggagcaattgataaaattcctccatgtaccagataagtggacacatagcgagaaacaagaacttagtttttcatgaattgcatcagtaaaataaatgaaaaggaggcactcctatactctagttcatatgaaagttctgcacaaaggtgtttccaagcagaatgtttttcaaagcttttaagaggtgtcaacaacagtttaatgcctcagaaactggcttacagacagccatttctggcaaggtggcttgttgcaagttcaaatgatcagaacaagaagaggaatgtttccaaagcctatcaaagagaaaaaaatgtgtttgaactctgtctggagagaccaatgcccagtggactttgaaatcattccaataggaatatgcatgggccagattagaaacactggtccagactggtctcaggcgccctatttacagaattaatttgtgattatttaacctaaagttttggccaagagctcaagaaattcttggaatggagttttaaagccatctttcaagtcggatgcttggacccaagagattttttacatgtctactgtagcctaagtgaactctgtgagagatgatttgctaatatatttatcctctcttattcattttctacttttccctcacataatttttctccctgttttttttttttccaacaggctcccatgttttcctggccccggttgagggatgctgaccccattctgagatgtgagatggcttccactggagaggtaactagttaataatccatggaagctttcattaaatctactttgaaatctatggttttatgatttgaatacagtaaaataaagggaataaaaacatctgctatcagagtaagactcaaagagcttatgaattttgaatttaaaaaatattttacttctattttgaatagggtctaaattcttatttatattttaacatgggaatataatacatgtgttactaattcattttcacatgagaacatcttccaggtatttatctagacatccaagtaaatatcttctgtgtcttactttttatttaaaggttctcgggtctctctgtaacaacacctcattccctgccttgctgccatgaaattagatcatttgatttttactagtaatatggagaatgacagcattataaagatcatagacctaaacattgtggaatctgcagatacatgcaaaattttaggactacttttaacctcctggggattatctaaaaactataatggaatcggccactggatgtccctcttcacttgtgttggggctgtgtcagctgaaggtttctttaggattgtgaaatgtgtttcttgtaaagagctgtcagattctagaaagttctctccatgtcagtgtcaggacattttatgaatcacctagcccttgacagacttactagatacaaacttcagattctcatcagtgcatatccgagtggcaatatcagactgtgagccatcattgtttcctcttggtattaaggaaaacctaaaaggataaaatacttaattgcaacaaagtacgtgatgttttatatggttgcctggttacaagcaagatctgtgatgagaagccaagtgagacaagaaggcaggcagtcaggaataaatggctgtcctgtttgtatttggactcttagaaaggggactctttgcctctttgttgcttcttttaatttaagggcaaaaaaaaccttacttttaaatgaaggcactatgtacgtttcatctccagtcggtttaaggagacagtcttcaggttcttcttgatcccatggtcgctactactagtaatgctgattttagatggcccagggttcagatcagagagagatctattttccttcatactgttttatttttctttcttccttttttttttgaaacggagttttgctcgctcttgttgcccaggctggagtgcaacggcatgatctcagctcattgcagcctccacttcctgggttcaagcgattctcctgcctcaacctcctgagtagctgggattacaagcatgcaccaccacgcccggctaattttgtatttttagtagagatggcgtttctccatgtgggtcaggctggtctcgaactcctgacctcaggtgatccgcccgctacagacatgagccaccgcagccggcccatgctgttttctttagcatggcaaatttgttttcagtggttatgttcattctgcatccatacatatgttatgggagttattgaaatataaaaataagaaagaatgagaaattcagctcccctttgttatatctgtttctcaagtataaagagaatttttcttccattatttgaaagagtcgttaattccaagtgtcatacagtataatattacgaggtctgttttattactgacatcagaattctagcttagtaaaatcttaattatgcttcaaagagacattttcagtgtccaaatggcttgttgtaggattaaataaacattcagctactgatataagtaaggggcattttatgttcctagtggtaaagtggggatattagtcctaatctttaatggcacatttaactactttctatggttctgtagaaaatttttaaaacctcgtctgtgttgttgcatctgcactatgatgggattacccaattcttttcaatagaatttgagactcattaacttaggttgaccttatttaagttagttgcccagtacttgactgagtaaaatgttcactgtggagagaaaagcagcaaccacatgtactggtgaccagctgaaggttatagtcataagaacttttcttgcacagaaattgtaatttgcttaagaaatgaatttagccatcagtggttttttttttcttttttttcttttttattattattatactttaagttttagggtacatgtgcacaatgtgcaggttagttacatatgtatacatgtgccatgctggtgtgctgcagccattaactcatcatttagcattaggtatatctcctaatgctatccctcccccctccccccactccacaacagtccccagagtgtgatattccccttcctgtgtccatgtgttcccattgttcaattcccacctatgagtgagaacatgcggtgtttggttttttgtccttgcaatagtttactgagaatgacgatttccaatatcatccatgtccctacaaaggacatgaactcatcattttttatggctgcatagtattccatggtatatatgtgccacattttcttaatccagtctatcattgttggacatttgggttggttccaagtctttgctattgtgaatagtgccgtaataaacatacgtgtgcatgtgtctttatagcagcatgatttatagtcctttgggtatatacccagtaatgggatggctgggtcaaatggtatttctagttctagatccctgaggaatggccacactgacttccacaatggttgaactagtttacagtcccaccaacagtgtcaaagtgttcctatttctccacatcctctccagcacctgttgtttcctgactttttaatgattgccattctaactggtgtgagatggtatctcattgtggtttagatttgcatttctctgatggccagtgatgatgagcattttttcatgtgtcttttggctgcataaatgtcttcttttgagaagtgtctgttcatatcctttgctcactttttgatggggttgtttgtttttttcttgtaaatttgtttgagttcattgtagattctggatattagccctttgtcagatgagtaggttgtgaaaattttctcccattttgtaggttgcctgttcactctgatggtagtttcttttgctgtgcagaagctctttagtttaattagatcccatttgtcaattttggcttttgttgccattgcttttggtgttttggacatgaagtccttgcccatgcctatgtcctgaatggtaatgcctaggttttcttctagggtttttatggttttaggtctaacgtttaagtctttaatccatcttgaattaatttttgtataaggtgtaaggaagggatccagttgcagctttctacgtatggttagccagttttcccagcaccatttattaaatagggaatcctttccccattgcttgtttttctcaggtttgtcaaagatcagatagttgtagatatgcggcgttatttctgagggctctgttccgttctattgatctatatctctgttttggtaccagtaccacgctgttttggttactgtagtcttatagtgtagtttgaagtcaggtagggtgatgcctccagctttgttcttttgacttaggattgacttggcaatgcgggctcttttttggttccatatgaactttaaagtagttttttccaattctgtgaagaaaatcactggtagcttgatggggatggcattgaatctataaattaccttgggcagtatggccattttcacaatattgattcttcctacccatgagcatggaatgttcttccatttgcttgtatcctcttttatttcattgagctgtggtttgtagttctccttgaagaggtccttcatgtcccttgtaagttggattcctaagtattttattctctttgaagcaattgtgaatgggagttccctcatgatttggctctctgtttgtctgttattgctgtataagaatgcttgtgatttttgtacattgattttgtatcctgagactttgctgaagttgcttatcagcttaaggagattttgggctgagacagtggggttttctagatatacaatcatgtcgtctgcaaacagggacaatttgacttcctcttttcctaactgaatactctttatttccttctcctgcctaattgccctgtatttactctaatggtggttctgtacctgtgccaaatgatgatatacatggcagaattgactcctatcaggttcaaatataccacttgttctataattatgttggctatttgacttgtagttatattgtagcacaattaccgtaaacctaaatggaacttctgtatactctaacattactatatatgttagtttgtttggaattgttttttccccatatggctgtggtattcaggactagtagcaggatattttgtttcactttatgaaaatgatgtttttaaaaaacaggttcctttgaggttttcatggagttattaaatttctcagaaggctgtctcataagctctatgaaatggctccaaaccaattcagcagttacgcatttctgctactgaccggtaaattcatgcacggctgcatagtatatatgacacatactgttatttaaacagtaagtcatattaacattcggaaacttaccacattatggaccagaagctgtgatttgtatccaaataactctcagtagaatccagttatgttgctccattgagtgttgttggatagaaaaagaattgcttattcattcattatgcttaattaaaaacataagatacatctgccctggccagccttttaatccctggattcagattgcacaggctttgggcaacattaataaaatctacagaaggagtctatgagtaaagtactttccatttgtgcgtgcatgtgtgtgtgtgtgtgtgtgtgtgtgtgtattttaattttaatttttggtaggagtggttgactattctttgcatcctctattttaattttttatttatttctaaacaggtggcttgctttggtgaaggtattcatacagccttcctaaaggcaatgctttccacaggatttaagataccccagaaaggcatcctgataggcatccaggtaagtggtttgtggctgtgtgcttgcccatggtcatacatggtgagtggggaggggcaggatagaatgttaattgtggtatagaggaagggagatttgttttacgtttccgtttatggcaacttccaggaagaagggacatttgttctctatttgcttcctgattttgccttctgttgtatcagcccgtgcaaaaataaaatacagacagaaagaaaatgtttctagtgaagggatatttgttctaaatgggatgcagggtactttaaaaaatgaatctcttattctttggttttgtcttttctatatgttttactcttagctctccatccttagttcctgaacataggcattatatgaggttggatctcacttcctctgtttctcttgatatttctctgtctcttgattttcccccttgccaattcatccatgtctatagtacctactcttctatctatagctaccacctgtaaatttacatcctcagccatcccatatttccaacaatctgctggatacctccacttgaatatctcaaatccaacgtttctcaaactgaagtcatatctgttctctcctgaccatctccccttccttcctttcattcattcagtccttcacatttcaatcacttctaaatgccaaggattcaaagttgaatacattgatgttatttgattaaatttctcaacttaacactccagattgaaagtttttgaagggtagtgacttaatgggcctaatacagtcagtttatttcatagtatactgtagaagttcttgaaatattattcattggtaagccttctaggtcaaagtagggtgaaatgaatatctttatgcaataaaaaatgcactgtcaatttattgatgtaagttaaatataaatcttagggcaaaatgataggaaacttctattactatttggaatgctttttattactattcagaactacttttattactattactaattgcaagagtgtacaaactgtcctgtttataaatttcctgaaaaaatactagaggcttcccaactggtcattcatttttatttgagattagtaattcttgggtcctatgaaaaacaacaaatggtcttatataatatccctgctgtgcttttaataagctcaaactctgcatggctacataaaaatcaataaaaatataattagaacagtaccaggtattctcaagccagtgggtgattattttagattccatctcattagggtgtcttaatattagcaaattagactctggagactttacaggtagtggctttggagaagtttctgcaaagagtaacttgggattttgctttataaaggtaccagaaggacgacggtgaatagttagagcagaggctaacaagatgacttgcaattgtgaagcttaatggcagtttagagacaaatcacaccatatgatagactcatcatgttataaatgggtattaagtattattaagtcccaagtaggagaatatttgcccaacttccagttatggcttaaagtttaatgtgagacttgggggcattcagaggagaccatgcccttagtccacatcttcacatctaatcataatagtgctaacattttaaaatgccactttaagaaggcagtgatgtataaaattgtgccttgtttggttctagtgctgcagggaaatgtgaagcaaaaattaatttgatccctatgaagtatttgcgtaattttggcattagtggacagaattttgctttgtaggggaaaaaagggtttgttagaaaaaataatgttttcttaaagtagtgagagctggctattgaaaatctacctttcaatactttccttttaaaagaaataaatgttctagcagctacatgagttgttgcgaagaactttctgcacatgagagcatacggacacagatttaaaaatatattaaaaagtacttaaaggaacttaataaaattatacttaagaaaatatttacagccatggcaaaattgatcagctaatgcatagtttcttcattactatatgtaggattttcattcatggtgtttttaaaaatgcttagtctgataaactgaaaaagcgtgacagaatatactaaatggagagttaatagctataaaacttacttgactacttcttagttagtatggggccaaatctaatctcaactttttaccacagcttcatagcaattgcagataaagtaattagggttccatattttaggatacattgtacttttaaaaaacattttatttaacgtgatcctacttggtcagaagaactcatataaacacttttggatatattaagttagaactgaaaaatagcacaaaaaagactgctaatatataaatgggggttagggatagtaaatccaatggaaggcatctagttgaaggtgagttattatgaagttccaagagaacttgttatatggcagtctttctaacttttaaatttcttctctctttcccaccctactcctttacacatacagactctctgtttctggtcttccaaagttaaatccaataggtcaaagtatctgggaagtttgaaatattcataacatcaatcttataactaggacttaggataaaagaatcaagatgtagattttgtcaaaggattcttctcaatctattacattccctgtgtctctaccaaggcatttctaacataagaaaggcataacacaggtttatatggcaacaaaaatcatctttgattttcctgtaatatttctagccacctttcatcgcattaggatttatttttagttgctgtgagtaggcaatctgccttgttttgaagttttctggaagaccctttaacattaaatgatttactctagagtagatcaagagcactcactgtgttttcctctctgattgggctattcagtgatgcttgtggagtggcaagtaccaatctgacatctgcgcttcagcatcgctcagaaacacaaagcaagcattttatttgaaaagacaactccaagtgacatgaataaccttttatctttaatatggaatcattaggaacaaccatagagttgtcaatccagaggtccccgtagaatccacaggcatcacatagtattaacttggctttcttttctgtagccaggagttggataaatgtgaaaatgatcattggaggaaatatatatatttttcacttttaaaggactgtcttctttataaacatttccaagaaaataaatcagcttgtacttttcacctttcgtaacaaatggtttcttacacaggtattttcaatcagcttttaaatctgaggctactcagatgcaagctgacagctgtaatttctttttgtagagaggctgttttatgtgtcacaagtgttcaatacatgtttgatagaagtttataatgtgcctatggaagccaacacccagaccagaaggtagagtggtttcctggctgggaactgtcgatactgtcatgttggatatttatcttttccacctgggggacaacactgaaacagctccataatgaggttctgcctggtgtctgcaggtcttagaggacttgctgacttattttactttaaaatggcaaagaaaaaaattacattctagtactcctcccttaatgtttttcgtggtgattttagccaaggttaatgcaatcttgacttcatattacacaatgagtgaacgatagtcttcctatcccctattcccccctttctcaagcttaagtatgcatcaaaatcacctggagggtttgtaaaacaacaaattgctaggatccactcccagagttcctgattcaatagatctggggtggggttcaaattttcatatttttaataaattcccaggtaatgctgatgctgctctgccagggaccacagtttgagaaccactctacttgagcgatggtactttagaaacctggttaaaagttatgttagcacttattattgtcaaacatattatcagggaatttttgctaggggaaagtataaaagattgaggaaagttgagtgcatgattaatgtatcaattagcaagtgttggagatcattatgctgagccttctaatgtgatttggtacttactgaagtctattctgtgtttagcagagggtcacaatgtaatgttccatattaggggtatttaacaacatttggaagttcattttggacatttcatatatatttgttatataccaaggaatcttaaaacatgaaaaaaaatttatatgccatcaaatttagccctttgccttttctgaggagaatgaaacttgaattgtcttattcttctgtctaaccaattgtcctgatgtcactaagagttattctctaattttttacttgtttttttcttttacgtctaaccatgagcttcttgcatctaagctcatttctttctgtttggtcctaagtggaaatgaaaagctactttcctgggcatggttaaaattcatgttctataaggcagtcatgaataaccactgagcctgcctcagctgaaattcatccagttacatttatctattctatttaccaatagtttcctcttataaaactgcagttctgggattgagggggccagaatctgaaagaattttatatttgaacatagtctttggggtcttttcttaggatttagatctgtgctcagaaatactctgcaagtaaatattagggggtgttatgggctaaacattatcaaaattgtgcaaggatcacatgtgttttattgtcacagttcctagtttctgactctgaaataagatcatttgattttttccagccatcactaatatggtttataaacaggttacaagacatttgctgaagtaactagctcatgtcatctgtttaaaacctttttacaagggaaaccaacaagaatgttcctatttaaagaagaatggatatgtttttaacagtgtgtgattttaaatacgccagctcagttactcagacactcatgttaatgaagtcaaggtcagggtttgatctttgggtaggtcacctagtgttgttttctttcattctgaccactatcttgcaaacactagctcttgatcacaggaagtatgttcagaaatagggaactcctgatggcaatggtcaggaatccagggaaggtaggggctggacactagacaggtccacctggggtcctaggaaagacacagcaatggactacaggaaaatatctgaacagtgagatggagcattagggaagcctgtgtggaaatgaaatgcgtataaatgagggggcagtcagtttgggttgtaagtgtaatcgtgggtagaggaacccatgcttggaaactaggatgtaagggcaggaatctagtttttaggggggctgaaaaaacaattattgtaattataataatatttattaagaactattaataggcaagtaactgtgctaaattatagtagtaacacttaagtagtgcttacttctaaattagtttattgaacactcatactaatgtaagaactgttactattcctgttcaacagatgaggaaactgcatcttagagttgttaagtaagatattcaaggtaacacagtttaataaggtgtggagcctcaaaaaaaaaagttgaaatactactattgtcatcactgtttttgagtgaagaaatgaaggcaaagacattaactttttgaagctcataccactagtgaatggtgaaagccaggatttgaaatgcagctaactgactttagagctcattctttagctacaactttttattgcctcagagtaaatgaaaaaagagttccaaagattgagttattgcagggactagtgcataagctactaggaaaatggcctagttattgaagagcagtacaaaattagaacttagaaataagagcaagttgagcctgggtgcagtggctcatgcctgtaatcccagcactttgggaggccgaggtgggtggatcacctgaggtcgggagtttgagaccagcctgaccaacatggagaaaccctgtctctactaaaaatacaaaattagctgggcatggtggtggatgcctgtaatcccagctactcgggaggctgaggcaggagaatcgcttgaacccagaaggcattgcagtgagccaagatcgtgccattgcactccagcctgggcaacaagagcaaaaaaccccatctcaaaaaaaaaaaccaaaaaaaaaaaaaagaaataagagcaggttgaataggcaaaacagctagcctgactcggtactggctcctaacccgcatatcttttaagtcctccctgaccaggaaaaggatccttgtagaaccgaagtggatctgaacttacaaagaccaagtagattaaatagagaataaaaggagataagaacaaggtgaaaagcagggatcaagattatgtggatggaatttcattgacattgggatatagctaaaactcacactcaccatagaaggataaaaggataaaacttgtcattttttaatataaagcatccggcaacatgtaacattgtcttttaagatgttgtaaggaaataccatattgcataaatgaagagcatgtatatctagaaagtgaattttgtgaaattccttttcagcaatcattccggccaagattccttggtgtggctgaacaattacacaatgaaggtttcaaggtatgttcattagttttaagttgttttctgtcagcatggaatctgtccacaaatcaaaatattgcagaatattggaaaagaaatagcccaaaatatgtccttttgatatgaaaggtttaactaacttggtagtttcaaaacttagagtcaaatcattaaaaagactggtattaacttttaacaaaattaccacaaattcaatagaagttgccagctaaaaactgagaaagtttagcttaagcacaattgagacaaagtcccaacacatttccatatgtttttcctttttttgttttcatatgaggttatagattctagctgtgacagttacaggcaaaacttctttgcagtgaatacctccacacaaagcctggttgagtaaaacaaaattattcccaaggcttatgatgggcctgtggccatggggattttttgacctgctaacaaggaattagccatgaataattgagaaattattaaatttatgagaaattgtcattgaattattaaattcaaattaaacatataattattaaaatggaaatgcaaataaaattgaggttcttaagttttttaaatcactgcaaatatataaaaaatgtttaaagtgcccatgcctctggactgtgagtccaagtctctatccatggcactatactacttctcatgttcagcaatttcttcttctttatgttttaaattacatgttccataaaaataagaaatcactgtgatacggtaattgattttttcattttaaatgcagctgtttgccacggaagccacatcagactggctcaacgccaacaatgtccctgccaccccagtggcatggccgtctcaagaaggacagaatcccagcctctcttccatcagaaagtaagaactaggcatactgttttctgaaataatttagaggattaactttgagaaccagtatatgaatatttcaccttacttgattgcaagtcttttaaaacaaatttaaaaatgaatacatttgtggatgattgtcaagtttcactctccatcactatggaatacataacgtcatgtgtacatggtgatatgaaacgtgtttcaaaatacttcttagtaaggatactttccttgacggaaacaagtgagagcatgaagaatgtaatgcagcactttatatttcatgtcaaacttatattgtgtatagataagtacatcgagtataagatgaccagctatatttcactaaggttgtgcataataaatcaatttgttgagcacttactacatacaggaacctatgttgagtactatgatgatgtcatccattggattacctaattggtcattccttgaccaggttttcatgccttagaccatgtcatcattagattttgtacgacattttatttcagcagattgtgtgaatcttcaggaataccattgcatcaacccttaaagatctatgtggcataagtacataggagataattctctgctgttttaagatagtgcagcctacagaatggctgtgccattctatgcaatatgttatttgttagcgttcttgagaaaccaacacataaattattatcactttaataaaataatggcattgtgttcaaaccttagcaggcctccaaggatgtaatagctccgtgtttggggcattgtaaaacaataattagcactactaaggaggcaatagagttaatgtgggagtgggaacatgggggtgaaagggcattcaatggtggagggatcacctctttttaaaaaataagtatctatcaaattaccaattcttaatgagtgaacagatagcattttaaagagaaaacaaacatctgcattccattagacttgcactagaattccttcaagaacacaatataatccctatataagtgtaatttaaacatctacttagcaatagaggagggcagatggcagtcaactcagcatggcattgacttgaatggctaagagagcaatttatgttagtattttataaactaactataaaatatgccttgttgtctataagtttttgtttatttttccagattgattagagatggcagcattgacctagtgattaaccttcccaacaacaacactaaatttgtccatgataattatgtgattcggaggacagctgttgatagtggaatccctctcctcactaattttcaggtatagtcttttccttggatatagactggatgggagttttatttctgtgcctcccttaagagtgtaatcagtagatgcacatctctcttttcccctctttgtaactttcagaatagagaggaatttttaataatctaaaataatgatgctaacatggtaggtcatggcttaaatgggacagttggtgatcaagcaattgagataatcaaaggccatgaatggccatggctctctccttacaattatcctttgaataaaaagtgacagcatgacatggaataaagatacaaacttttatttcattgtttctaaatgaaagccaccatataaaagcaacaggttaatgatggtccagatgtagcacaagtgcttgttcaattcacagaaaatgattgcatgaggcatgttcagtttcacttggacatgacccatcgaatttatcacagggagaaacagagtggagactcattaactttctgcctatcatatttattttttatgcagaatcagttttaatccctatgggaggagaaataagcgtattcacagtgacatctgagatataaaagaaagtccccatggtgaggtctgagacatgggagaaagtctccattacataaaaaacttttatgccttttatcccatacccctttgaaaactggggacagacacttgtgacttttgtcttcattcattaaaaattcacttttatctcatggagggtgctgattcctaccattatattttcaggtgaccaaactttttgctgaagctgtgcagaaatctcgcaaggtggactccaagagtcttttccactacaggcagtacagtgctggaaaagcagcatagagatgcagacaccccagccccattattaaatcaacctgagccacatgttatctaaaggaactgattcacaactttctcagagatgaatattgataactaaacttcatttcagtttactttgttatgccttaatattctgtgtcttttgcaattaaattgtcagtcacttcttcaaaaccttacagtccttcctaagttactcttcatgagatttcatccatttactaatactgtatttttggtggactaggcttgcctatgtgcttatgtgtagctttttactttttatggtgctgattaatggtgatcaaggtaggaaaagttgctgttctattttctgaactctttctatactttaagatactctatttttaaaacactatctgcaaactcaggacactttaacagggcagaatactctaaaaacttgataaaattaaatatagatttaatttatgaaccttccatcatgatgtttgtgtattgcttctttttggatcctcattctcacccatttggctaatccaggaatattgttatcccttcccattatattgaagttgagaaatgtgacagaggcatttagagtatggacttttcttttctttttctttttctttttttctttttgagatggagtcacactctccaggctggagtgcagtggcacaatctcggctcactgcaatttccgtctcccaagttcaagcgattctcctgctttagactatggatttctttaaggaatactggtttgcagttttgttttctggactatatcagcagatggtagacagtgtttatgtagatgtgttgttgtttttatcattggattttaacttggcccgagtgaaataatcagatttttgtcattcacactctcccccagttttggaataacttggaagtaaggttcattcccttaagacgatggattctgttgaactatggggtcccacactgcactattaattccacccactgtaagggcaaggacaccattccttctacatataagaaaaaagtctctccccaagggcagcctttgttacttttaaatattttctgttattacaagtgctctaattgtgaacttttaaataaaatactattaagaggtaa

SEQ ID NO: 47 - DNA, 85752 bp, Homo sapiens
  source 1..85752: mol_type = genomic DNA
gccactaagggagaataaacagcagcaggagaaggaggggaagggtgttggaggggagagagggcatgcatgcacatacatagatgattcagacggcttcagaaaagaaccacaaggaatgcttagaggagttttgtatttaatctaaatatttttacttttttgtgtgtgagctcttagttcattgttcaaacccatctttccaaataaattcttctggtgatatccagaaaaatctgaagtctattgtgacttccccacacccaggggcctccagtagcaaatcttcattgtcagaactctcagaaaagacttcgaggtaaaatggggaagagaataagagctttctttctgcaagctctgctctactctctcatgtctgaattgccgttttagatatttatattttgttcttgttttaatattattaggaaatattggttcttaatagccaaaatcagtattatattaccaacccatgatgaaactcataaatcaaatttagttatgtgtatcatctaacacatgctaagtagttttttaatttaaaatttaaattagcatatattagtacttcggattaggaacattgcaattaagatgtaataatatccactgtcacataattctccttttttgtctttccaataattgcaaaatgaatattctttgttgtaatttgtcatatctagtgaaacaacagaagtaaatcctttggcaaagattaagaataatcttcagaaactgttttttagagccgatagaaatttaaatttaaattagtatttctaattttctatatcataagtgatatagcttcaattgttatatccacctagaatttgatttagaagaaacaaatgatatacaatttactaaaaacttggcattctcagaaggtatctgatatgtttactgcttgttggaaacttcttttttataagacttgaagtgaacagaagtgtttatttgattaaattctcacactaacagatatttagttattgacaaaaaagcaaaaaaagctgaaatgctataataaaaattatttgttgcttatctgaagttcaaatttaactgggtatattgtgttttatctggtgaacttaggaattttgaagcttctaactagttggttgtatttttttctagtacctgtttgattcctttttctcactgataaagaaaggaaaagctaccaccattacatcagtcttaccgaagccagcactagttgcatctcgggttgaggtcagtatgtgggcttatttttggtttatgaattttggattgtccctatcacatgaagatttttaaaaactaagtgatgtaaggcatactagtgtttaataaaagatgactggtaatattgtaatagactgtcattttgtaactaattatttggttccttcttgatgatgtctagtggaacttctcatgttttgatttaaaataatgtcttttaaagtttacttcttccagagtatttgtaataacataacaaagaatagtgtttagtttagaatttatttcccattatccaaaaagccatagctctatgtaaacatgagatacatttcagactacagaatcattatagatgatagaattctttttgtttcaactagaataactgttattcaacatcatgtactgagtattattttacctctaaaaagcaaatggacaagaatataacacttaaatccttaatttgaatatgtatgttagtgtgataaagtttttacccatttccttcataaactacacattcatatcattatttaaaatttagaaggatatatgtgtatttgaaaaaataccacacatagatatatttacatatatgtatatatttttggatatttatatatgtttaaataaaatgtaaacctctgccaaaaattttttacttaagagaaaaaccttaataaactttggaagtcacattgaaatcagagatgttttaagttattagtctttttccctatatattacatatttttcattacattagaccttagatgaccacataaactcagacaatgtggtttgtcttctccaatcttgaaaatgccttatttcccccattttagcagtaataacagtgtctttttcttattgcttataggtttccaaagtccttattctaggatcaggaggtctgtccattggtcaggctggagaatttgattactcaggatctcaagctgtaaaagccatgaaggtgagagaatatgatccttactagaattaatatgcttcctttaatgagtctaattagtattttataatttagatttatgacactacctcttttcaaagttgctataattattttccttaactgtgcctttataaatcttgtattaaagaagcttgatcacgagcaagaatttcaactttctgtaatgtgcacatctgtaaattgaggaggttaatctccaaaattatttaggttattgcctccttatagtgaaaacatataaagccacatttatttatgctgtttatttcttttgaggcagtgagtttttcaaatatacttatcttttatgtgaaagagaaattttgggcatctttggtgctttaaagtatttcaagtgctctacaggatgcttcgggcatctctgtggttgaaatgggaaactccagttggagaagcaagggcaacagtacattttgttcaggtgttataaattattatctgtcactgggggacacagttctcccatcagtgcctgggaaacgggatgatatggcaacattttcaagtagaaaaaaagatttgatacacaggtgtggaaggacatccttcctgtttctttaaactctctggagatctcccaacacttactgtagtaaaataaaactttagaaaaattccgttgtatatttaatgtatttctcttgaggagttcagttggtacccctcgttgtgctaatcaggccattcggaggcaatgtgagctcttggtgacattgcctcaggctttgcagtgtaatgccattcaccagagaccaggctagtagagtcagcatagaatggcaacagaagactaggacagcaaacctgggaaaaatagttggccaaaggttttcttatttttctttttgttagtattctatagtcaaagattttcacctgatgggcgtctgttgaagaggtagaacacagtctcaatgactttactctttttcccatttgtttttattttttaatactctcctccattcatgtgcatgcatactcacatattttttggaataaattttcaaaacgatgttttacttctttgtattatgctttaatttctcattagataattggagactgtccagtggtttagattagttagtacacaatctaagtgtgttcagagtttagaatacatttaactgtatacagtttttattctatttgggagttttgcaaataattagaatttctatagttttgtattttaatgtgttttacatcaattgggtaaagttatatagttttaactaaagaacaggaattattagattagattgtgatcacttagaaggttaataactagaggtggatttttaaactaaaaaaataattggtgcatatattgcaacaagaattagaaaaatcagaatgatttaaaattaagattgcaataaggtttaaaataaatgaacactcatcatgtgtatgtataggatcttttcctgtataatttgacttataaaaaatcgccatattcattgtatagaacattcagaaaaatacttaaatatactaaagtttgttggtacttttctttagttgtgaggctttctataacttctgttgctggtatgttctcagttgggactcaattattaaaattcatcacatattataaaagcatttgcttacctgtttgtatcttcctgacattttgttaataatattactcttaaaatcttgagagatgactcgtattgaggaaagagcataggatttgaatcataacatttgaattagagccctaatattgccacttattagctatgtgacctttagcaaaccatttaaccttactgaatctcaatttcttcatccaaaaggttgaaatctctttcatagtcttggtataaaaatcaaatacattactaaaaagtacattacaagcattaagtcactatttgaatttaaagcagcataaaatatatttaatgttttattcagatcctccccaaagatatgtggggttttcaataataatttctatacttttatctgaatattttgttgactttttaggagaatttaaaattgacatgctaatgtatgaaataattagaaccatctggctgtatgttataataattattttgctaagtgtcaccctcatcttggtttataaaacaattatccttagtagcctacataaagaattattttgaaggtctctcccgatgtaaggaatgagatagagctatgaataccttcatatatatacacacacacacaaacatacacacacacatgcatgcatacacatagttttatttcttttaccatatggttttttaaatatgtacaaacagttgtataatgctttttgttaaagcactatagcaagcatgaatctagaaaataaatagaaaccagcagaaggctctcagtgcttccagcaagaagggagcacattattctgcattttaaatgtacattcaatgttcttcttagacaaataaatacaagggggagcagcttttttttttaacttttattttaggtctgggggttaacatgtgaaggataaataagatcctttttgaataagcaaatattgagggaattcattaccaccagactagccttacaaaatatcttgaaaggaacactaagtatagaaagaccactaccagctaatacaaaaatgcacgtagacacacagaccagtgtcactgtaaagtaactacacaaacaaaccaacataataaccagctaatagcacaatggcaggatcaaatccacatatcaatactaaccttgaatataaacaggctaaatgtcccacttaaaaggaatggagtggcaagctggataaaaaagcaaaacccaatggtatgctgtcttcaagatacccatctcacatgtagtgacacccatgcgctcaaaataaagggatagaggaaaatctaccaagcaaatggaaaacagaaaaaaaaaggggatacaatcctaatttcagaaaaaacagatttcaaatgaacgaggatttaaaaacagacaaagaagggcattatgtaatagtaatgggttcaattcaagaagaagatctaactatcctaaatatatatgcacccaacacaggagcacccagtttcataaagcaagttcttagagacctgcaaagagacttagactcccacacaataatagtgggaggtatcaacactccactgatagtattaaacaaatcattgaggcagaaatttaacaaagatattcaggacctaaacttgacattggaccaaatggatctgatagacctttgtaagaactctccaccccaaaacaacagaatatacatttttctcattgccacatgacacatactctaaaattgaccacataattataagcagctttcgtattgcctctagttccattttatatttactaatttaaaatttttggaatatgttattcttttaaggttgattgaactacagggttcagtaatatttgtggctctctagaccaattatatagaaatggtctccagctttgccaacagtggcaaagatcacctcatggcgatcttcatgagacagccaattcttttggatagtttcattttcaagaatttcttcatttctttgaccaaatgcttgtcttcctttaacttccattcactagtcctgttacggatctctacggcccacagataacctaaaagcttagttaccccatgtctttttatttaagtgtggtcattctcttctttagaccatatattcatgtactggattcttttgtttctttcaggaagaaaatgtcaaaactgttctgatgaacccaaacattgcatcagtccagaccaatgaggtgggcttaaagcaagcggatactgtctactttcttcccatcacccctcagtttgtcacagaggtcatcaaggcagaacagccagatgggttaattctgggcatgggtggccagacagctctgaactgtggtgagttcttataagcttaattgcagagttttgacatatgcactgctgtgtaatgtattttatttgagctcatctaacaattgtgctttgtgtgttcataaaacctttcctctactgtgtgagaaagcagttagcaaacagccacttaatatagtcatatgatgaatactactagttaatttcacaaaatagctgatagacaaagaaacctttcactttaatgctccagagtggccagtaggtttcttgcatttctctactctatcgcaggatattgcttttctctgttgctattgaggtcttgagaactattatgaatgaaaaatgagaattaacattggttaagtgctcttaggtatcagccctgcagcaatttcctctcaaacacattttcatgatagcatagatcagtctttctactattacttcatacttctgctgagtctactgctttgttctctttaaaattcttcaaatctttggaactggatcatgaataagagtctctttagctagtttgggtaagcaattggtgatataacttgtatgtcaaaaaaaaaaaaaggactaaggcaaaattaggtggctaggtagtggaaacacaaaccattttgaggataattttttagcccaggtaggtactcatatatttgggattttttaaattatagaatctcattatagaaatggactttaggaggaaagggaatatattgaaatcttaaggctcagtataatactatgacttttattaataaggataaaaatgattttcagaagatggtaatataagtaaaagtagcatcagtaacatattttgtcagaccgtcttcagaatttttatttcaatttttttccctaagtgcaattctattgtagacagtggtaacttctcggattttaagattaaaaaagtagttgtattcagttgtctattaaaaaaggcacaaaattcaagattttaaaaactaatcctatttggttcttctttaggagtggaactattcaagagaggtgtgctcaaggaatatggtgtgaaagtcctgggaacttcagttgagtccattatggctacggaagacaggcagctgttttcagataaactaaatgagatcaatgaaaagattgctccaagttttgcagtggaatcggtaaggattctttgctttggaaaaacaagggcattatttgtcttgtgttgtagggagaatgatttttcatgcctaataataatagttaagattattatacttgcatgcattttcttctagaattgtgttaatagtttagaaatattgtgtattacagcactcaatgctgaaattataggtattaacattttactttatgcaaagagaaacagaagtccagagatgaagtggtttatcaaggcttgaagtgccaatgaatctcagatctcctgaactgaaactaagaaccataccaacttgcaataacaaagcaatttttaccttgtttctgggatcaatcacatattttgcatgtgtgaattccctgcaaatgagaaatttgctttaaattttttttaaataaaataaacattttagaataaaatggatccagtcattaaaatgactggaaaacctgtagtttagatatttaaggaagatttgcttttctgttatttatttccattgccccttatgcctatcaataagctattaacagttaccaggaaaaagaatcaactcactttatatctgtttttgcccctgactttatttttgacttcaggctcatagctggtgaagtggaggtgctaggggcagtgttaaatccaacttctccatggtagaaacaggcacacccttaggaataaagcaggtactgctgggacaactaaaaatgggttatgtatgtttcagaagacaatgctaccaagtatcttttgtgttacaaacttgtcaatcaaataatcccaggataactctgctgcacaatttgggaagctcttgccatacatttgttctttcattgccagatttaattatgtccttgcttcctcaggaaaagaaacaggcatatgggaaaggtgtaattacattcccattggtagtgtaataatattccatgacagaaaaatatagccaccatatgttgtattctgtaagttaaaaaaaagaattccaagcttctgggactatgctcagactgaacttgaaaatgaaaaatccatttatatacagtgttcctaatggcttattgtggtaacatcaagctagcttcagcagcagagaacctggtttcattaagacagagacttttaagctgcatgtaaaaatcgtaaaaatccaataattcaatatggctgccattctcaaatgaatgatgattatttctgctttgaccatggttctgtttcaataggacaggataaaatttaccgcaaaagtgtatttcttagaagatatatatatatatatcctcccttctagaattttacttaacatttgagtaacaacacttgcttttcagaatgagatgagggaataatagaacatttctagattcactctccccacataagttggtttacctgattgccagactctcttggtgtggtctgttctgccagtgtgctcagcttttaaaatgttgagtccttgttcttgttgacagattgaggatgcactgaaggcagcagacaccattggctacccagtgatgatccgttccgcctatgcactgggtgggttaggctcaggcatctgtcccaacagagagactttgatggacctcagcacaaaggtatgtatttttgtagacaatattcttaccaaccaaaaaaactggcttgatagaccttttcaactagagaaagttatgtagatgagaaattacattttctttattaaatcatgatcatgttctccaaaagcgtattccaaaagatgacacttttgcgagagcatgcagtgcaactcttcatgccaggatgcaatgataaaccacatggttcaaggtaaaccagtggtcactttacctcaaattccacttttatagtacaatctattgacttcaaggagatgaacttaattcaactccttcttcctttgtttcaaaatctactctcaaatatttaaaatgctaaaatatgttttagtggttaaggaaaaataggacataatgtctcatttttaattttttagaaataatgtggctggcatgggtgacatccagaaagtgaaacaaagcacattgagtagtttgactttactcaaaattaaggtgtctaaaatatacatggtataaaccactcaatacagtaaatgactgaactccaccaactgccatatactcataaaaacacgagagatttgagggtttataatttattttctatcaaaatcactttaacatattaggaactacttctttctttgcatgttagaggaaaactcttgagaaaagtaagctatgctacaaaaactaaattagagactaatgcagaaaatatgctccaggaaaacagagacttttgtctatactctatttccacaaaatagaacagtgcctggaaataccaggagttcaataatgtctttgaagaatgattacacgtgcagccaagaaacctgtgtaacttacatggcagtcatagaagtgaatttgacagaattactgtaagggctattttgggaattatttaggaaatagctcacggacagcttattgcttcatctttacttactttttgaactgaagtgaaatgagacccttgaattgttgacatagaattttgaaaacagataagtacaattcagcatatttaaataactacaatggcagacttacatataaacaacttgggtttcgtttttctaaagttgtgaaaattacaaaaaagggaaacatacctcacataaatgtttcttgttaccattctggacatatgaatcacatatttagagcaaaaacatgtttttgaagatagaaagtttatttcctctagcatgttagaggctccaaatattttcaatattaacaacttcataactgccaattgtgacagtgtatacatattctctattaatttttttactctataagaaaccaatctgaagactgaacttttcatgtaagaaagtttataataaagagaattttggaatgaaatagctttcaattatttatattgtactcaaataatcaatagtcccttaaatggtttttcttgttgaaaaaaaccctcgctcttcccttgagaataattagtcatatcattatgtcctaaacaatcccctattctcttgaggttataattagcaccattaaaagctgcattaacttatccaggtccctaaattaactttttacataaaatcgaagacttcaaaaaataaaaataaaaataagctgaggaaacaggtgaagataatttcaaattttccctgtatctaaatatccattttacttcattagaatgcaaaatacttttccaaatttataccctttgtttcctagatttcttcttttagcaggcaaccggaatgatgaattaatcattattaaattgttaacattggctactgaattttctaaccactttgagaacctcatcgtgggcagctgtggggacaaatgtgtcacattttcatttgcacgtgctggagcctgtagtgatgactgaagtttaaaaaaatcctattaaggcacattacagaaaaacttacattaaattattattttaatgcctattaataatttgaaaaaattcaaactgctttccctttcactgtcaatccaaatcaaatatattataagacaataagacatttctcccttggattatcagccactgcatgtcctaaggtcaaagattaccactttcctattttgggttcagtattctacccattgtgggtgtgccgtaaatatgaaattataattatgctaattcatatctgtctaatcaggcatacatgatatatgactcagagtatttaagcatttaggcagtgattaaccataataatagtcccatatgattcttctaattctcaagttttatatgccatcttggctaaccgtttacaaccatcatcatctcctttctcctcctcatcaacatcaactaacttttattgtgtgtgtcactgtacaaagcaccctcagctattttagagagagccagagtctttagacttatttttccatatttattcacacttatcacattttctggtttcacagaagcctagctgctgaaataatttcatttccctctgcctgattgctcaattattttctctttttcctaaattagtttgatttactgtcatatcagcactttgaatggcaagcctcaataatgtaaatcaagcatattcactgcaggatgctattcctagtacctcactgattttctgacacattgtgccttctgtgcaggggagaatggagacggggtttgagagttcagtgctgaccaggatttatgccagggtattttgccaaatatccttgttgaagccagtgctttttcttactctttgatatcttttgtcaccaatttctaggcctttgctatgaccaaccaaattctggtggagaagtcagtgacaggttggaaagaaatagaatatgaagtggttcgagatgctgatgacaattgtgtcactgtctgtaacatggaaaatgttgatgccatgggtgttcacacaggtaggcaaagtatcttcaagaactatagtaatgctttcagttcatgtctttgatggccaaggcagtctttataaagttgttgcctttaaattactatttctagttgacagactagtgataacattttggacaagcatagtattttacagtattgaaaatgttctcacatttaatttgatcttcacacaaaccctgtgaagtaaggcggatattacactgagttaattgaggaagagccaaaggtaagcaatatggtagaaataagatccataaaacttagtgttgagaaataagaagggaggttgagacagtttaaagcagactgagctggtaatcacccagtaaatgagaaaataggcacaataatagaaataagtttttcagaaaagtacactagttagataagagggcaaagatgataacttaggatttaaaagtgctaaatttggggtgtgagcagagctgtcaaaaaagggagttgagaatgtggagatggaatttaagaaataaaatagaaataaataagttgatacaaagacactggaaactgttggcataaaaggggaaattgaagttgtaggcatagacaaagtattcaaggacataggtatagaaagaggagagaatagggttgaactttgaactctgggaaacatttagatttatagggcaggggaaagaggaagtattactgttgaagatagaaggggagaataaagagttaagaggaaaatcaggtagtactgtaccaactaagccaatgcaagaactattttataaaagagctttgtttttggcagtatcaaatgctatgcaagaccaagactgattatttaatttggctcttttggatgtccaagagaacaatttcattgcaaagtcagttctgtgagctctattaaaaggaattacatggtatcaagtggtaagcagaattggcaaactttcaagaagctcattcatgtaaagaatgagagagaagctttgtatggttgtctggcaatgttgggagaagacttccggaggcagtgaagatctgagcgtgtttgaaggcagaagggatggagactaagattgcagatataaggggctatgatgagggaagtgaagatggaaagggatgagatacagaaagccagctgatgagccagtctgagtgataatattcaatgaaaggaagaacttcagaaataatttgagatgaagagcagggaagttgaagtcaatctagtaagtagacgattgaagccttgatagctacttactagatagatgaacttgggaaaggttagagaggtttctaaaagtactgtatcagagtaatatgggcaaaacaggaattgggggaatacctgatatcacatatatatcccaacaaaccctcagactgttctatgtcttgcatcgtgcaagtagatggttaagtcgctgaagttggttatttcaatatgccaccaagtaatgagtgcttcttggatatataggtgactcagttgttgtggctcctgcccagacactctccaatgccgagtttcagatgttgagacgtacttcaatcaatgttgttcgccacttgggcattgtgggtgaatgcaacattcagtttgcccttcatcctacctcaatggaatactgcatcattgaagtgaatgccagactgtcccgaagctctgctctggcctcaaaagccactgggtaagaccagaataattgaccatgggtttgcagattcttttcagatagaaatgaaaaattgacagatagtggaagactgtactgcatttacaaactatgttccctttttctgtatgttagctccaaatcatttatagcaccctgaggacatgattattaatgagcttgttgccagattgaggtaaattatattgctagctggctttgtttgcaggctaatctaaacgaatcaaaatctaggtggctaaagcaggctgtgaaaaatctgcttcctaattgcactttgcagatgttgttaaaagtgcagattaatccttaattttagtcttcagctgttttcttcaggtgtatagccctatagcaaatagttgacagaaaatatagctcacttgactcaagcatgcaatacacattacttttattttatcaaaactccacaagactgaacagtgcggaattttttcacaagtaactgttacaaccaaacaaatacatctgctgtctatgtaacagccactagcaggcatgattggagggaaaggtaatcaaaacctttggtttctaataatatatttagcaccttacacttaaattatggcatttaaatgaacacaatatttacttctttatattttttttacgtagttccacagcactgcgtggagtggtgaaaggcatgttgccctgtacaggagtcacaattctgcattctcacttggttcttctgttgaccgtgtgattttgagcacatcactcattgtctttatcagtttcctcatttgttaggtggaagttgtactaaagaactcatttttaattctatagttctatgaattattttctcaaacagaataacccaaactgacattctggatgaagatagtcaagttctcaaagtgttagttttgtaaggagcccaaagttcaaagataatttggagacagagcaaggacccaaacttgaaatgcctacattttctgaccattatgtactctcttgtactagctaactccactgtattcttaggtacagatatgtatatgtacagatatgtatatattttctcaaaaaatattttgcagattctcatcttagtggaggttaaatacaaataaaggttaaactttatttatcaataaagctatcgattttgggttgaagaggtgaaggttgagcgttgtagcaatgcatgtagtgcacagagagtaaattctcctgtgacctgtgcctctatactttgtatcatgactcctattattccgcaagtggctactaaatattgatgcagaacagagaatcaagtgtcttataccctgaagtagaataataccagaaattttaagaaagaccaatttatgttttggtctgttttcaataattgctcgaagaaaaaaaaataaatttgtcttctttttatagctacccattggcattcattgctgcaaagattgccctaggaatcccacttccagaaattaagaacgtcgtatccgggaagacatcagcctgttttgaacctagcctggattacatggtcaccaagattccccgctgggatcttgaccgttttcatggaacatctagccgaattggtagctctatgaaaagtgtaggagaggtgagtccttggtttattacgcttttcttcttgttctcagttattttgttaaatttgtgacaccattgacagtgttaaagttgcctggataccatcaacacatggacagtgttaaaggtgcaattgacagtgttaaagttgcctgaatattagcatactaatatgctaacagtctctatgtgattgtttacatattacatatgttacatggccattttgctggatttgaaggtcttcctattcaaaaggtgaggccatatatctggctatatagtatagatacacatatgaaaacacattcatatacatataactgagttgtaatatattttataaccaaatcaagaaagtaatatagaatataatatatcaaaaagaccactgaactgagcttaagaattcaactttagtccattcatgcaaattgtggctctaacttcctgagacctcattccccacatctataaaagaagaggctggactagttcatctctcaggatccttccagctctaaaattctaaattgatatgagcatagtagattattaagccctctttaattatactaaaaagttctaagcttttaacatctttagaagattttttagaatgtgctgttatactatttgaaattaaagttagcctttgattattgcatcttcaaagatgcagtgttcttctgtgtgagaggaaagaaaggaattcatatctctgctgagattcactcccttgcctccttccaccaagtcctaatcattttctgcatccagaaggtttgggatagtggagaaaacatgaaacttggaaccagctggacttggatattactcttggcattgccacttattagctacagactctcaggcaagactgagtttcaggatccacacctataaaatagaaataataatacctaccttgcaggattcttataataccccctcttaataaatgtaatccatcattattgttattattaaattagtattcataaatgttgcatggggtagatgagtgctgaagtatgaacaaatctcagtctttctctatcatttgtctatctaccatttatcttagtttatctgtatctcatctctatttctgttgtggccagtgtgggagcttttagtctatgtatctaagttgattagagtacagagcaaaaggctgtttatgacatatttttccatattgttctttatttgtcccataacacagattatagcctaaacccaggccagccatttcagaaatgcatgtcactaatcacagaaaatatagattaaatctgtcaccaatacagggaaaaagaaaaagaaatgctttactggtctatcatattcacacatgaaaggcagaattatttctattttggcttccttaatttgtaagatactaatgaaagattttaaagtagtaacaaatcaacaaattggccttttaaattaaaatgtcttactagttgtaaaacactaaatattagttttttctccattatagttgttttaaatcttatttttcaaatcatactttttagtgtacaaaagaaatagaacgcaaataccatgaaaatctatgttgctagtgtttgcaccaaataaacaactgttatttagtttacatttcatgggaagggtcctttttaaataatgttcaccataaaattggtagttcaaggaacttgagaaaattatgtaatattttcatttggggcttcttatctgagggattttgttgtcaaacaaaaaataaaaggtaggggggagttttgttgtctaacaccttacatttagttcaaaaagtgagcaaacatttcctgagttcttactaaacgcaagacactgggaggatttaaaaaaggaatagattatagataattgagatacattgtctgcagttggtaaattcagaatacctaaactgacccgaatagacaatgaattattaatctctggtaaatattaaaagatagtacttatatatagatgctatgagaatatagtagaatagggttgaggaagcccattatagtcattccactggaaaatgtgaaatagtcactcaaggaaggtgcattttaatagtatagggcaaatgtggtgggaggacgacttgagcccagggggtccagtctgtagtgagccctatagtgccgctacactccagcctgggtaacagagtgagaacctgtttcaaaaagcaaaaatatatagagagagtattgaaaagcacaatttttgagcaaacatttatagatacatattcctttgttatacacgttttttttttaattgaatggatcccatgtaccattatatagattgtgcttaagaataataaaaatatatggagagttacttatagaactaatttcagataaattttaaatatgtaatacttcaaattttcttaaatatacccaaaatatttccttaattttacagaacaataaaatgtctgatttctggcagtcttttccatgcccaggctagacaatctataaacatattgtctaactcttcaagataccactatgacttgcaaattgcatatctgaattgcattaacaggttgtttattcctgctcttgtaaattttcccttatttctaattaaatttggaacagtgtgaaaaggttatctgtttggctttagtgatcattgaatatgtatcttgtcacataattgacatgaagatttcctaaactgacattagtggtaatttgagtctatttgaggaatcacaaaagtttactgaaaatagcattatgactgctattattttaaattggagaccaaaaatgcatagcaatctattattctatgaaaagattcaaacaatgtttatccagcgaaaataactgggtaggttgcaagatcaatttaagtttagttctgacatgcaacttgtccaaactaaatcaccacataatttttctaattgattagtgtatgatgagctgtaaagattgtggaaagacacattgaatttgtcacagaaagtttagtctcctcctacgttcaaaatcataatcatcagtatttgttatgactctcaaggttctattaatattaatgcttagctgtaaggaaagccaacctgtcttgaatactgactgatactcatttacaaatagtttctgtttcagtgttaatatatttctggtttctttttatttgccttccattctaaagaacatgcgcataaagcaagatcttactaagaaaaggtctctatgcttcaaccttgaatttcttattttaatactatggtccagagcaggtacaggtgatttcctcatcaatctcagcaaatacagctgaactccctgagtggtaaaagactgacctaatgaagatgcattataccaaaaccatggagaaagtgagagaggaagaaaaaaaggaacacctttttttttttttaatttgagaggctttatgatatattttttgttcttatttgttttataaaatatattttacgtccagttcagttacaaattaaagatacataagctctttctttcaatatgaggtcttaaacatgtattacaggtcatggctattggtcgtacctttgaggagagtttccagaaagctttacggatgtgccacccatctatagaaggtttcactccccgtctcccaatgaacaaagaatggccatctaatttagatcttagaaaagagttgtctgaaccaagcagcacgcgtatctatgccattgccaaggtaagatgttacaaggggcccacagctactagttgcttttccagaatgtagtcagtctggacattaaaataaaactgaatcacaaagtggttttaaatcagggatttttggaaaatttttaattcttttatagtattaaactggaaacatctatagatttcattagagtcttttacaattaatgataaattatcatttttatttgactttaagcctggatttaagggcaaattgcagttttaaaggatgattaaatagataaaatgtccccctttttaagtatacttagtactaatactcaagtagatttgactatattgacttgtcctttactattaactttattacatgttccttgaatgtgtaaaattgtattgtagaaaggaaggtgcatacaataatgtcccttagtatgtgccacttgagtctagaataatcttaatttatttgcttctctttctgtgtttaaaaaacagcaacagactataaaggcccacatgattatagggttttccatgtaattattttattggtcttactttcaggaaaaaaggccctacatttctcacttccctccactacttgcttctcatgcaaattaaatgccatgttaatctacttttatatttactgtgcttagagttttgaagtttcagctcatctgattttataaaaggtgacttgggcagctggaatctgtctggtcagaaatccctgaaaggctttttgacatttaaggaagcacaagcgttaatcctccaacagtatcaaaccgcactggttctacaaagctctactgaccattttatgtttgtgtgtgtgtatgtgtgtgcatgtgggatgagtcggtgaaaacatgaactttctctttaaaaggattcccgtctttgtaatttgcctgtgtagaaacagaaaaatgttgttagtgattttgaactcatcgcaacttttatgtccatattttgagtccttaagagacctgaaggagaggaagggatatttccttaattgcatccaatgtatattctcctcgctcttatggtttctaaatggaaaatatttaagccctactgaaattctgggagttgctattatctcttgatggacattttcccatgttgagtttcaaggtaattagaatttttctctggcggtggcgggtgggatagcagtgataagaagttattttagaaagccatttcaccttcatcatttattatccctatttcagtcttttatttaagaagcagctcatgacattcatatgtgtgtgtgtgtgtgtatatatatatataaaatttttttctcaggcaaaggacagtaaatagattttttccttaagtctagcaatcatgtttctgccactttgaaggagatgaaaaaggcaagcatttccaagttcccagctaagctgtaaaactcaagcaaatctctcattcttttctaacagacttataaaagatgagaatctgggaaaaatgtgtggaggttctttctttcacagggtaccctatgtatgagcaagaagtgcaggggctgcgtgtaaattattgcctgctcgagtgctgggagaaggaactgatttctgtttgttagaggtcatcattactgttcatttcaacagcagccgggaacttggtgattttgacagagagtgtaaggacggtggagggctgaaggggaaaaagaatgaagggagtgtgtaaatctttgcttgctttcatgagtcttagaaagagcaacttgctctgaggtctgatttttacagcagtcttatttcaggatgactggatcatcacctcttttgatttggggagaatgcggggcattatttttgatttttggaacattaaagtaacctcaaacttgtttgggggtcattatagacttcattacagtgatgttacatagcaaagctgcagtgcttggagatgaggtcttaagactggcaggatcttgcttgctgttgagaaatcatggatttttttttttatccagtctatcattgatgggcgtttgggttggttccaagtctttggtattacgaatagtgctgcaataaacatacgtgtgcatgtgtctctatagtagaatgatttataatcctttgggtatatacccagtaatgggattgctgggtcaaatggtatttctggatctagatccttgaggaaatgccacactgtctttcacagtggttgaactaatttacactcccaccagctgtgtaaaagtattcctatttctcagcatcctctccaggatctgttgtttcctgaatttttaatgacagccattctaactagcatgagatggtatctcattgtggttttgatttgcatttctctaatgaccagtgatgatgagcttttaaatgtggcacatatacaccatggaatactatgcagccataaaaaaggatgaattcatgtcctttgcagggacatggatgaagctggaaaccatcattctcagcaaactaacacaggaacagaaaaccaagtaccacatgttctcactcataagtgggagtggaacaatgagaacatatgagcacagggaggggaacatttcacaccggggcctgtcggggggtggggaggtaggggatgcatagcactaggagaaatacctaatgtagatgacaggttgatgggtgcagcaaaccatcatggcccgtgtatacctatgtaacaaacctgcacgtcctgcacatgtatcccagaacttaaagtatatatatatatataaaagaaagaaatcatggatttgactgtagtcctttccttccttccagtgaaatgactacaggattctaggccctccctcactgtatgtgcttgtgtgaaaacctcctttgatctcttaaaagtttcagtaacttaaggttctctccacctcacagtgtagatggccgacagctaattgtgcctttaatcacttagaaagtaagacagaatattaagtctttgggaacctgactgtaattacagggagaattaaacaaaagaaacatacattgactaggaaatgaacatggctttgagtatttctgttaaatgtcatcttactctagtcaacaaaattatgagccatgccatatctcaacaattataatcatggtctctctgatactatcattatgtaaaagctttaagaaaagtaagctccctgggctgaaatataccagcagagttactagttgcatatatttcttaatgggtcttaaaaacgcagtgtgttattctaaaatatgttgttctggaatattttcagatttttcacagggtatatacacgtacacatacacacatacaagaataagagtagacatctttttgtataaagattttggttttgagagtttatctcttttttcagttaaattttctactcagcttaatgacccatagttgtagttttacttttgagaaattgataaagtaagcttgaggaagaggctgagctgcctatcagaacagaagttattactacattgttttggaatatattaggattttaaaaaatgcctgccttagcacaaaaatcatagtgactgattcaaaacaattttttatttgaagtcctctgtgaggaaatattctggaggaataaagccaagccagatccgacccataaattctcactgactattgtatgtttgtgtgaatgtggagtgaggtgataaaaatatgctatctcctacaagataactatcaacactacaagttaagagatcattatattaattctagattttcttaccaatttggcttaactgtagtttcaagagactttctttaattccaaagagatgtaccaaatttagggtataatgggtaacacaatcaaataaagaggagcgagtcaaaacctgttaggagatttttctgagaacacaccactcaaggcaagcacctactctgtatgccatttgtggatatagttggcaccatctttatgtttattggaaggaatgtcagtgatgtcagtttcatgttttgtaactcagtctacagtctcgggctctctaaataacacacagaggcatgactgctatgtattttaaaccaaataagacatttagaaaaatgtttgccaaagaaagtatctcttctcctcttggcaggccattgatgacaacatgtcccttgatgagattgagaagctcacatacattgacaagtggtttttgtataagatgcgtgatattttaaacatggaaaagacactgaaaggcctcaacaggtaaggcagtgctgctctcattcatgccagacaccttcagtgcaatttttaaagagtcttcttcctactcttaagcatttggtctacattgtgattcaatgaggtagatagtgccattgttggaaaatagtacccgtagccagaagacaaatggcaggtttttttttttttagatgtttacctttagaaatgtatccattaatctttttaatcatcttctattcccacccttgtcatcagacatagtaataaggtcttttgaatgcacaaaattggtatacattgatgaacgtgtattatttaattatgaagtattatctagatttaaattttattaatcaattaaatgaatatttgttttctataaattttcctctacattctgaagtctgttttccccttttaatatcaatctatacattgctgtatattgaggagaaaatgcattccttttgcgctctactgtttttaaattgggacattcagttcagcatacaattaagccacattcaggtttctcttaacagactcttcacctctgactaatttacatttttatctccatcatggccaattatttttaaacttcattttatgttgagaatattttgataatgtagtccttaaaatctacttttaaatttttcatgggaaactgctggggcaccttaggctgatgaaagcatggatcagttttaaacatctatcttcaataagaggagcatttattagcagattaagaaagacaatatagtcctcttgaacttcttccctctgaaagcactctgaaatacactactattggaaagacgtcttacctgcaaactagggatgtgtttagagaaggaaaaattttgtttgtataaaaattgttctcaaatgatttgacaaaatgtagatactttaatcacttaaaatatctttgaggacagtggaaaatctcaaaacctggattgctcaactatttagcaattgcaacatatacttgggttactgtatttgcctgatcaatatgtgtacaaactaggtaataaaacacttgcttttctttttgagaaaaattaggttctttttcatctatttaattattgcccatgtcaaatgcttggttttgaaaactgaggaattctatctgacaaagatgaaaccagctatagttgcttgtaaatcatcctttctagtgatcacataaaatgaacagtagacagcaaataatttaggaattgaacctatacatttatcttataattttgctgacttaagtttccctttcttggtttatgatgccagcagaacttctgtgtaaaattatagtctgttctactgttctcagtttcaggcaactgatttcaaatgcctatgaaaccactccaattaagccacatgggggtgctagaaacttatagtatgccagtcacagcagtggaaaagacctggggtggaaaatagcagatgttattgtgatttaaatttccacttgacatacgttctgatttttggacaaattcaatgttttaattgaatagttttcgttacaaccagaaggcaggttgagattctaactaagcataaataagggtatattgatagtgaaaaaggtccttggaggattaaaacaacacactgttacagatcatttataatatttttctgacttccacattctgttgcatttatttgccgacaatttgacattttcaatctccattttctggcataaatatatttgtaaatagggatattttctattgttcataatgatctacatttaaaactctttatgtaaagctttatatcatttcaaaaatttcaaaaacttacacttaaaatcatctctactgtataaatttgtttttgatccagggaggttgaagtgtctattatatagcaaaagctaaagtaaacctgaagtggaactcacagatgatccacggcgttagcaaacctaaaccctgaactcattatctgagtgtcactttatggtttaattcctttctttttgaagtgtcattgatgcacgcatagcaatttgataatgattgttatttagcggtattagataaataacaagaatagatggccactaaagctacctgtctccatcattttgtggcacataggggtctgaagttgaaagaatacgacagctgatggaatgaatgttaagtatgtaaggccttgagtttccttgccctattttaattatactcaccattagtctgggtctgagtcctctgctttttctcggcccctcaatatccagggaggcttagtcatcaaggtacgtactgctccaacagtaacaagagctccctattaatgacctatagctgacttacatattgcgagtttggagagaggctgagaagattagttgttctttttcatttgtatttatttatggtttactttgaagatctcaactgcttctgtgttagaatggctgtctttagctgtaggcctaggagctagcgatttatttggtgtgcgttcagagaactccaaaattctcctgcctcaacatctatctctgctgccaatgtaccgcactccctttgtacttttcatagagatccttgagaagacaggcagtggggctctcacttgggaaaagagaagtaaattaagagaaaaaatatagaatgctagacgtgggttttctggttccacccttgtgcattggaaggagcagactatggagccagagattggtgcgcagtcctccccactgtagaatcagacgtacatcacctctttcatttctccagattcatgttctttctcttaatctctgcttctagtttttttgtgaagcttaatttatataagtataaatgacatctgacatattgtgagggcccaagaaaatttttcctcttttcccctgaaaataaaaatgctacttgttgtaataaaggttactttatgattttagatatgtattatatattatgattttagatatgtagatatgatagttaaatatttaaagattcattttcagactcacaatttttatttgcttttatattttgcaatgtatcatttcttaatttcctttatgatgcatcacttattttaatatcagacctattttttaaaggaagcaattgatagctacgatgcaaatgctattcttattaaaagataaatagctttcccttatgctaatgaataaaaattcctactctacagttgttaatcaatctcgagttctaaagtccgataaacacatttaatagcagaggatgagcatatcattaaattgatggtcagtctctgacttgtgtttacatatagtcatctgaaatgaagttcagaatttgagtcccaaatagactatacccacgcatggacacagggaggggaacatcacacaccggggcctgttggggggtggggggctaagggagggatagcattaggaaaaatacctaatgtagatgacgggttgatgggtgcaacaaatcaccatggcacgtgtatacctatgtaacaagcctgcatgttctgtacatgtatcccagaacttaaagtataatataaaaaaagaaatataaaaacaagaacatagtttatgtttgaaatgtaaacaataaatgtgcttatttatgcaatagcttcaaacaatatattttaagataaaatacaatggaaattattaaaaaagatatactcacatatttagtatatataaatattcacagactgagatggggaaaacaaaacaatgattgtaactaggtagatattatggaaataactgatgagttttccatgcctgtgagatagtagaaattataatcagaaacccttctctttgaaggggagagataaacatgtttcatgttcatgattacgtatgaagtctcatctttctgcagggtgatgagacaagagggataggtgtattaggccattcttgcattgctatgaagaaatatctgagactgggtagtttatgaagaggtttaattggctcacagttctgtaaacttcacaggaagtgtggtgctagcatctgcttggcttctagggaggcctcagaaatcttacaatcatggcggaaggcaaaaggaaagcagccgtgtcctatggaaaaagcaggagccagccagagagagggagtcggtgggggaggtgccacatactttcagacaaccagattatgcaagaattcactcactattgccaggagagcaccagggggttggtgctacatcattcatgagaaatctgctcccattatccagtcacctcccaccagtccccatctccaacactggggattaaatatcaatctgagatttgggcagggacaaacataaaaactatatcaacaggtatcagaataatcaactcagcatcctagctttgagtgcttgccccctcagaactcagtatgctgtctctaatacctgaatatagtagcaatggcaaccctcacaagacttctgaagcaatatctattcttaccagcttaggtaataaccattatttagacagcttcagccaaaaaaagatctctttcctgtttacgctcactgactttctccttttccacttaaactgcttattgctacccaagggcatggtagggaagctgactgttctaggcagttccccaaatttataggctggtgtagtagcattaactgacctagggtgataacatatttacagtggatttctttaggatttgagaagtttctttttactcagtacgatataagttgtgtcatgtaggattcgaatacttgttatgtgtatgctttggaatttagatgtttaatggtcaccaaaggtcttttaacttcacattgtcagatcaccctgcaaggagtttgaggaaaatgaagtctatataaatttttagtggaaccacaacatgtgcataatctctgtccattagctttcactgctaagctattgatattttagtctatttttcccatactcactctcccaatgccgacgctttcacatattgtgctcttcccatgtagtattttaataaataccaaaagaaaaatatccttactccgatctgtaagaaattataaaaatctcacctatagttcttttttccattagtgcatagattcaattttggtcatgtaaagatctcctgcctggagagaggaaatgcaggtaccataaatcaaataaagatgtcaaatgtcttcaccaactaggttcttctgatatagcctattccttattgtaaccaaataatgaatttataactcttaatactgaaacttgaattttgattcagtttaataattctgaatgccttccaagggtaagataataatcacaaaaatttttggactacatattaagcactgttctaagcacattattttgtttaattcctaacacaacattaagaaatcagtgattgtcctaattttattgatagtaaactgaggcactgagagattcagcagtttcctctacatcacatactaataaataacagaattgggatcaagtctaagcaggactccagaacccaggatacttgctatttaaccccttatatttgatatataattatattcttatatactttttactttagtaaaaagtaaacattgtttttatgtacaatgttgctatttatgtgagcaatattgtggatgaagcttagaaagaatacttacatgtaagtatatacctacatacttaaatatcaaatataatatatttatatttgtgtataccatagatgactgcttaaaaataatacatatatgtgtatgcttatatacttacatatcaagtatatggtatgtaagtgtgcatgtaaatatattaaatatatgtaaacataagcatatatatacacacacagaaacaggtttgcttggggtatagaaacagatttgtttagaggtgtagataacatctagaggaaataagaagtaagactacctaaaatagacagcttcagtttagaaacagtagccaataaaggggtgatagtcctatcatggtagaatcagcatatataatgaaggtttctactatattattaataaacaagcacaggtacaaatatccttcagttggactccccttgctataagtatgtaaggaattcaactataatagaacttgtgagaaagaactatttcaggactttacacccccaagcattattatttataataccaatttggattggcaattttatattgaaagacaatcatgatacttaaaaaaaaaaaaaagacacatgaacaggcaagaaaaaaaaagtgagagtacaattaccagctttaagcatctgcttatccctctggctgtaactgtttttaatttttttatttccttattttgtttttttggtttctttagctatttctgactgacatatccagcttggagattttattatacctgcctaaattgtataatttcgctcttttactggctaaaactaagctgaattaagttttgaatccttgcttcaagtgattatcttaaagaagatggccagcctctgcttttgctataccatgttaaatcatcaaagtgaaggttttctaccatttatgatgattgcttgttcttgtgcattccattcattttgggcaattttccttcaatggtccattttgctctcttgtttttatgtacaatgccgctatttatgttagcaatgttgtagatgactacttaaaaagaatctattttcattcattttacacgttcaaaagtaggagatataaccattgtgatacaatttataccatacgagtattggaagctaaaatttgtatttgtttccctattgttgacataaactttactatggatttatttacaaattatccagatattgcttttgtctaatattctgtaggtttcatgtggtttttttttgctatcttcactctaataactttaatattctctttcctctttactgcttatagtcaatatagttttaaaaaaaagagtaaagtgcacttttcaagggtccaatttccatccgaaatcactatgttcaatgtgataaactatgtccattggtgagtggtgaaaaatcataggcgtgcctattgcttaggaaaacaatctaggacaaccctggtgagttccacttgggcattcaagtgctaaattgagctcagtaaagttggccatttccctgcagccacaaacttctggcagatgtaataatgcaggtgtcacgttagctggaacactccctttgaatgtcctctcctacacatgctaacttctattgactttttatttaacttgctcatgaggcatggcaaaaatcaggcaagaacgttttgtgcttatgcttgattgaagtttctgggggaaaagtgtcacctaagagttgttggaacttagatataagaaacagaagggtcagtactttactttctgatgacaatgtatattttctggtagaaaaaaatcaacaactttcatcttaaactactaaatatacaagtaatttaaagaaagataatataacatataatcacattataatttttgtgatactttactatgacatgtttttgtgatagcatctattattttggatatagaaatgagaatggagatgattgaacactttagtggaacccattaatttgatttgcagaaaatggtcttatgtcttctcatattactactaactcacacgatattctaagcctcagtttcaccctagtaaaaacaaaacaaaaagaaacaacacaaactcccttcttattttactggtcagtcatgcagctagctgaatatatactatatgtgaagtaacaaactttaaagaaaaacagtcttaccagttattacatattaccattctatgctttcagtcttcatactccaagccatttatataatgaacctcttcaggtgtactaaaaaatggggcttatatatacaagtacttatttctttgtaagagaagagtaataccatgggaaattttataactctgtgaactaatgccaaaaatacattttatttttaatttgcttttatgttccatgtaataaaaggatattttaggtgatgtcataggtttgataggactccactaatttttaaagtaataatttattgagatagatataaaattttacatcaaatatttaatgttctgagagtcttcatttgttatttaaatagtgttttcatagttttggcaaatgattgtgcatttttgaatttgtgagagagtacttccgagtctggcatggacaagatgaatgttttgcttaaaaggttttcagagtaatattcagatgactcataaagtgcctattatgtttctgtatattaattattgtatgtttgctagttcataagaatatacaacttaaaaattttaagttgatttaaaataacacatactcagaatatgtgtatatatatctataaatagtcaataattaatacattattcctgtgttaatgtctctgaactaagcgtgatgggatatatatttacttgatggcatttctttttattaggagctggtattagaccaaatggtatttgttcttctattcagtcattatgtattgggtacctactatgtgtaaggttttgtgctagttccaaagccatttgttgatgaataatcactagttattagaccaaatggtatttgttcttctattcagtcattatttattgggtatctactatgtgtaaggctttgtgctagttccaaagccatttgttgatgaataatcaccagtcattgaatctataatataggtttataacctatacaaagagctatatatagacaggacacattaatggacatgtgagaagcagaaatatgaattcatgaaagtttagtggaggttagaaacaaaagctcttagctaactttacacatgttatctcatacaagtctcgatgtacagtttttaggaggtatgtgtctctatcccatattttatgaaagaaatgatgactcagaatgtttaagtaaattctccttactccatattggagccaggttttgagttcagaaatctctcagtccaaggacaatattctttccttcaatatatcccactgtcatgggagccaaaggaagaaggaagagagaatttaaaataaatgaaatagaaagacactttcaagaggattgcatggtttagagagagaagagagaaacagaattaagtcctcatttgatgttgggtaggtaggagtggaagctaggctataaggtccaaacacatagtgagaaacaggtaggtaaaggtatgaattctactcaggaactgacaaattgtgtttgctctttatcctatttatgctatttttcataacagtgaaaatctgactatgaagaaattaagatagtataagaagaaaaactaaagtggatattagctacctgtttgttcattgggtgaaatagttgacgccacacagtcttacttcattgttccgtaaatattgcatatatcctaatatcatcccccaattaaattgtgattttcattagggaaagtatccaataccataatgtcttaatatgtttttattataggtctttcttagcaaaaaattgtgttaatttgtatgaatgcagaatagagttcactgtggcataaggtataagtcataatttctgaaacagatacaaatggtttccaattctttatttaccatatattttcttgggaattgatatatggtgctttgtataaacactcaacaatatttgtatgataatataacaaataaactttcttggtagaaagtgaaaatcatcatttcttagtgatggcaaaggagggggaattgtagtggagcaaaatgcatatgattcctggttgttcaaagggattgaattcacaaaattcacaaaattattaattagaaaatacatagcccaagatataaactgactgtgttgggaaatattgtaaaccaacatctctaggttttaatttcttaaagtagttatgtatctactaattagctaggaaggctctgaataaactgttttttaataaaaagagatttatctaattgttttatattgtcaaagattatatacatgtaggcagtataggtatatcgtgaaatctctaactcctggtgagaactaaccagtgtttgtgtattcttgatcttcaaaaattattcacgttttcaaatttttgcattttctgagaagtttttgtgagaaatattcacagacattttcaactatatgaagggatatgattttattaaccagtgaagaaggttaaggcaaaaataaatacttatttaaaatacaggcatctactgtatatctccggtgaccttaaagtacatttctattataataaaggtgaaaaatatcactatcctatttttatggatggtgaaactgaatcacacgaggtgtgtgtcatactttatgtcacaccaatcagaggaaaacaaggaatctagcccagggctcccactttcagttttagtcactaacccttttcaaaagcttcttttgcgagatatgacttttaaatcagacagctggagatcagttcctgcttagcggtcaagttgtgagccacctgcattgttgaccccacttagagaggagacattgtgaggaatttgcccttttccaaaactcttgggggaaaacacaggaagtctggcagggagaaagccccagcaagtcacctttgaaaaatgtaaacaggattttcaagggtacaaagacccaggataataattttctttttaagttttgctttatttataataaaagatttgtatatatttatacacaatatatgtctataggtatcttttctttaaagtacaaataccttgccttccatgtttagggaggtgtgagtaaaacaactcttgagcgtagaatggaattaaatttacgcaaaataggctgccagagctataattacagaagctagataattagttgctgaccccagaatttcttcagctgctaatttatacttgagatgcctttatggggcataaagcctttgagtctgaccttaggatagagtcatgcacttcgtatccaaagactataaggcagcgaccatgcctcctaacagtggagtaaatacccgagagcactctctctctagaagatcaattttgacttgcagggagtcgtaagtatggtggccctcaccacctcaaagtgtgagtacagaaatactacacaggagaggaaagaaaacaaagggagctgaggtgctgggccaaatgtaggtgacttgctagttttgctcttctaaacttctcctcctgcttcttctcttctttctcttcctctttctcctccctgttggtctggttctttcccttcctccttttcctccagcaattgtatctattaagcacttattaccttcttggtgttgtgctgaacacttgccacatttattattttatctggctgatgagtctttttctcaggatggtggagcatgactacaggttttgggcaaaggtatttgcctatctaaggttgaagtaggtattttgacaccatttgcctatataactataatgatgataatgtaatggccatcacagcaatatccacctggcagtattaaattgcagttacttcttctacccctccccttctacccactcttcagctgataaactgacaagtatacagttgtagtgtcaagtggatggtaatttttgctttcatggattttaatgtgcattttctatgtcttcttatgaaaaaccccagataataaagatatctgctttccatgtaggtagtaagcctcatatcaacatagactgaatatgacatgtcaccaggaatttaattctagcattttcccacatcctcctaaaaataacttctccttttcctcctttctaaaaatggcttacattttttccttcaagaactagaaaaatgtagtcaaaaattattcttatatatcttacatttttctaggaaaaaaataagcagtagttattagtagataggcttctgttaagtttttaggaggctgagacaggcagatcacaaggtcaggagtttgagaccagcctggccaacatagtgaaatactgtctctactaaaaatacaaaaattagctgggcgtggtggcaggcgcctgcagttccagctacttcggagactgaggcaggagaatcgcctgaactggggaggtggaggttgcagtgagccaagatcacgccactgcacttcagcctgggcaacagagtgagactctatctcaaaaaaaaaaaaagttatttattttaacaaggctctaagtaattctttctagaagtcaaagaaagatatattgaaatatatttatatatttgttgcttggtacaacctaagtgatgtttggaaaactgctctgtggaaacatgatgatttaaacaaagatgatggagatgttttaaaatataggagtttcaaataaatttatttgcaataacaaattgtaaaacatcaaagagtgcccattcaatccctattttctatgaggccttataaagtgtttcttcttatctgttagatttaaattctgtacacataaaaatcttatattcaggggaaaatccagagttttgcttactgaatacatcttctttattttggggaaggcatacattgaatagatttaaaattataaataaatgtattcatcagaaataacagaagcaacatttcatagtatggacttaacccgttaatccaattggctcaagcaaaagctatttgattggtatcagcatcctttttttttctttttttttgagacggagtctcgctctgtcgcccaggctggagtgcagtggcgcgatctcggctcactgcaaggtccgcctcccgggttcacgccattctcctgcctcagcctcccgagtagctcggactacaggcgcctgccaccacgcccagctaatttttttgtatttttagtagagacggggtttcaccgtgttagccaggacggtcttgatctcctgacctcgtgatccgcccgcctcggcctctcaaagtgctgggattacaggcgtgagccaccgcgcccagccagaacactttcttatatacgaattgacataacttactactttggttaggcagtttccatttgtttttcatcttggtaaagacgaatggtaaaattcaaatttggtaaaatcaagggcagagagagagtcattgcatcttaaattaagaaccatgggccgggctcggtggctcacgcctgtgatcccagcactttgggaggctgaggcgggcagatcatgaggtcaggagatcgagaccatcctggctaacacggtgaaaccccgactctaataaaaatacaaaaaaaaaattaaattaaaaaaataaaattagccgggcgtggtggcaggcgcctgtagtcccagctactcgagaggctgaggcaggagaatggtgtgaacctgggaggcggagtttgcagtgagccgagatcctgccactgcactccagcctgggagagagagcgagactatgtctcaaaaaacaaaaaaacaaaacaaaaaaaaaaaacaaaaccatgaaaaaacaaaatgtggtttattatggctcaaaaattgcaattaacctacattaagcgtttttcttcatcattattccttgtattcatagagcataattatgacattatattcaatactaaatgagtggctttaccagattaagagtaatatcatgatatttctggattattagggtcattaaagattagcaaaaaagaacaggaaattcagaaaattaaaacttgcctatttaaagatatctacattatcagtttctcataaggtttcctttttaatgttgattttactgttattattactagcctttaaggtgaaatatagttttaagtatgccattttttgaaaactattacttgtaacattttagcattattgtgatagaatctgggtccacttagcactattagataattttcttgatgccatactgtcacgtgaacattggatctaggtattatttgctctgtacaagaaatataaagattcaagtcttcttaaattccttcaaagacctcattcctgtatagaaacagccatggtactcaaaaattaagacaaaatagtagtgcctacccaattgcctgggtttttatactttgcttttctaaatgccacttctatttttgaaaattgtcttttgcatttctcgtaaggaaacacatagcaacttgtctccttgaatgaagagaggtgacaaataatttctccactgatggcattattgtgattgtggcatggtcttgaacccgtgaaacgccaaaaataataagtgaagcagtaaaaaactcaagagagaggctagtgagggttcatgagtcagagaacatatatcttactcaattctcttattaaagcagatgtcattactgaacgtcaggcttagtttttttctgccttttggagtgttttttttttttttttaaagaggataataataaaattgcaaacccattccataattgtaggccaggtggagtgctcattttcacattagagcttgtgcaatctggagggaaatttggtttagtattactcgtgagttggtggatcagatgaaagccagtcaagtggaagagaggactgtgtgaagtgcgctggctcccctgataattagaatgctgcaggcgttcctccagtcagctaatagatttccccagctcctctgtgccaggtgaaaatttcctcattaaggggaatttattccatttccttttatcatttattattgaagactaagtgtgagtggaggaaatttcagagatgacagggaggaattttaaacaacaacaacaatatctacattggaagtcttagagaatgaggagaaaggcttgtattgtttgtaaaccagagaacacaccagagactttttgctatagaagccgagccatgctgtctcaccattaaaagattatggcagagtgtgtaaaagtctgatggtctggttttaagacatttttttcaccttctaaaatttcagtcattttgtgctgctaagtagaaagaaactgaagattatgaaaaggccagcatcacagccatttggtgtgttgttttattgtatagattctattatgcaatgatgaaagtctaaccttttgtaaagtttgcccttgaactctcaaagcaaggcaaactggcacgggaaagaatagttgtatatataatagcatattttagaggacacagttctgaaatatggatttaatgtgtatatgttcaaaagagtaaaaattaacataaaatactagtacatacaaatatatatcaaagaacagaaggataatttattatgcatattttaaaattgtgtgcttttgtgcaatatgctttcttcagctgatcacatttctagctgggcataaagctgtcttgatttacaacataatataaatggagtattccctattgaggtttcaaaaagcagtgttgaattataaattcagtatttatatttcttttagtaattattctgttttgagtttgtttcaaattaaggtttttattttccttcagaaaaataaaaatgttatagccttgttttgaaaataagcttttacctagtttgatcaaaaaaacaaaaacaaaaacccaccatgatggaaattggttttggcaaacaaaatggagggagcataatgtgggcagataaagatgaggaacatctatctgagtctccacattgttaaatgagctttatgtttgcttaagattatgcatcttgtatttatttgactctgaggagatttaacctgatctaaatcactgccccacaactaatgaattgtgtctttgaactgtctttttttttctttgattataatgggacacacaatacaattttgtatcagaataagctgggactaaagtcaattttctactgtgtataatgacatctcagccagcctggtgttacaccaaagagagaaaacagaggagaggaaaggtgaggacaatacagagaattgacctgcttccattaggagtaccttgtggaattaggcagcactgactgtgggaagggatctaacttgcctgtgcctctctaatggccctggtgggtcagtatcaacaatgatttctcagtgaggaggattgctaagtgttttgcactatttcatgatcatgtctaaagagcagaaataaccagagagaccatgaacaaaatactatagaaattacattactttggacatccaatgatcacacatacccaatatctgtattcaagttaaggtagatgaacatgaatgtactaatataccatttcaatttaatacattctaatttttaagacatttaaaaatattgtattctgttattgatctagttatttgaaaattgggcagaagttgaagcagtttttggctcaccaagaaaatgtcctaagaatcaactagtgagattaaaatatgcaaggtgcaggtctagcttgatacatctgtttcaaaattctcacctagtatgatttaaagggatgcctatgtagaaagttttcactcccattctgaagtatcattcacaatcattattttgtgttactgttgctcttctcagacattttctttaaattatgaaaactctctggtgtgggaaatgctatgggcaggggagcagtaacagttgagttagtcttagtgacagatggcttttttttttcgtcaccagagctgagtacaaaattaactcacttcactttttaatgcacaaggccaattcttatcaatcaacctttttcttttctctcttctttctcgttctcccttctttcttattatttttatttctttgctgataagtgttcagttttattagtaggtagaggcagaagactttgtatatttgctagagatgtctacatacattctgttagactcttgtggtgaaaaagaacaagagaaattatgcatattccagaaatgaaaatactacattcctgaatgaaaatactgcattgctgaatgtagacgacacaaatgcaaatttattgcatccctaatagaaatgtgaggaatctaattttttcttatttaataccattatttataattttcattttaaacaacatagcgacctttgaaaacctgactggtattccatgtaagaaggaatgcaaacaaataattaaagaccctctaaaaattgcaacaacaaacaaatagaaaaacctgactgaaaaagctaaagataactacatgacttctgcttatcttagcatttgaagaacccgcacttatggtgctgccgtgttagcccatggtcacaattatagatgtgatggttcttttcaaggcatgtgttttaagtgtatctggatgactgttcttcagagttaggattttagtcatttaagtaaaagtggttattgttctaatttagaaaaatcgcttatttgtcaagcacttccaccgaaaggctgagtgcatacttgcacataaacaaatgagcaattggtttgggagcatattcttggcaaggaaagtggaaacatacctttctaaaacaaataacaacaataacaaaaaaaaatcttcgccaggcgcggtggctcacgcctgtaatcccagcactttgggaggccgaggcaggcggatcacaaggtcaggagatcaagaccatcctggctaagacggtgaaactccgtctctactaaaaatacaaaaaattagccaggcgtgatggcggacacctgtcgtcccagctactcgggaggctgaggcagcagaatggtgtgagcccgggaggcggagcttgcagtgagccgagatcttgctactgcacttcagcctgggcgacagagcgagactccgtctcaaaagaaaaaaaaaatgtttcctctactttcaaaattaatttctctctctctctctttttcttgaaagtaaaagtaaccacaaactttggtgtttccaaggctctctgaagctctaaagtcacctctggggtaaagcctttccagacttctccattggcagctggggtcccctgccctgagccacggcttcaacttgtgcacacttctcccacagcacctctcatgatgtagacatatcattggctatttgtgcttcctaacatactctgacctcctaaatgtaagagtacaatatttcatcttccatcattaatacaggcaggacaggtctgatacagagcacgtactcactaaatgttaaagcagtaatgacaatgaatgtggctaccctcaccatccagtttcctcagtatgtttcccatacgtgccatgtccactgctgctctcaaacaatagccaatactgttgccattgcctattgtacacctgtcaactcctttatctacataaagttgaactttgttttttcttttttgaggtggagtctccgttgtctgagctggagtgcagtggcgtgatctcggctcactgcaacccccacctcctgggttcaagtgattctcttgtctcagcctcttgagtagctgggattacaggcacctgccactatgcccagctagctttttgtattttttgtagagacggggtttcaccatgttggccaggctggtctcaaactcctgacctcgtgattcaccctcctcagcctcccgaagtgctggtattacaggtgtgagccaccacacccggccaagttgaactttatttatagctctgttctcatccctccactgctgtagtgtttctcaagtacaacctttcacactattatctttctctggcctcacgtagcaccacatagcttatccctccataaagtgttttgaatcactatcatttcattgtctcaaatattgtttccttatcttctggggcagcactgttcagtagaaatttctgtgatgatgaaatattctgtaatctgcactgtctgacactggagccactgaccatgtgtggctgttgagcacttgaaacctggctttggtgactgtagctctaaatttttggtcttaaaagatttaattagtttttcaatttaaataaccacatgtggctaggggctgctatgttggatggcacagttctaaagcacagggcttggcacacatactaagtcagcaataatacttaatattggattgcattcaagaatttgacaggaaaatgcattgctctgagagaatgcttatcaaatacttgggaaaactaaattcaaaataagaataaaaagagaagaaattaaattcaatgggagatttaacacactgatttgagacagaagagaatttaggtgcaatagaaaaagcaaattgactaggaagagctgtagctgcaaaaatttaaactaatactgacactggaaatccagggaaatagccattatatacaccagcttgattttttcttctccaaactcagaatatgaattaattaaagcagattcatgattagaatgaacaaaatgcaatagatttaatccaattacattttattaacagcatttcatgaaaatgttttcttaaggcaagttagatcttctggcaatacactattttaatttcattgtattgactatcaaactattataattgaattgtattgtattaacaattacatgaaatagctggcccacaggtatctggttaaagatgcttttacagtagtattttattcttctgtcccttagctctttacaaattatttttgcatgcattttgaaatctagttatgagctaatttcaatcacttctttgtcttttctataaaataaaaacctagggaattgaagtttttatatttatccttcatttatttataatttatattcataaattatatttacatttaatttataaaatatatgcattttatttatatgtttatattacttatatttatccttcatttatttattttcataaatatttattgaatgctgtctgtgggccagataatgtggtagatttggggagtaatctggtaaataagccaaatgtattctttgcctttatggaacttaaatccagcaggaaaaagcctgattgacgaataaaagttaggagacattaaaagtatcaggtgataatggacatgctaaactgtatgattctatgtccatcgttccaagcaaaagaggcagtaaaaagcacaagaagttcagtgtggatgacagcaaaccaaaaggcttcacaaatgaggcttggctttagttggactttgaagggctgctgagggtcagggagaagttgagaaggtaaaaggaatgttaaaggtattacagatgagagaaacaacacaaataaagtctacgctatggaaaggagtagggggaaaataagacaaatctagtttgagtggaaaacaattataaaatgacaaaactgtcttctcaacatagacagatgggtgatattagtaagtagaggtaatttagggagaggatatccaaactgatgcaatgttgggacacctaggtgaagatgattctcaaagttcatatgcataaagacctggagcacaggtcagatgttggagaaccggccatggatttgggaattgtcaaccagtcatgctacttgcacccatgacagtggctaaatttagagagggagagagggaagacaaaagcaggtaacaaagggtagagccgtgggtaggggtagggggaaacccaaaactagtaaatggtagttttgagtaataaagtagagcgagaagccacttagtagaagccagaatatctttttaaaaaatagatcatcaaaagggtcttgtgatgacaggttgaggaaaatgaaaactgaaaaagggctcctggatttagagagtgaggtctctgattattactaatgagcacatttattagaacagtaaatgcacttgccattttttataaaagcagcagggaagaggtcgcatagagtgtgaaagcaggagatcagagattgtcagctttgcaaatagaagacttcatagaggctagaagattgagtgggttagttatttgtgtatttttaaaagataacaagacttaaatatgtttgaaggtggaaaataagaagcccttggtgttcttgaaattgaacttgtcaccgctttttattgtttttggtctaaacttgaatctctcttttctattaaatcctagtgagtccatgacagaagaaaccctgaaaagggcaaaggagattgggttctcagataagcagatttcaaaatgccttgggctcactgaggcccagacaagggagctgaggttaaagaaaaacatccacccttgggttaaacaggtaaaggagtttcccttttcccccatcccccactgacaggatttctgtggtaaaacgtaggcacccattcaaaaggccattgttaataaaaagaggagtggaattaagaagtgacaatactcatccggttgatgctcataatgtcaccaattttattcagcaagtgattaatttttacttaaaagggaaagaaggaaaggacactaggatgtaaagataagagtgagtacctgattttcttggcctaactgaacaaaacaaaacaaaaatttaaactctcctctgctttttgacctgtgttcaaatatgtaagtagttaagaaatccttagtgtaattgaaggacttgaaatttcctagcatggtggctgaccctcttgaaaataatagttatctcctttggcagtaactttttacagggtaatactttatattaagtgccccatgattatggttcatttagtattcattgtgatagggctgggcataatgagctcatctagtattcatgacaatcacgcatgaacattcataggtgtgctgttgtgattttttttcctttggcctttaatggaagggatgtcttagtttaaagtaccaccagctggtttttgtcctttaaaatcattgacttttcactgtgtgctcaaggggcacgtgcatacccttaggtctcaagctttttgctaaatattttccactcagcgattattatctttcttccttctcacctgccttacaccagcttgccctgtcggccccaaattcttgctcactaagctgagttactggcccttgagagtggaattgatttccaaatatgttcaatgagatcttgttctccccccgttcatcccctatggctttatggtagttgtgtcatcccaccgctcagtgccacaggccacttaaatcctgcgcattaatttgcaagccaaagagatccttacgtataggtcattttgctcagattttagatttcatatacagctgcttttagagagctggtggggtaagtcttcctagtaaccagttgactataggaccactttgcgatgttcatgagagttactattactactagtgatccaatgccctgtttctcaggtgataactagaccacatcactattttctctctcttattttcagaattagaaagcaattccacgggtcatacattttcctgtttgcatactttacagtaataggaattaaaggaatatgtatataaagcacaaaaaatttagtcttgaaaaaattataataacattcttatttgtttattttatttgttttctcttacagattgatacactggctgcagaatacccatcagtaacaaactatctctatgttacctacaatggtcaggtaggaatgggcaaattggcctatccagaaagctctagatttcatagacagttcacattagggaatatatattttttacctctttggatatctaggtaataaaaaaaggcatcatggccgggcgcggtggctcacgcctgtaatcccagcactttgggaggccgaggcgggtggatcatgaggtcaggagatcgagaccatcctggctaacaaggtgaaaccccgtctctactaaaaatacaaaaaattagccgggcgcggtggcgggcgcctgtagtcccagctactcgggaggctgaggcaggagaatggcgtgaacccgggaagcggagcttgcagtgagccgagattgcgccactgcagtccgcagtccggcctgggcgacagagcgagactccgtctcaaaaaaaaaaaaaaaaaaaaaaaaaaggcatcatgtgtgtcaggtatgatgatatgtttctgtactcagtcttttaagaactgccttaagataatgaaatcaaacaaatgaaaaattaaggacaatgactacatgatcatacaattatgctatgttctcatgactatttaatttaaaaaattctgccatatctattttttataaataagtagggcttgtataacactttatacttatgggtttccagagactaatagagaatacatgttaacaagaggaagatgagaaatacatacttaatgataggacaactagtttaattaaatggaataataacacttaatgatttctgcatcttccttttcttatttcctcaggagcatgatgtcaattttgatgaccatggaatgatggtgctaggctgtggtccatatcacattggtaaaataataaattatgtgtatataggactttacacaatttatatagttttcttcatacatgttaattccattattccaagaactatatcaaataaatgctgtaatatatgttttgcaaattaggaagctggggttcagaaaaataaaacccaaatatatacagctatttagtggtagagtgggactcaaatgcaggtctcaactacaaattctatctcctctcatttcactgtgtaacttaattttcatcctttttaactgaattgagcctttcactggagttgggaatggattagattttgacctgttatcttctagcatagtttttcataaggatctacatttactcaaggactttatacattagccagaaattacattgcagataccacctctgacctcatcctacgtaacatatatgactttcgtttacctcaaatgcaaaaatcttgtctgtttggtgcatgggtagagcattatgtaggtgaattaaaacataatcaccagagatatgacatttctctccagtcaattaaataaccactaaagattattacagatgcaagtatgtattttaatggacagtgatattagtcaacatatggatttaatatttaatctccacaaagcattataatatggaaatgataaaaatctatgatttgaatatatttaaatcttattctattactttaagcatagtttatttagtttttacaatgaactaagagcttcaggatatgttagtttaccaatctttggacaaatcttgaagtaggacaaaaatgttatatctttaccaccttagtcattgtcttagtccatttgtgctgctgtaacaaaatacctgagattgggtaatttataaataaattctcacagttctaggggctgggaagtccaaaatcaagtgccaggaagttcagttgtctggtgagacataggtctctgcttctaagatggcgccttaaaccttgtgcctcctataaggaaggaatgctgtctttacatggcagaaggcacaacagcacaaagggaacaaattccctccatcaaaccctcacccccagttttttctgagacaaggtcttactatgtcacctaggctggaatgcagtggtatgatcatggctcactgtagccttgatgtcccaggctcaagcactcctcccacctcagcctccctagaagctgggcctataggcatgtgccatcatgcttggcttatttttatttttattttttgtagagatggaatttttctgtgttggccaggctagtctcacacttctggactcaagcgatcctcctgcctcagcctcccaaagtgctggtattacaggcaggagccactacagctagcaagcttttctataacagcattaatctattcatgagggatctgcacttatgaactaaaaccctcctaaaaggccccacctcccagcactgttgcattggtgactaagtgttctaacacatggatttcaggagacacgttcaggccatggcagttatcttatggtgaaatagcctgaccatttcaccagcatctacctgtctactctctggagtactttttcttccttttcaaattttacctattcatgcagtaattctgcattatatcaggatccaaagaagactagtcaagctaataatcaagtgtgtgcttacttgatagttgccattaatatgccagtatatttgaataacgtgttttcacaagaatttttagaagacaatatcttaatgcaaagaattagtacaagtctgtggactttcaattctatggcatcccagtagacgtgatattttgaggtgtttaggccattattacacttcagatttctttatagaaggtcactcactctgcatgggtggccttgccaagtttaaaaggatatgcttggaaaagataggactcttcaatcaatcaggatatgtcagagctgcaaggcacctcagggatcattaggttcagccctcagacagcagattaagtggaaaggctgaaaaaagagcacaggtatcctcatcactggattaactatttttgtgtattgaggtcaatatattcactttgaatttcttttcagtaagtgagggttatttttatcattaaaattacctcccattaacattgaagttctaaatacttcaaatattgagattttctattgcagaatttagcatatatgacaagcccaatatttccttgctgtttaattagtacccatttttcctactactaatacagtatgcatcatgggtttgaaatttatatcttggagtttaaaaaattgaattgaaaatcattagcttccttagcctggactgactggtgatacatttctgcttctctttgtattgtaacttcgtgcttctcttatcccttttgccaatctcattgtctctgcaggcagcagtgtggaatttgattggtgtgctgtctctagtatccgcacactgcgtcaacttggcaagaagacggtggtggtgaattgcaatcctgagactgtgagcacagactttgatgagtgtgacaaactgtactttgaagagttgtccttggagagaatcctagacatctaccatcaggaggtaagaaaagaaaaacagaaaaaaaagaaaaaagaagacagatatatgtagtatacactttatatatatgcattctggtatatagatgtatatagtaattcctcttagaagaaagggctgccagtggcatccattgtcttattttgtagtaaaactctaaaaaaaatcactccattcttatatttttgagcccctggcccagagtgattatttttcacataaagtttttatttacattttctttctaagggtttcagctagattgaaaactctacttggtaacatgtgccagatacatattaactaatacaagatgatccctcataaatatcttgcagagtgattgaattggtcatctagacatacaataaacagcctctttctagtttgtgtgatgtggtttaatgataaacagttccagttccctgaaaatagtcaattgctcacaaaagaccagttaattccttgttccatcagatgaagccattagtcttcagtttaagatcaatgagttcattgtgaataattttgcttcctttatagctttcacttacagttgttcctccattcccatcccaatattactgagtatcttcactgtgaattcatgtgattgcagattactataagactgtagaacaaaataaattatcttataattaaaataaaagctactggaaaattttagtgatgtccagtagttaggcctttgatattattacagttattattactttttaccagaaaatcatctctatgtggaaaatatggtcaattagaaggaaaaaagtactaaattggaaccaaaatacttaaattttagttttgactgacaacctcattgatttctttaagttacataaattctccgtgctttatctttattttaaatgaatcgtctgagtataaacacatgctacttgcaaatactgtgaagttaacatagagtttatggccgaagtcagattgtaaagtataaagtatagtgctagaataatgttattattttactattacaaaagaaagtagacaagtttaggaaggatgtataattatagttgtctacttgggcctggcctactaatcctttaataaaattgatccattaaatagaatatatagcattttttagacctctctctgacatggttgtttttaaatcactccttaatattcatttgagatagacaggtggggatcaaaataagtgcatcccacaaatatttctcgaacaccttgtaaatccaggttcagtatgatagacagctggaaaaacaggttcttatcttcaagacattaacaataaaactagtatctgtgatataaatgtgaaaagtcaaatactaatttaaaaatattaaaaaacattacagatgatagcagcaggcattttgcatataattaattatgtcctcatgaaatggtttaaagaaagatgaaaaacttctatgactgcttttggatacaattatacatggctattaatgagatttgtttattaaaactgaagtcagtattatagaaagaaagaagttggcccttctttgaaactaattggtatttaaaatatagtattactatatattaggaggtaatttaaaatatgttggcggacataatatgatgtacatatgtaaatgtagacaatggtacttctgtcacaaaacaagttaaatgaatgaattaatgacagacattaattagtgataggcaaaacccattagagaatgcatgactcgagacagaattgaggttcatttatatcatttggtttaattgtaattaaatgtaatcctaaaatactgcctaaactataaatcatttttactaacatgtaaattagtaaaatataaagcatcatccttctcattggcaggtgtacagatagtagaattttataaattggagataattcataaaattccaaaaaccatggccatttgtaatgaggcaaatactacttctgttagaaaaattttctcacatgacattctttccataatacatctaatttgtgcataaaaataaggactaaccaaagtgattagtggccaggataagttaagatgttctcaaataagcttgaagtatttccttttcatgtttttctattgaaaataagtttctggttcagaaatattcttgtgctatggtaagttagtgatatcaggttttaaaaaacagaaaactaagatgggtaaaaaggatgcaaacagatctaggtatgattaatggaattttgggagcttaatggaattttgggcctaaatattttagaaatctattaaacaatatttgaaatttagaatattttatttcagtagatttcttgaaactattcaggcctgatggctatgataaggatgatgatttacctgtgtgggttaccaggttctcatccctttgttcctacatgtcccgtgatatttggtgttggatcaatttgagattggattattccataaaactgtgctatattaacattttacaaacatgttctcatactgaattccttttgccctgtgggaaaacctgcacgacaccatcacactgttactctaaaagattcctgaggccgtgatttgtcttcccattgatggtctctgattctagtcgtcaatgatgagaatttggttttgtgctgaaagcttttctactactttccaaaaaaaaaaagtagttttttaaaaatagcttttctcttattctttaacattaactacacctgaaatgagccagaaaagtagagttaacttaagattctaatatttggtctattacttcagcatagctgaaagtgtattagtttcagcatagttgaaattacaatctatagagttgagttcaggccggggatggtggctcacgcctgtaatcccaggatttggggaggctaaggagggtagatcacttgaggccaggagttcaagaccagcctggaccccatctctactaaaaataaaaaaaattagctgggcgtggtggtgcatgcctgtaatcccagctactagggaagctgaggcacgagaattccttgaacctgggaggcggagattgcagtgagctgagatcatgccactgcactccagcgttcatgtacaagctctatacatgtatttgctagataagggatatgggtgagtcacttcacctttactgagcctcagtttctttagctgtaaaatggggacagtaataatcacctcagaaggatagtgtgaaagtcaaaacagatagtccaggatacatagtagaatctttattaaagagtagcagctattatcttactattgttttgaatttattgcaaaacagaatttttaattccttaaaaagcagaaatttctttaaaaacaagtcaatttaatacagctaagttgaaaaatattgatgtgtttattaaagccttttattacactttaagctcctatttagtctaattgactcaaacttttgctataagttgctacttctccctcagtttaaaaaaattattctaaaatccttcatataagagattttttgtgtccatttaatggagtaatttgtttttaagtctctaaaacattaacaacactgctgataaacccaacataataaggaaataaaaagattatagccaagagagtattttaaaggtttttgcaaaaatttatattgaacatattttaaaataaaaatagtttaagtacacttataaatatgcaaaatggtggattattattttcagtactgtttacaatgcctttaagcactcaattgcagggtgtttgtttagttacacagtaccgtaattgctctcatcagacagaaattagcctcatcccttataagagtatttcagaacaattttaaataatgacaaaatatatttggcacatatctatcattttggcagttctactaatattcattagtgggtcattaggacacacacaaattatgctaagctcaatggcctatcagatatatgatttttgatattaataatcatgtcttatttatttatacacttacggtatataggacctttaatgtttagtgtttaggcaggtattatcctaattttatacacaagaagactaaacgttgggggaaagttcagtcttgttgtctataaaattagacaagaaggggtgggtggtacacagaaggaaccaagttaggaagggacttcgactggaaatctatttcctcaccgtctcacgctggtttaccctcactgctacaacaacacctgtcttgagaaactttgagatttagtggactatttttttttttcttgaagttttgactgctaataggagatttggacttatggaagaaaatcttacacaaatgtctgaaataaggctaaagattctggcactgtttgtaaagcaagtagtgaggcagtaggaactaaaatcagttactaggtactgttgacaggtaccaaggctgcagccaaggagaggggaaggtggaaggtcatcaaagtggaaggacatcaaagtgggacctgagatctaggctggaactaaggggtagctaaaggttagataagctggaagagaagagaaaggaaacaacagccagggaagtttcagtggtgcagagaatttgttagtgggaaaatacctagttggagctaatgagtagtcttttgagctgagaggggtgataatagataagactggaaagtcttaagtgccctgggggtcaaaagtttatgctttattctctaggcagtggaaacctttggagaactctgagtgtaggagcaatttgatgaagcagacttgcttaatctgaatgtgaagtgctgagatggaggtgtacaggagaagggagtgttaaaagaagaaatctgtattcagttaggaatttccagcagtagtccaggaattaattgattatagcatagagtacatagcaaacatttattgacttgattttcctttccatttgccacacatgtgagtgtcacaaatgatattcacgtgtacttgtatggaaatcttgcacagattttagcatctaagtgccagaaagtaaaaattttgtggcatcatttaacagtattcattggtaggagagatgtaaatatcacagtcaggttaagaattatcagtaaggaaatagacacaatattagcatagttgtccattcataatgaagttattccaatggctgatattgtgagtgtattttccaggcatgtggtggctgcatcatatcagttggaggccagattccaaacaacctggcagttcctctatacaagaatggtgtcaagatcatgggcacaagccccctgcagatcgacagggctgaggatcgctccatcttctcagctgtcttggatgagctgaaggtggctcaggcaccttggaaagctgttaatactttggtaaggagagaaacaagtatctgtttctaatgttctattttgaagagctgcaacctgaatgttgactgaatgttgactattggatatgttaactacagggcagatagaatgcatacacttagtgaatttaaagttgttgtatatccatgattgcagttaatgctgattatgagttgatagcagtattctcattaagattcagacaatgaaaataatttcaaaccagttttgaacaagatttgatatttagaatcagaagctaggaattttatgtatttcagtgtccaatttacatttaatggtgcctttagagaataaagaagctgggctaccactcgagctaatgatacattctgtaattttattgcatattttaaactactcatacatttttattgttgtttctattaattagaatgaagcactggaatttgcaaagtctgtggactacccctgcttgttgaggccttcctatgttttgaggtaacactgtatattgttttccaaaacaatgattcaaaaattgggagatacagaaatgcatgctgtatgctaatagcactagggttctatatgtagtaatttataaatccattaacaatttccaaaccatcacagccagtttaaggaccaatgtgtggtcttctagtttaatgctttcccttcagggagtggccataggaagactacagttcttcatctagaagtgtagtgtaaggcatctccttaccaaacagagagggtagctttatattaaagaacaggacaatttaaaaaagacacacaaattgaggtatctctcgccagcgtgttttctgatacccagaaatgacagcttatctttgactattgtcagcaccttctgatagtgcctttgttttaaaattttcagtttttgagatccgattgtttaatagataaattataagggtgaggaacaggaacagtgaggatcttttatattaaactttaaaacaaagttttatcataaaagaagaagttgtgaattatcacttactttcttcagatgttaccacatgtaaggaacaacttcaccaaacaagggataataaaagaaacacaatttgctttgcacaatttgaaagtgtaaatggaatttgagatgggttcctttaaaatgatgaaaatgaaaaatttcaaacgaggtggaaatctttttatttaaatgtcattttgtgtaaaccatagtctaataatactacctgtttgaggagttaatgtaaactaatttaaacatgcacacatttaaggaaggatggaaaataaaacagctttgactatcacacttctttttccttttttgcaatctatatctttgttccagtttcacatactctgaatgataagcattattgctctagccttcctctcttaaacaaatgaagcaactgaaagccctttaggcagaaatttgtaataggataaactggtgaggtgatggatatataaataacttgattgactttctataatgtatacatagatcaaaacatcacacaatacctcataaatatatgcaattactatttgccaattaaaaatacattttaacattaaaagataaatttgtagtagtgtaaaagaggtaaatgctgctgtttaaaagcaaagtaatatttttcttatttttatttttgctttctgttactcctcctctcctaccctcccaacccattttgcaaatgtcaaaattcagagtaaattgatttcagatagcattttttctcaagcatttaaaaagaaaggatatagttgaaaaggttttattcacatactgcacattgtattagcaaatattactttaaaaattgattcatttgcaatctggttgagggagtagcataacctgctttgacaacagagcagtaggctaagatcagctgttgataatgaactctgaagaaacaggttagggaaatcaggttctgggctgaatcctgttaaggcttaagaattacctggaaccagcagagtgttaatgtagcaaatcagaaagggcaaactttggagaagtataatttctagagctaccaggattccctttgggaattaatacaggtttactgaccccctacactttaccttcttccatcctcagcttcgtcagttttatactttggttgattgtcctggtgattaaatggagaaaagtctcaatttagcaagaggcaccttcttattcagccccgactggaactataggttgtctggaactgttctgagaaccagtcaagtctagtattagcataaacctgacctgctttttttccccttccttttccagtgggtctgctatgaatgtggtattctctgaggatgagatgaaaaaattcctagaagaggcgactagagtttctcaggtagtgtccaatttctttgtagtgactgttatctcttaataaacatgtagtgacatttatctcttaataaaatgtagtgacatttatctcttaatgcaaccttactttgtatgttttcttttcacacaatgtgttagaatgagttttcttttttcctcttctaccctctagtctcctaaaagaatgagaaaccttgaaggcattaaattataactagacttttaaggttggtggaaaaagaggaatacctgtgcatattttatcaaaacagattttagactccaggagtctaaaaggacaatgatttttgtttttctcatgaattagatgctggtcagggtatttctggaattcccagtctcaagggctgctcaaccatgctcaccattaacaagtgaaagctttcctgatttttaattttcacatctgggaactttgcctagtcaaacatgcaactttaatagtaagtccctcactcaactattttttattttttcctgttggcacattcagtttgtgagttaatacaagcatttcttattttgtggcaactcagccaccttcctccactgccccccagcctttaccttctccttcagtgttacctcagcatgatccatttaagatttacccagtggggttattgatcttgtattgtagaggataaaagtaatgttttccttttaaaagctttcaaaagcttgttggggcttttttttttaagggggaacaattcatagagaagagtttgatgttaggcaagtggaatttggagggaggaagagtgaaatcaggagcatttcaaagaggaataaagtgcgtggactgtttctgcacacatgacgctggatcgctcttctgtgtatgatagctgctccccaaggatgtttgagtggtaagagtagataagaataaagagtgagaagaggcaaagagtgtaaaagaagaaaaccaggtagactttgaattcatgtttgtgtgcaaatcagatagcttagaagggaatctttccagtgggccagttttcactaatggagtgagacaccaactgtcttctctattttattcctggccaggggtcctgccatgcggcccttttcagaggctggctactgtactcagctggtctcatgtgagtgatgaggcaggtgtcccctcttgtctgcctcgaacactccttataggatctcagtacaatatttttaaagtatttttcctttagcgtatggatagaatccatatgggaccaaagtttaataatagagatgttgtgattgagtactttacagttcaatgttccctatcaaactacagcagcatctgggatactgaattcaatgactctagagtaaaaccagccccaatcaatcagtaatctatgtatgtattcatttatttatagcacctgttatatggtggcattgttctcagtatcaggaattgtaatcgtgaaaagaaagatatggtctctactgtcacataggacttctttttgctaggctcaacagacttcaaataattacaattaaatatgatgagcaatgaacatcgcaatagagaaaatacaggatgttgagggagagtgtgaaagtcttgggctccagtccctgaggaagggacttttaaattgatacctgatggttgattcagaattaactgggcaaatggcttacattgtgggagtaggaggaagaaaggaacagcatttatgaaggtctgaagatgagaaagagtagggagtttctcaaaactgataaagcattccttatatggctaggacatcaaacatgatgctgattattaatgatggtgcagaagtagtcagggaccagataaaggagactttattggtcattataatgagtttgaattttagtcatattttttattttaaaaagatgagtgtgctgtagtacacagagtgaattatggggcaagaccaaattcatggaaagaggtgagtgagttgttgctatagctcagggtagagatgacagtgcctcggattagagtaatgacactaaagatggagagaaatagtaagaacatgcattgaaaagaattagtgaatgaatggaggtggagggtgaaagaggataaaggataactcctgagttttctgccttggataactgggtagacagtgatgccatttattgagatagggaacactgaggaaggagaaaagtatagagggaggaattatatatttattttttaaccttttgaatgtgaactgcctgtgaggaatccaagtggatatgatttaaaggcaagggttattataataggtttggaattgaggaccaagatcatggctagagatagagaaggaaatatagattttgaaatgaatagcatatcactttaatggaagatttgagaatgaaagcaatcactgagggagagagtatagaagaaaaggaacagctaagacagacactggaggaatactggcatttaaggcagagaggagaagaaagaaccacgaatgagctgaagaaagaagcacagaaatgtagtttacagataccaaaggaagaaagtgtttttcagaaggccagccttgtataatgctgcatttcatgatagtggtcagaaggagtttgtgttcagaggcaaaagggatattcagagaaggattcagggaggagatagcatatgacctaggccttgaagggtgagttgagatttgaaagatgaagctgaggagaaaagatagaatacacgtggggaagagacacatggaagcaagtgaatgcagggcctggtaaaaagacagtggcccaggttgttttagcctatggtacagaggagaagatatctaaaccctggagatcttccctcaacctcttcatttagtatggagaaaagcaagtggggattatgttgtggagggcatcccgaccctgacatggaggaaatgagtgtgggaagcacttcaagatgagaagtgtctgaaacagccaagaaaggaaggacttttgaagattaataaataaaaatacttgattttacagttacaaatgtcatactctagaagtggcataagacaaatcaactcgaggtaaaggatttcatctttggcccaataagaccaaaagaaaatgtcactctcattctgagttctcccacaattctcaaagagaaatatgatttagggagttgtagtgcttagaaaagataagggtagaaagaaagaaatattctgaaccaataataatatgtcattataaagtagagaaatattcatgattctgacagcagagaaagaagccatattctgcttcctccttagtcccctcttttctctaattgacctggatgcctatacttgaggattcagaactcatggtcagtttgctgagcactcaaagttggagaaagaccctctgcctcactacaagcaaagaacaaccttgttcttacagcacagattaggtaatgagtttatgtagttatgttcagccttgagtattttgcaagtattgccctgatacttataatacttaaagtacatggcttattgacactatatacatagcgttagctaaatgttcggctcctctgttttccttcgtgacaggagcacccagtggtgctgacaaaatttgttgaaggggcccgagaagtagaaatggacgctgttggcaaagatggaagggtaagtgctttattctcatctccttcattcctgccttctcatcatttttttctttaacaattttgaaatattgacaggttagaattcataatatctataaaacaggtctccagtaatagtggagaagctgtaaaaaaaatcaaattctctgacaattcagttgatgtgtcatgggtatcatatttcctatgtttcatactgttagaatttctctgatgatattcaaaagtaattatcatcctgtactcatcattccttttgaatagattttctctctcattttcttttgtctgtgtctttccttttatgtttcaatggctattatgaaaacatctaatacttttctttctgaagttcccaatcgaatcctggtttttcttctttcttcatttcccatcctcctccctttttattgggttaataaaggcaaagtcaaacagagtaaagtggataaggataataatattaaattggcttaccatatcacatcttgtatttctaatacaatgaatacctccaacttcaaggagaaatgaaaatgtgaagaatattttactttagttttatagttgtattaataatgcatttgtgacttctcttaaaatgtagtaagttatgttgtagggagtctatgccattttacttgctttaaggaaaaatacaaacttagcattcatcttctgctttgcaaatacttcaaaacactactgaagatgttaaatctttttctctttttccttccagattagcatttcagagtagatcttgttaataaaaatggtaatggtatctacttacaacagaatcacataatcttgagttgaaacacctttagagataatttattccagccctccaccctccaagtcagatattttctttacagcatccctggaaggtggtcatctgttttcttttaaacactttggtgatacaaagctcaacacattgtaagattatatattgtggtcacttttttttgacatctcaggtattctttatcttgaactaaggtctgtttccttggaagtcttatccctgattttctgagtttcagagcaaaaacttaatctatttccttttcaacatcttaagtatttgaaggttgagatataaaataagaggaacgtgatacctatatatggaagtggagaatgtaagactggcctagagacatttgtactttttcaaatactgtactggtaaaataatgctggtttgttggctttatttggctctaggtttgccagcatatgtgctttccctaaggttttctcagatatcaactattgcacatcgtcctgtactccctcttttggaaatgttccaggttattcacatagtttttaaattgccatgttaagaaatggacatagaactgcaggttgctgagctcagtggggtggggtgcctgagctcagtggggtgaatgcctccccttttccagacacttcaccaaaaaatgagctcttattattttataaataagctcttgtaaaaaatgagctcttacttatatgtggtctgttttatccttacaaacattctatgagcaggtaccattgttattcttatcttatcagaaaccaagactaagtaagtaaagcactttgcccaggtcacagaacagaaggatggaaactcaaatgtcactgttttaagacgttgctaaatctgataagcaaatctcttatgtaatttatttaagtcttttatacctacccaattattctcccttactctcagctgcatcatttcccaaggacacacatattattaacatataggttatagtgattgagaccacagactttggaatctgacagataatattcaaaatcctaactcagtcacataccagtcacctgaacctgggttatttattattacattacttttatttccttacttctaaaaaaggactagaatatttttcctttcgactccttcctctttcaaacttccatttaatgatctcttgatgagatctttgagacttatttttggtccacctaagttataccatttacctagatagatattgagctctcccaccttcttttctttcccagtgcctaaaagataaagatattttaagtgcttttcaaatgctttagcttcctatcctgttcttaaaagtcaatatgaattggtttagttttactcttttcctattacttatacccatgctaatcagtggatgagggaggtaggctctcagccactcttagctgcctctacaggaaatctgttactgcacagagaggcagcattttctactgctctcatcaggaatgtagcaagggaactacttagtgctcagtgcatctgttaggaccaaaggggaggatgagggagtagcttccttgaaggaagtacctgaaaactttttctaaaatcctttttttttttttttggccaggttatctctcatgccatctctgaacatgttgaagatgcaggtgtccactcgggagatgccactctgatgctgcccacacaaaccatcagccaaggggccattgaaaaggtcatcatttataaataaaagtggaagggaaaaggcaacactcagaaaaaaacacctaaggttttttttttttttttaaagctaggtagcaatgtaagatatgctgcaggttaaatttaatgatgaggctaacttccttgctctgagtcacctgggtattctaaagataacaattttcttcactgtccttttgagcccctttggttgtatgcgagtacaggggttctcaaacttgaatgtgcatcacagacacctggagagcttgttaaacacattgctggactccatcccccagtttctgatttcatatttctggatcgggctccagaatttgcgtttttcacaagtcctaaggtgatgctattgctgctagtctggggatggcagttagagaactgctactcctggggattctaatgtttcagggccacacacaggtgagcggcatctgaagcaatgcttctcagttaggagtggtgaaacaggtgtggaccagtcacttgagaactttctggaatctatgctttcccttctcacccttgacttcacctccaaacagcactttttgatatctcttttgagctccgagagccagccgtataaagaacttaacaaaaataatgactctgccttagtactcaatatgcactgctaggtgtacatttagaacctatcatctttttttttttttttttggagacggagtctcgctctttcacccgggtgggactgcagtggcgcgatctcggctgactgcaagctccgccttccgggttcacgccattctcctgcctcagcctcccgagtagctgggactacaggcacccgccactgcgcccagctaatgttttgtatttttagtagagacggggtttcaccatgttagccaggatggtctcgatcctgacgtcgtgatccgcccgcctcggcctcccaaagtgctgggattgcaggcgtgagccaccgcgcccagccgaacctatcatcttaaataagctttgaggaggtcccattagtctttaggtatattagatcaggctcaggctcagctctttttagtgagcttttccagtgaccctgccatcagaattcaggcagacctgtctctctggttgtacattgggctggattctgaaggtctttgttctagaaggtagaggtagcaggatactttgtaatagcagaagcattaaagaaaaaagtccttggatctcaaatgtacttcagtttctcatgtcaggataaatgatcctcagaactcaggattttccaaatctctcagagctcaatgtgtcatagactctacttcgttttatacccaattacattgctgaaccactcttgtgagcataatgagtgaggagctcttgctctttgtaatcaatgccccctcttggtatagggacattctggctctggttgaatacagggattcctgtatgtgacatgcagggcttccctgcagggaaacactgtttccttctgaacataatatctaaccttgtagagtccagggcaacagaaaagcaacacaaaagaaatctctctggtttctttgcagtaccatgtaatttcagggcctgtacctcccagcaggtaggtcattacattgatatagaggttggactgcagtttctggtgctaaggcaactagactgaaaggatttcatttaaccctcaatgtaaaaccaggttatataattgtaggtagataggggaatttggcagagagataatcgtgtacaattatttgttcttttcctattattttgtgtgtatttattgcatattattttgttaatagaaacctaatagtgccctccattataattattaatgtagatatatagctgtctgtgaagagaaattaaagacatccaaatttaaggtactgtgccttttagaaagttttcaaaaactaagatatgctctttagcacactatacgattatgctttttaattcaggtgaaggatgctacccggaagattgcaaaggcttttgccatctctggtccattcaacgtccaatttcttgtcaaaggaaatgatgtcttggtaagaaatgccaaggtgcctgagaggacaccaccactgtgttacgtcatgttggtttgcatctctctggtaatcttctctgtgaacaccagacaaagagcaactgagacccctggatctgtttgtgtctgagtgtggaatgatgcatagcatataatgtctaccttatttgaaggcccaggctattggtggcactgataagtcagttacagctttgtaaagcacactgatccactgggaaggtcactgtatgccacctacagtatagtatagatggatacggtgagacagactatcataaataaatggaatgtgtagagtagtcataaattctgtgtactgaaattctgctttactccttacccagagacgataccatttgcaaaaatgataaatgaactagattagtcctaattaatttagtctacttagtttaactaatcggtaactgccttagtctgttttgtgttgctataacagaatacttgagtctgggtaacttgtagagaaaaggggtttacttggcttatgattctggtggctagatagtctaagattggaaagctgaatctggtaagggtctcaggctgcttccattcatggtggagagtggcaagggagtgggcaggtgcagaggaatcagatggtgagagagaaagtaggggagagaaactgaagaaaccagactttttaacagcccactgttgtgggaattaatttactcctaccagactctgattatcctttttaatttaggtgaaggatgctaccccaacaggatagcattaatttattcatgaaaaatccacccctcggacccaaacacctcccactagtctccagcttccatcatggccacactggggaccaaatttcaacatgagttttgatggggacaaaccacatccagaccatagtagtaaccagcattgatttacctcctactcgcagtcatttggtggctgcaaaaatgtattaagcaagcctctgctctcaaaaaatactgtaatttagtgaaggttgggaagaaggtaaatttgtagaaaactataaagtagagtatcacagttgctagaggggatgtacaaataaaatggtattggaattatagagcagagagaacgtatttgccagtgtgtgtgcatgagcatgtatttgagcatcctatgcttggttaggggtagatcataaaagacttcaaggtagattttgtattgtgaactggatctcgcaaaacggttggaattttgacaagttaacgatggtagagagattattacacatagatagaacatcatctgtaaaggtgagaaaagagcatatttggagagagtaaatagttcagttgagtgagatgattttactgagtaaaatgggtgaactgggaaagtaagattgaggccaggagggtagtataagataaagacagtgaggtctccaatgaagcaagaggacagaaggccttcagggactagactttaatctgaagccagtggacatccagtgaaggttttcaggaggggtatggcattatttgagctctgcattaaactaaacctgtcagcagtgcatgggaatgcaatttggaaaaaggcatgaaagaaagttagagttcaaagatactgactgaaagtatcaggaaaaatccaagcagtaaggagaaaagagacaagattagcaaaacaagagctggtccccagttaataacagctggaaaccagtggtagagagaatattaatattgttgttactggctctcaatgtcctctttctcattttgaattttatctcttcaggtgattgagtgtaacttgagagcttctcgatccttcccctttgtttccaagactcttggggttgacttcattgatgtggccaccaaggtgatgattggagagaatgttgatgagaaacatcttccaacattggaccatcccataattcctgctgactatgttgcaattaaggtaacattttcaaaaatttattagtcattttatgagttctagtgaaattaaaagaacaatttgtcatcaaaaatcttgttacttttaaaaccttctaactaaagggttggactagggatttacatttcctttcaataatgtactgcagttgtactataggcaactttatgtgaactgttgtacatttcaaaaaaatttttaaaaccatctagaattgtataacttcaaaatcaattagctgagtgaattataagctttttgtgcagctgacacatgatggtgctagtttagctggtaaatagaaatccaggacacaccttgttaggataaagcttgaattgtgccaactcttacatgacttttgtaaaaagggttagcctgtggggttgattaaattcctaccacattgaccacctttgcttagtatatattttcttcagtggcatgatttttccatttgaaaaattgagacagctgttgctgtatatggtgctgtgcggttgttgaaattgatgacacctttataaagagtgaccaggaaaatttaaagtttgttcactaatttccaatacatatgtatattttaaataataccttaataataaagccattgtgatctcctagctgcatcagtatgatggtgcacagaattatgacctttaactacttggctggacaggcatgaggattagtgatatataaacgtatttgaattacgtagatgaagagcacaatgaaattaatatatttatgtaacattaatattgatatatttatgtaaaattgacaaatttctgatgttttcaaaaggtttccgttcctatatgtactagtgacttcaaccataattgtgttacagctcagacttggacttttgacttttatgatgggaactttaagttgaagttgtgaattaaaaatcttgtttaagctgataatgtaggatgccttgaattttatagtgcattgagatggaatgtgactttttatgttgggaggagaggtggcattttattcatggagactgtgacaaacatatattgttaaatcttttagtagaaaaatagagaaattttttttgagaccaacgattagtagccactgaaaaatatttttttccactggagattctatatatggattttaagttcatgtttctttattcatagttataggagtatgcttatttcttttagtaaattgatatatgaatttttaactaaaaataatattgatggatagatatgcttttttttttttttttttttgagacggagtcttgctctgtcaccctggctggagtgcagtgccatgatctcagctcactgcaacctctgccttccgggttcaagcaattctccccctcagccccccaagtagcccccaggtagctgggattataagcacatgccaccacgcccagctaatttttgcatttttagtagagatggggttttgccatgttggcaaagttggtcttaaactcctgacctcaggtgatccacctgcctcggcctcccaaagtgctgggattacaggtagatatgcattttttaaatgcactgtatcttctagcttactcattccctagttagctttgtatataaatcttagtttttttcaaattacttagtaattgtcaatcttaatagccctagtgaggctaattggtatcaacagatggggaaatagggaagctgaaatgcagaaatatgtaacttgaccaagatgatccagtgaaatgactcccaagctagaattcccatcataatttagaatgggtgccagaatcaatggagcaattgataaaattcctccatgtaccagataagtggacacatagcgagaaacaagaacttagtttttcatgaattgcatcagtaaaataaatgaaaaggaggcactcctatactctagttcatatgaaagttctgcacaaaggtgtttccaagcagaatgtttttcaaagcttttaagaggtgtcaacaacagtttaatgcctcagaaactggcttacagacagccatttctggcaaggtggcttgttgcaagttcaaatgatcagaacaagaagaggaatgtttccaaagcctatcaaagagaaaaaaatgtgtttgaactctgtctggagagaccaatgcccagtggactttgaaatcattccaataggaatatgcatgggccagattagaaacactggtccagactggtctcaggcgccctatttacagaattaatttgtgattatttaacctaaagttttggccaagagctcaagaaattcttggaatggagttttaaagccatctttcaagtcggatgcttggacccaagagattttttacatgtctactgtagcctaagtgaactctgtgagagatgatttgctaatatatttatcctctcttattcattttctacttttccctcacataatttttctccctgttttttttttttccaacaggctcccatgttttcctggccccggttgagggatgctgaccccattctgagatgtgagatggcttccactggagaggtaactagttaataatccatggaagctttcattaaatctactttgaaatctatggttttatgatttgaatacagtaaaataaagggaataaaaacatctgctatcagagtaagactcaaagagcttatgaattttgaatttaaaaaatattttacttctattttgaatagggtctaaattcttatttatattttaacatgggaatataatacatgtgttactaattcattttcacatgagaacatcttccaggtatttatctagacatccaagtaaatatcttctgtgtcttactttttatttaaaggttctcgggtctctctgtaacaacacctcattccctgccttgctgccatgaaattagatcatttgatttttactagtaatatggagaatgacagcattataaagatcatagacctaaacattgtggaatctgcagatacatgcaaaattttaggactacttttaacctcctggggattatctaaaaactataatggaatcggccactggatgtccctcttcacttgtgttggggctgtgtcagctgaaggtttctttaggattgtgaaatgtgtttcttgtaaagagctgtcagattctagaaagttctctccatgtcagtgtcaggacattttatgaatcacctagcccttgacagacttactagatacaaacttcagattctcatcagtgcatatccgagtggcaatatcagactgtgagccatcattgtttcctcttggtattaaggaaaacctaaaaggataaaatacttaattgcaacaaagtacgtgatgttttatatggttgcctggttacaagcaagatctgtgatgagaagccaagtgagacaagaaggcaggcagtcaggaataaatggctgtcctgtttgtatttggactcttagaaaggggactctttgcctctttgttgcttcttttaatttaagggcaaaaaaaaccttacttttaaatgaaggcactatgtacgtttcatctccagtcggtttaaggagacagtcttcaggttcttcttgatcccatggtcgctactactagtaatgctgattttagatggcccagggttcagatcagagagagatctattttccttcatactgttttatttttctttcttccttttttttttgaaacggagttttgctcgctcttgttgcccaggctggagtgcaacggcatgatctcagctcattgcagcctccacttcctgggttcaagcgattctcctgcctcaacctcctgagtagctgggattacaagcatgcaccaccacgcccggctaattttgtatttttagtagagatggcgtttctccatgtgggtcaggctggtctcgaactcctgacctcaggtgatccgcccgctacagacatgagccaccgcagccggcccatgctgttttctttagcatggcaaatttgttttcagtggttatgttcattctgcatccatacatatgttatgggagttattgaaatataaaaataagaaagaatgagaaattcagctcccctttgttatatctgtttctcaagtataaagagaatttttcttccattatttgaaagagtcgttaattccaagtgtcatacagtataatattacgaggtctgttttattactgacatcagaattctagcttagtaaaatcttaattatgcttcaaagagacattttcagtgtccaaatggcttgttgtaggattaaataaacattcagctactgatataagtaaggggcattttatgttcctagtggtaaagtggggatattagtcctaatctttaatggcacatttaactactttctatggttctgtagaaaatttttaaaacctcgtctgtgttgttgcatctgcactatgatgggattacccaattcttttcaatagaatttgagactcattaacttaggttgaccttatttaagttagttgcccagtacttgactgagtaaaatgttcactgtggagagaaaagcagcaaccacatgtactggtgaccagctgaaggttatagtcataagaacttttcttgcacagaaattgtaatttgcttaagaaatgaatttagccatcagtggttttttttttcttttttttcttttttattattattatactttaagttttagggtacatgtgcacaatgtgcaggttagttacatatgtatacatgtgccatgctggtgtgctgcagccattaactcatcatttagcattaggtatatctcctaatgctatccctcccccctccccccactccacaacagtccccagagtgtgatattccccttcctgtgtccatgtgttcccattgttcaattcccacctatgagtgagaacatgcggtgtttggttttttgtccttgcaatagtttactgagaatgacgatttccaatatcatccatgtccctacaaaggacatgaactcatcattttttatggctgcatagtattccatggtatatatgtgccacattttcttaatccagtctatcattgttggacatttgggttggttccaagtctttgctattgtgaatagtgccgtaataaacatacgtgtgcatgtgtctttatagcagcatgatttatagtcctttgggtatatacccagtaatgggatggctgggtcaaatggtatttctagttctagatccctgaggaatggccacactgacttccacaatggttgaactagtttacagtcccaccaacagtgtcaaagtgttcctatttctccacatcctctccagcacctgttgtttcctgactttttaatgattgccattctaactggtgtgagatggtatctcattgtggtttagatttgcatttctctgatggccagtgatgatgagcattttttcatgtgtcttttggctgcataaatgtcttcttttgagaagtgtctgttcatatcctttgctcactttttgatggggttgtttgtttttttcttgtaaatttgtttgagttcattgtagattctggatattagccctttgtcagatgagtaggttgtgaaaattttctcccattttgtaggttgcctgttcactctgatggtagtttcttttgctgtgcagaagctctttagtttaattagatcccatttgtcaattttggcttttgttgccattgcttttggtgttttggacatgaagtccttgcccatgcctatgtcctgaatggtaatgcctaggttttcttctagggtttttatggttttaggtctaacgtttaagtctttaatccatcttgaattaatttttgtataaggtgtaaggaagggatccagttgcagctttctacgtatggttagccagttttcccagcaccatttattaaatagggaatcctttccccattgcttgtttttctcaggtttgtcaaagatcagatagttgtagatatgcggcgttatttctgagggctctgttccgttctattgatctatatctctgttttggtaccagtaccacgctgttttggttactgtagtcttatagtgtagtttgaagtcaggtagggtgatgcctccagctttgttcttttgacttaggattgacttggcaatgcgggctcttttttggttccatatgaactttaaagtagttttttccaattctgtgaagaaaatcactggtagcttgatggggatggcattgaatctataaattaccttgggcagtatggccattttcacaatattgattcttcctacccatgagcatggaatgttcttccatttgcttgtatcctcttttatttcattgagctgtggtttgtagttctccttgaagaggtccttcatgtcccttgtaagttggattcctaagtattttattctctttgaagcaattgtgaatgggagttccctcatgatttggctctctgtttgtctgttattgctgtataagaatgcttgtgatttttgtacattgattttgtatcctgagactttgctgaagttgcttatcagcttaaggagattttgggctgagacagtggggttttctagatatacaatcatgtcgtctgcaaacagggacaatttgacttcctcttttcctaactgaatactctttatttccttctcctgcctaattgccctgtatttactctaatggtggttctgtacctgtgccaaatgatgatatacatggcagaattgactcctatcaggttcaaatataccacttgttctataattatgttggctatttgacttgtagttatattgtagcacaattaccgtaaacctaaatggaacttctgtatactctaacattactatatatgttagtttgtttggaattgttttttccccatatggctgtggtattcaggactagtagcaggatattttgtttcactttatgaaaatgatgtttttaaaaaacaggttcctttgaggttttcatggagttattaaatttctcagaaggctgtctcataagctctatgaaatggctccaaaccaattcagcagttacgcatttctgctactgaccggtaaattcatgcacggctgcatagtatatatgacacatactgttatttaaacagtaagtcatattaacattcggaaacttaccacattatggaccagaagctgtgatttgtatccaaataactctcagtagaatccagttatgttgctccattgagtgttgttggatagaaaaagaattgcttattcattcattatgcttaattaaaaacataagatacatctgccctggccagccttttaatccctggattcagattgcacaggctttgggcaacattaataaaatctacagaaggagtctatgagtaaagtactttccatttgtgcgtgcatgtgtgtgtgtgtgtgtgtgtgtgtgtgtattttaattttaatttttggtaggagtggttgactattctttgcatcctctattttaattttttatttatttctaaacaggtggcttgctttggtgaaggtattcatacagccttcctaaaggcaatgctttccacaggatttaagataccccagaaaggcatcctgataggcatccaggtaagtggtttgtggctgtgtgcttgcccatggtcatacatggtgagtggggaggggcaggatagaatgttaattgtggtatagaggaagggagatttgttttacgtttccgtttatggcaacttccaggaagaagggacatttgttctctatttgcttcctgattttgccttctgttgtatcagcccgtgcaaaaataaaatacagacagaaagaaaatgtttctagtgaagggatatttgttctaaatgggatgcagggtactttaaaaaatgaatctcttattctttggttttgtcttttctatatgttttactcttagctctccatccttagttcctgaacataggcattatatgaggttggatctcacttcctctgtttctcttgatatttctctgtctcttgattttcccccttgccaattcatccatgtctatagtacctactcttctatctatagctaccacctgtaaatttacatcctcagccatcccatatttccaacaatctgctggatacctccacttgaatatctcaaatccaacgtttctcaaactgaagtcatatctgttctctcctgaccatctccccttccttcctttcattcattcagtccttcacatttcaatcacttctaaatgccaaggattcaaagttgaatacattgatgttatttgattaaatttctcaacttaacactccagattgaaagtttttgaagggtagtgacttaatgggcctaatacagtcagtttatttcatagtatactgtagaagttcttgaaatattattcattggtaagccttctaggtcaaagtagggtgaaatgaatatctttatgcaataaaaaatgcactgtcaatttattgatgtaagttaaatataaatcttagggcaaaatgataggaaacttctattactatttggaatgctttttattactattcagaactacttttattactattactaattgcaagagtgtacaaactgtcctgtttataaatttcctgaaaaaatactagaggcttcccaactggtcattcatttttatttgagattagtaattcttgggtcctatgaaaaacaacaaatggtcttatataatatccctgctgtgcttttaataagctcaaactctgcatggctacataaaaatcaataaaaatataattagaacagtaccaggtattctcaagccagtgggtgattattttagattccatctcattagggtgtcttaatattagcaaattagactctggagactttacaggtagtggctttggagaagtttctgcaaagagtaacttgggattttgctttataaaggtaccagaaggacgacggtgaatagttagagcagaggctaacaagatgacttgcaattgtgaagcttaatggcagtttagagacaaatcacaccatatgatagactcatcatgttataaatgggtattaagtattattaagtcccaagtaggagaatatttgcccaacttccagttatggcttaaagtttaatgtgagacttgggggcattcagaggagaccatgcccttagtccacatcttcacatctaatcataatagtgctaacattttaaaatgccactttaagaaggcagtgatgtataaaattgtgccttgtttggttctagtgctgcagggaaatgtgaagcaaaaattaatttgatccctatgaagtatttgcgtaattttggcattagtggacagaattttgctttgtaggggaaaaaagggtttgttagaaaaaataatgttttcttaaagtagtgagagctggctattgaaaatctacctttcaatactttccttttaaaagaaataaatgttctagcagctacatgagttgttgcgaagaactttctgcacatgagagcatacggacacagatttaaaaatatattaaaaagtacttaaaggaacttaataaaattatacttaagaaaatatttacagccatggcaaaattgatcagctaatgcatagtttcttcattactatatgtaggattttcattcatggtgtttttaaaaatgcttagtctgataaactgaaaaagcgtgacagaatatactaaatggagagttaatagctataaaacttacttgactacttcttagttagtatggggccaaatctaatctcaactttttaccacagcttcatagcaattgcagataaagtaattagggttccatattttaggatacattgtacttttaaaaaacattttatttaacgtgatcctacttggtcagaagaactcatataaacacttttggatatattaagttagaactgaaaaatagcacaaaaaagactgctaatatataaatgggggttagggatagtaaatccaatggaaggcatctagttgaaggtgagttattatgaagttccaagagaacttgttatatggcagtctttctaacttttaaatttcttctctctttcccaccctactcctttacacatacagactctctgtttctggtcttccaaagttaaatccaataggtcaaagtatctgggaagtttgaaatattcataacatcaatcttataactaggacttaggataaaagaatcaagatgtagattttgtcaaaggattcttctcaatctattacattccctgtgtctctaccaaggcatttctaacataagaaaggcataacacaggtttatatggcaacaaaaatcatctttgattttcctgtaatatttctagccacctttcatcgcattaggatttatttttagttgctgtgagtaggcaatctgccttgttttgaagttttctggaagaccctttaacattaaatgatttactctagagtagatcaagagcactcactgtgttttcctctctgattgggctattcagtgatgcttgtggagtggcaagtaccaatctgacatctgcgcttcagcatcgctcagaaacacaaagcaagcattttatttgaaaagacaactccaagtgacatgaataaccttttatctttaatatggaatcattaggaacaaccatagagttgtcaatccagaggtccccgtagaatccacaggcatcacatagtattaacttggctttcttttctgtagccaggagttggataaatgtgaaaatgatcattggaggaaatatatatatttttcacttttaaaggactgtcttctttataaacatttccaagaaaataaatcagcttgtacttttcacctttcgtaacaaatggtttcttacacaggtattttcaatcagcttttaaatctgaggctactcagatgcaagctgacagctgtaatttctttttgtagagaggctgttttatgtgtcacaagtgttcaatacatgtttgatagaagtttataatgtgcctatggaagccaacacccagaccagaaggtagagtggtttcctggctgggaactgtcgatactgtcatgttggatatttatcttttccacctgggggacaacactgaaacagctccataatgaggttctgcctggtgtctgcaggtcttagaggacttgctgacttattttactttaaaatggcaaagaaaaaaattacattctagtactcctcccttaatgtttttcgtggtgattttagccaaggttaatgcaatcttgacttcatattacacaatgagtgaacgatagtcttcctatcccctattcccccctttctcaagcttaagtatgcatcaaaatcacctggagggtttgtaaaacaacaaattgctaggatccactcccagagttcctgattcaatagatctggggtggggttcaaattttcatatttttaataaattcccaggtaatgctgatgctgctctgccagggaccacagtttgagaaccactctacttgagcgatggtactttagaaacctggttaaaagttatgttagcacttattattgtcaaacatattatcagggaatttttgctaggggaaagtataaaagattgaggaaagttgagtgcatgattaatgtatcaattagcaagtgttggagatcattatgctgagccttctaatgtgatttggtacttactgaagtctattctgtgtttagcagagggtcacaatgtaatgttccatattaggggtatttaacaacatttggaagttcattttggacatttcatatatatttgttatataccaaggaatcttaaaacatgaaaaaaaatttatatgccatcaaatttagccctttgccttttctgaggagaatgaaacttgaattgtcttattcttctgtctaaccaattgtcctgatgtcactaagagttattctctaattttttacttgtttttttcttttacgtctaaccatgagcttcttgcatctaagctcatttctttctgtttggtcctaagtggaaatgaaaagctactttcctgggcatggttaaaattcatgttctataaggcagtcatgaataaccactgagcctgcctcagctgaaattcatccagttacatttatctattctatttaccaatagtttcctcttataaaactgcagttctgggattgagggggccagaatctgaaagaattttatatttgaacatagtctttggggtcttttcttaggatttagatctgtgctcagaaatactctgcaagtaaatattagggggtgttatgggctaaacattatcaaaattgtgcaaggatcacatgtgttttattgtcacagttcctagtttctgactctgaaataagatcatttgattttttccagccatcactaatatggtttataaacaggttacaagacatttgctgaagtaactagctcatgtcatctgtttaaaacctttttacaagggaaaccaacaagaatgttcctatttaaagaagaatggatatgtttttaacagtgtgtgattttaaatacgccagctcagttactcagacactcatgttaatgaagtcaaggtcagggtttgatctttgggtaggtcacctagtgttgttttctttcattctgaccactatcttgcaaacactagctcttgatcacaggaagtatgttcagaaatagggaactcctgatggcaatggtcaggaatccagggaaggtaggggctggacactagacaggtccacctggggtcctaggaaagacacagcaatggactacaggaaaatatctgaacagtgagatggagcattagggaagcctgtgtggaaatgaaatgcgtataaatgagggggcagtcagtttgggttgtaagtgtaatcgtgggtagaggaacccatgcttggaaactaggatgtaagggcaggaatctagtttttaggggggctgaaaaaacaattattgtaattataataatatttattaagaactattaataggcaagtaactgtgctaaattatagtagtaacacttaagtagtgcttacttctaaattagtttattgaacactcatactaatgtaagaactgttactattcctgttcaacagatgaggaaactgcatcttagagttgttaagtaagatattcaaggtaacacagtttaataaggtgtggagcctcaaaaaaaaaagttgaaatactactattgtcatcactgtttttgagtgaagaaatgaaggcaaagacattaactttttgaagctcataccactagtgaatggtgaaagccaggatttgaaatgcagctaactgactttagagctcattctttagctacaactttttattgcctcagagtaaatgaaaaaagagttccaaagattgagttattgcagggactagtgcataagctactaggaaaatggcctagttattgaagagcagtacaaaattagaacttagaaataagagcaagttgagcctgggtgcagtggctcatgcctgtaatcccagcactttgggaggccgaggtgggtggatcacctgaggtcgggagtttgagaccagcctgaccaacatggagaaaccctgtctctactaaaaatacaaaattagctgggcatggtggtggatgcctgtaatcccagctactcgggaggctgaggcaggagaatcgcttgaacccagaaggcattgcagtgagccaagatcgtgccattgcactccagcctgggcaacaagagcaaaaaaccccatctcaaaaaaaaaaaccaaaaaaaaaaaaaagaaataagagcaggttgaataggcaaaacagctagcctgactcggtactggctcctaacccgcatatcttttaagtcctccctgaccaggaaaaggatccttgtagaaccgaagtggatctgaacttacaaagaccaagtagattaaatagagaataaaaggagataagaacaaggtgaaaagcagggatcaagattatgtggatggaatttcattgacattgggatatagctaaaactcacactcaccatagaaggataaaaggataaaacttgtcattttttaatataaagcatccggcaacatgtaacattgtcttttaagatgttgtaaggaaataccatattgcataaatgaagagcatgtatatctagaaagtgaattttgtgaaattccttttcagcaatcattccggccaagattccttggtgtggctgaacaattacacaatgaaggtttcaaggtatgttcattagttttaagttgttttctgtcagcatggaatctgtccacaaatcaaaatattgcagaatattggaaaagaaatagcccaaaatatgtccttttgatatgaaaggtttaactaacttggtagtttcaaaacttagagtcaaatcattaaaaagactggtattaacttttaacaaaattaccacaaattcaatagaagttgccagctaaaaactgagaaagtttagcttaagcacaattgagacaaagtcccaacacatttccatatgtttttcctttttttgttttcatatgaggttatagattctagctgtgacagttacaggcaaaacttctttgcagtgaatacctccacacaaagcctggttgagtaaaacaaaattattcccaaggcttatgatgggcctgtggccatggggattttttgacctgctaacaaggaattagccatgaataattgagaaattattaaatttatgagaaattgtcattgaattattaaattcaaattaaacatataattattaaaatggaaatgcaaataaaattgaggttcttaagttttttaaatcactgcaaatatataaaaaatgtttaaagtgcccatgcctctggactgtgagtccaagtctctatccatggcactatactacttctcatgttcagcaatttcttcttctttatgttttaaattacatgttccataaaaataagaaatcactgtgatacggtaattgattttttcattttaaatgcagctgtttgccacggaagccacatcagactggctcaacgccaacaatgtccctgccaccccagtggcatggccgtctcaagaaggacagaatcccagcctctcttccatcagaaagtaagaactaggcatactgttttctgaaataatttagaggattaactttgagaaccagtatatgaatatttcaccttacttgattgcaagtcttttaaaacaaatttaaaaatgaatacatttgtggatgattgtcaagtttcactctccatcactatggaatacataacgtcatgtgtacatggtgatatgaaacgtgtttcaaaatacttcttagtaaggatactttccttgacggaaacaagtgagagcatgaagaatgtaatgcagcactttatatttcatgtcaaacttatattgtgtatagataagtacatcgagtataagatgaccagctatatttcactaaggttgtgcataataaatcaatttgttgagcacttactacatacaggaacctatgttgagtactatgatgatgtcatccattggattacctaattggtcattccttgaccaggttttcatgccttagaccatgtcatcattagattttgtacgacattttatttcagcagattgtgtgaatcttcaggaataccattgcatcaacccttaaagatctatgtggcataagtacataggagataattctctgctgttttaagatagtgcagcctacagaatggctgtgccattctatgcaatatgttatttgttagcgttcttgagaaaccaacacataaattattatcactttaataaaataatggcattgtgttcaaaccttagcaggcctccaaggatgtaatagctccgtgtttggggcattgtaaaacaataattagcactactaaggaggcaatagagttaatgtgggagtgggaacatgggggtgaaagggcattcaatggtggagggatcacctctttttaaaaaataagtatctatcaaattaccaattcttaatgagtgaacagatagcattttaaagagaaaacaaacatctgcattccattagacttgcactagaattccttcaagaacacaatataatccctatataagtgtaatttaaacatctacttagcaatagaggagggcagatggcagtcaactcagcatggcattgacttgaatggctaagagagcaatttatgttagtattttataaactaactataaaatatgccttgttgtctataagtttttgtttatttttccagattgattagagatggcagcattgacctagtgattaaccttcccaacaacaacactaaatttgtccatgataattatgtgattcggaggacagctgttgatagtggaatccctctcctcactaattttcaggtatagtcttttccttggatatagactggatgggagttttatttctgtgcctcccttaagagtgtaatcagtagatgcacatctctcttttcccctctttgtaactttcagaatagagaggaatttttaataatctaaaataatgatgctaacatggtaggtcatggcttaaatgggacagttggtgatcaagcaattgagataatcaaaggccatgaatggccatggctctctccttacaattatcctttgaataaaaagtgacagcatgacatggaataaagatacaaacttttatttcattgtttctaaatgaaagccaccatataaaagcaacaggttaatgatggtccagatgtagcacaagtgcttgttcaattcacagaaaatgattgcatgaggcatgttcagtttcacttggacatgacccatcgaatttatcacagggagaaacagagtggagactcattaactttctgcctatcatatttattttttatgcagaatcagttttaatccctatgggaggagaaataagcgtattcacagtgacatctgagatataaaagaaagtccccatggtgaggtctgagacatgggagaaagtctccattacataaaaaacttttatgccttttatcccatacccctttgaaaactggggacagacacttgtgacttttgtcttcattcattaaaaattcacttttatctcatggagggtgctgattcctaccattatattttcaggtgaccaaactttttgctgaagctgtgcagaaatctcgcaaggtggactccaagagtcttttccactacaggcagtacagtgctggaaaagcagcatagagatgcagacaccccagccccattattaaatcaacctgagccacatgttatctaaaggaactgattcacaactttctcagagatgaatattgataactaaacttcatttcagtttactttgttatgccttaatattctgtgtcttttgcaattaaattgtcagtcacttcttcaaaaccttacagtccttcctaagttactcttcatgagatttcatccatttactaatactgtatttttggtggactaggcttgcctatgtgcttatgtgtagctttttactttttatggtgctgattaatggtgatcaaggtaggaaaagttgctgttctattttctgaactctttctatactttaagatactctatttttaaaacactatctgcaaactcaggacactttaacagggcagaatactctaaaaacttgataaaattaaatatagatttaatttatgaaccttccatcatgatgtttgtgtattgcttctttttggatcctcattctcacccatttggctaatccaggaatattgttatcccttcccattatattgaagttgagaaatgtgacagaggcatttagagtatggacttttcttttctttttctttttctttttttctttttgagatggagtcacactctccaggctggagtgcagtggcacaatctcggctcactgcaatttccgtctcccaagttcaagcgattctcctgctttagactatggatttctttaaggaatactggtttgcagttttgttttctggactatatcagcagatggtagacagtgtttatgtagatgtgttgttgtttttatcattggattttaacttggcccgagtgaaataatcagatttttgtcattcacactctcccccagttttggaataacttggaagtaaggttcattcccttaagacgatggattctgttgaactatggggtcccacactgcactattaattccacccactgtaagggcaaggacaccattccttctacatataagaaaaaagtctctccccaagggcagcctttgttacttttaaatattttctgttattacaagtgctctaattgtgaacttttaaataaaatactattaagaggtaa

SEQ ID NO: 48 - DNA, 122456 bp, Homo sapiens
  source 1..122456: mol_type = genomic DNA
ggcttaaacaacagaaatttattttctcacagatctggaagctggaacctcaagattaaagggttgacaacactggattctcctgaggcctctcctgttggcttgcagaccactgccttctcattgcatcctcacatggcctcttctttgtacatacacattctagatgtctctcccccttcttataagaacaccagtcatattggatttgggcttcacgcaatagcctcattttactttaattacttttaaaaggccctatctccacataaagtattattctatgaagtaccaggggacaagatttcaacatatgaattgtaaggggacacaattcagcctataacatagaaagtggagaagaagggacaaatggaaagataggaagtagaaattaacatgacatgattgtttgatgagtcagttatacagaagagatatggagatctacctgattctttgtttaggcaatcaagtgtctgcggtgccatttgtcaaaaaaatgaatgcagaagaaggcttagtttgcccccacaaaagtgaatacttcaattttcaaaatgttacagttgaagcagtaatttctagctaaaagataactcaaagttcagagcttaagaacaagtagtatagatagaagccaagggtatgtgagattgtccacaaagaaaatgtaatataaggccgagcgtggtggcttatgcctgtaatcccagcactttgggaggccactgtgggtggatcatgaggtcaggagttcaagaccagcctggccaagatggtgaaaccccatctctgctaaaaatacaaaaactagccaggcatggtggcacatgcctgtaatcccagctactcaggaggctgaggcaggagaattgcttgaatgcatgaaggggaggttgcagtgagctgagatcgtgccattgcactccagcctgggcgacaagagtgaaactccatcttaaaaaaaaagaaaaaagaaaatgtaaaataagaacagaagggaatgaaatcctggtgaataatgctaaagggtagttgcagaagcagaagccaaatacgaaagctgtgaaggtttatcaagagagatgaagaatcagaacagagaaaaatggcacaaaaattaagggagagaataattaacttagatatagttgttaattcctaaactttttttcagaaacttaatgatattttacctcaaggatcatgatatatacttttttatgagttctaatgtgcttatgttagtaaactagaatataattttttattatttctcactatccagaatgtgttcaaaataccctactgatgtcatacagctttcattacatcttttgcaaatttcaaatctttagaatgaaaaattatctctaaaaccaaaatatgatgccatatatcttaaattaatccataaactgatttttttttccaggattaattattcttgacaatacccctatttatattgaaatacacattttgaggtcagatgcaaaacaaaagctacctataacaatatgtatgccttaaatactgtagaggttgtaagttatctaatggactgatatttgaacaatataacacatcttggaacgccatgctcttagagcactaactagagtttgaaatcttttcatgaaatctacttgagtggtgctaaagattttatgcagaaaactgaaaacaatttgcatatgggagtaacattcatcagctatattgtaaatattatttggaggcaatcagagagagacactttaaaattccacatcactctggagaacctaaggcacagatacagatgatttattatgttttcaaaaagtgacaaaagggaatattaattctggaagatttttaatcaatttaacactattatacattagaggaaaaaattttgcacaaacattccctcacaaagccagtagtcttatatttacatagcatgattatggtaatttaaaatgttaatctatgatacaatgttacttcagaaaacatataataaaatatagttgtcttatagccatgctcccatttttgatgaaagctagttagcaaatcctaatgttagtttaatactttaaaaatgcataacagatattcagtcagcattataaaacctttaagacagaaggctgtcaagcagaatagacagagggctcatcatcacttatgtctgaatcttcatctactccttcaataaccgatttcttccctttacaacaggatacaattaatccaatcaaaaatacctgtaaatttaaataagccatgtgttatttttcaaatttaaaatcatctggaaagtaatgctttaaaattcaatgacagtactatgatacaaatggcctagtaagataaaaagagtttacacatttaactataatttataaaggaaggtcaaatcacgcgtgggatatctgcacttaccccaagaaaggcccagttaccaaaatagtaagcagcactgaagaaccagaacttgtgaaggaataggtatgtccgggtaacagtacactgatctgtgaaagcaaataaaagactatggtgagataggttctttcataaaattgatgattaatactttctctaaaagattattaaccaaagctaatgactaagatcatatggctagtaagtgtcagagatggtactgaaacttaggtctctctccaaagcccactctttcaatcaccttaatgtagtgttaaaaactgccaattaatatgacatattaaaaaaaaaatgaatgccaccaatgcaatccagatcttaagtataaaaaaatcatcttgactagtttgctttactggaaatagaagaatcatttttacttggagtgtcagacatatcataaaacaaaaaaaaagttttcctgatgaacatcaagaagaaagaacaaagtaatcagatgtggtcagtattaagttgcacttgtaggggcagaaaggtctaatacctttcctcacccattgtaagtttcacggtcaacactcctataacagaagacaggttaacaagagaaaagcataacaaatttatttagtcagttttacatgacacaggaggcttcagaaatgaagactcaagggaaaactgtgtattttcaagcttcgtcaatgaagaatggagagctaagagctaagaatagagagtaattggacaaaagtgtataaccaaatggtaacagactgagcggggaaagccagcaaggtctgtatgttcagattcttcctggtctttctacacagcatcccctccttcaaggtatagggcagaactccttttggaatgagggtcttatgacctactattagacaaggtaggtcatagaatttctttatggccagctcctacatagaaaggcaggggaaggttagaataatatttctaggtttatggctggctttggaaaagtggggttctaatttctatgacatggttgggggaagagaagttccagtttctatggtctgccttgggagagaaaggggaacagaagaaagaagggcaagggaaggttgaaaggatactttgcttctgggggtcttccaatatccttcagttcaaagtacttagcatgttacagtgtgtgctatcattttcttatccccaacacacttttctaagaaaccaattctcacggcagctcaagcttgagaggtttctttcagcttttatctttttatgactgctattgaatggatgactactacttctaaagaaataggaaaatcattatttactgatgtgattcctgtttgaactttagacggcattatagatgtaattaaaaataaatcatatatttttctccttcaaataaaatgtaactctcaaagagaaagtagcagactggttatttgatatttgtgtaaaccccatattagttttgtacaaatacattatttccattagttgcaaagtcatctacacatattcaagccattcagagaggcctgtggcaacacagtacagttgaccctcaagcaaaacaggttagagttgccaaccaccacacacaatcaaaaatccacatataacttttgacttctccaaaacgtaactactaaatagcctggtgttttctggaggccttactgataacacgaactatagattgacacatattttgtatgttatgtatattacatactatgatcttacaataaagtaagctaaagaaaagaaaatgttattaagaaaatcataaaaagtgaaaatatatttactattaagtggaagtagattatcataaaggtctttatcctcattgtctttacattgaattggctgatgggaaggggaaggatggggaagaggaggggttggtcttgctgtctcaagtggcagaggtggaagaggtgaaggaagtagaataggaggcaggagaggcaactgaaacttttattgaaaaaaaatctggcataagtgaacccatgcagttcaaacttgtgttgttcaagggtcaactacattatgtaattgagtgtaaaattatatatgctgcatctaatagaggatactaacctcacaaatttcagaaggcctacttcttttcagtctgttaattacaaaataaattataatttctacatatttttattcaaaatggacaatggcaaaaagatcctacatgcaattagaagaccaatctcatatcctattgttaatcaagaaaatacacctttagttctatttttctgagctctcttctcagcttcaataagtaagtgttcttttctctcaaaacataaaattgagctgagggctacatagtccagcttattacataagggatctaataacactttttttgttcctgtcacatggttttccaaaaatagcattaaagttatattttatcaacatataagacttgttacataaagcttcagatatgtgatgtaaagatttagataatctaaattttatctactctaaacccttccactgtacttcaacatttacttctgaattgctcaataccaaactgaacaaacctgtctctttctggttaaaacaaaaaaaaaaaaacaaaaacaaacaaacaaaaaaaatcacacagtttaataaagaagcaacttcttccttttaggagcaaggactaccaatctaattcctatctattgagcccccaaaagctcccttcagagtctttcttctctttatcaacagaaaagtctagaatgaatattcacagttttctaagaaaaccagaaagcctttaagcagcattagctggacatatttctgtctcctatagttaccatagatgagtacagctttacactaggtgctgggagttcagactcacagcagagactcctggatagaaaatttgtcatttacttcgtgctcccaccacattttattctcacttttattacagaacttacttcacagtgatatagctattcaatttgtcattttttttccagtagatatactgagtatcctaaaataccattggagtactcaaatccattcatattcaatgactgttgacgttaaaaggggatattttaaatttatattaattaaatagcccattttctaatttttaaaaattgaaatctgacaagattccaagggtataaaaatgagaaaattgaatatatcttgaaattaaagcataactaaaatgtccagcatggtgaacgaagagcccaggctccggactctgacagacttggaggtgaatagcatttggtcacttttttgccatgtgtacaggcaaatctgaactgtggagcctgtggacttataaaaaggggatatcaccatctttcctcacagaattgctataaagatcatatgacatatacatcaaaagccccaggcaaagtggcgcttaatattaattttcttcctttttcctctgcaaggtatagagaacaattgtgaagagctactcaaatggttgcaagtcttaagatttcagacacgcatgtccaacagtaggaaaataattggttagtcattaatatcatgactactctgtgcatgcccattatttttctgtctctacagttgaaacagacacaaatggatttggcaaaattcaaatttgtataatcagtatcagcatacactgctaaatatacctttaaataaccaatttgaatgtttcaaaaatgaagagcagggtaggcttggacctacccaaaaaatgcctgttcataattattttaaaaacaagaatggtatcattcatggtttaagtattactttagcttcattttacaagtataagcctgtgaaaaactcaactttctcaatactgctaatgctgtaaacttaaaaaataaaagttatttcactcatttccatacttatgatattttgggagtcagaacttgacaaaattagaaatttcagggccagaacagggctaacaaaacagaggctgagctggcagaagcaagataaatcaaatcattcttctccagacatctaataatccacttagtgacattttaaattggcttatactctctgactcttgcccaccaccaaaaccatatcttaaatatttttttgatcacattattttacatgtttacctttttaaaaggttgtggactttgacagaagccttttaaaataccataaaaatgtatcatcattctgcgttgttgttgaaaaatgatagaaggctaaaaatccacacacacaataagtaacagctctttatatgcatctttatacatatatatcattttatttctattaactgggatatacccatataaaaatttttgctaataagatgcatgcatatatttcctattcaagtgacaattccaccctgaataaatggaggggagtgccgttcttcaccatctgccatcttccagctgctcacctgaatcacagatatctaggagatatatagatttctttctataattatccaactaagaaaatcacaataaaggttctgaatttggttttaccttcaaagtaaatttaaactgttggatatttcatttaggaattgtgttctaaaatcagaagtattccagaaacttctgactgttgttcctcaaaagaaaatataattgaattaaagattaaacttccaattaaactaaagattagatgttaacaatgaacactaaacatgggggaggggggctcagataatttttttttctgatgagaaagtggccatacaaaaaagaattcaaagggccaaaaaggggcatctgaagcatatgaataaaatcaagacttttgaatcctgctactaccaccattccttcatctcttctcacatatcatcaaacagagaaataacaggaaatgcaagtacaccattttttttgtaatttaacagcagtctttaaggatttatctgataaattttatattatatatttcctgtttcctttgttatgtcacttttaatgtatcttgactgccactaagataactttggttaagtagaataaataataccttttattttaaatacatattttaaaaacatttaatgtttaagccacaactgagtcatcatgttaaaccttcacttgaaatcaatttataattaattactctatatttgcattttataaaacaaagccttattttacgtgtatatatatagaagacatttgagaacactcatgtaacatggagaataattttaaaacaagcaatttatttgactagtgaccaaaaaaacttagaagcctagactatttagaagccacttcatagctcttggctgcccatgactgtgccaattggttcctgattagggtcttgctactattgaatatttataatgaacatatatatcttaactgtatacaggctaaggagcttggattttattgtgatatgatttgaaattatttataaaatggttttaagaaagaataacaagagtggagtacagactagaagaggagattgaaagtagaaagaggtttaccaagttagaagactatacaactggaaaaaatgagctcagggatgggaagaaaaaagttgggatctgtgagatttttaggatttaaaatcctaatgttttatcgtcagatggaatacatacacgtaaaaagatttcggaaactaatgaaatacatccaaataaatgggaaggcagaaaaaatgaagatatataataaaaaccaaagttgtatatttatattaaaatttaacaagtggcatacagttaaatcaatgttttgttaaatctcactgggagatttaggtaaaggggaagagaactgatgaatgtcaaaactcacagaaattttgaaggacacagttttcttatactttaagaatacacaaactgtatcaggttaataaagatatttgccagatattttgcacttaagaataagtttcagagtaaccatttttaagaacaagtataatctgtgttgagctctggttatatttaaataagtttaaagcatttccaaggtgctaaaatatatatttgccttttaagaaagaatgctactaatttcattttattactaattggccatataacactcattaaaagggagtacaaggtaagtattagcatataaaatgtagaaatggtataatcacaatctgtataagtgaactctaaattactgagacttactatctgctggttgtaattgtccaaggatagtcagatataaagcaattgtcttctattactttaacttttgataaaataaaagtagtttaaacggatatactagaaaatattaaagacagaaaactgagatttagttgagtctgacactaatttactatgagacccttgaggtaattcatttagcttctaaatatcagtttctttgtaagtgacatacagatatgtgtggtatatggtgctagatcaaatttctgggaatttagagagaaatttgcatttgaaagaaaagaaaagactgatgttttcagagttagccaccttaagcaataatctgtgagtagctgagaagtttcacaaaattatttaggttggctttggtgtagatactggagaacttagaaagcatacagctaatcaactttactatactattttagttaaacttctatcaacacaaccgcaatgtcacctagaaaaagaacctcaacatcaggagactttctagatccccagcaacatccaagaaaaatgatgctctgatcaatactcaattttccagtctgcatcgcaatcttgattgacaatagacataatacatcaggctatctaagctagataccagccaataagatcactgaggccctctttctaacttcatgtttacctagacattgtatgactataaatttgattttccatgcaaattctttctctctggtaataattcactaaccttgatcatctagtttatttaatagttaaactttctagggtaaattaattagctgccatttgggtgacattagattcttgggctgttctctgttcagtcatatgaagctaaatatagatgctggagaccaaagtatggcacttcttagaaatagttcgatctcatcacctactattgtgctacacatcttatgggtttactataatcaaatcaaatgaggttatcaacacaaacttcttatttgtcaaataaaagattagaaatgtatagtatttaaccacaaaaaaaattttaacctgttgaaaacatagcttactggttcaagataacagacttagcacagtcatttgtttcttatccttctcaggacctcattactgttctagtataggaataaagccaggagcaatcctttatcagcaaagagaatggaagtagaaccatcagctgatgagaggttccaacaataatccagaagatggaaggccacatttaaaaggtctccagtaaaacagatggttttcctcccatttattttaaaatataatatgaggatcaagaagtcccagatgcatgcacagagttaccagcaatgacacttcccagttcctgatatttaaatacaaattggcataaatgtgaatggatcatcaaatatatgtagagaacaatcaacatgagggaaaaagaaaacaagataaacaactgcactaggataaccaaaattataattttacttaaaggaaactattaagaaaaatatttactatcttcaggtattaaagatattacatccataaaataaggacacttgaaaagaacaatcagaacaacaaaatactcaggaaaataacaatttatcatatgaaattaaaattcataatatggttgacaaagctgaatacataccaaagaacatagagtaaatggtaggcagaaaatatgaaaatgagataatacaaacaatcaattgaagatattcaataaataataaaaaagaattccccaaagagaaaatagaaaatagaaagaaaccatgaagtaccttcagaagaaaaaataaactggcattagatttcttaccagttaaaatgaaagtaggagataatataatgcctttaaagttgtaagaggaaatgacttctcatgcagaattctaagcacagccaaactatccattaattgtgaggacagaatacttttcagatatataagcacttttcagatatgtatttcatataaagaattttattttttaccctagtaaaactaagggcttgggagaattcaccaagaaagaagatatgatttacaatgcatcggaagtctaatggacagaaattgtagcattataatatataattatgatttgtaaagctgagcagcagaatcagaaaagaattaatccaaataaaaacaggaaatcagtaggttcccagaaggaagttttcaggtcaatacaatgggtttcatccaacagataaagtgagcaagaagctagaaaatattaggcatactaacatcttatgttactttaataatactatttaaaaagagaaaagacaaaggaacaaattttagaatgtggttcaattctacaaatgtttaagggagacaaagatatattttcttattctcaaggaacttacatttctataaaaagtagaatagagataagatatatgaagactatacattgagagagaataaggtaacgttataaaaagtataaatgctatgggaattcaaaggaaaaaagagagcacacacatgtttggagattgaaaaaagaaggttgagttagaaattaaccttgtaagaagatccggattctgactgatgaaaatgggaggggtagggcgaagattttttgtgatatttcaaaaacaaatcattgaaaagcaaaggtagataagaatctggccatgtccgaacatgtatgaaaaaaagctagagacttgtaagcgttaaatagtagtagtccttaaatcctagactgaatttatcagatgatgtgaggggagcacttacagtttttactagagaaatggcattatcagcatactttggaagagtggtttccacagtgtggttcccagaccagaaaattctagggtcccacctcagatccactaaatcaaaaactttgggtcaggcgtggtggctcatgcctgtaaccccagcactttgggaggctgaggcgggcagatcacctgaggtcaggagttcaggaccagcctgggcaacatggtgaaaccctgtctctactaaaaatacaaaaattagttgggcatggtggcacgtgcctgtaatcccagctactcaggaggctgaggcaggagaattgttggaacccgggaggcagaggctgcagtgagccgagatcacatcactgcactccagcctgggtgacaagcgaggctccgtctcaaaaacaaacaaacaaacaaaaacacacacacaactttgcaatctcggtttcacaaatcttccaagtgattttgatgcatgcgaaagtttgataacctttcttttactctaagttaaggtaaaatcactaaaaggtacagtaatttaagggagacatgatggaaaggggatgtaagggtcattatggcaaacaaaacaaaataaaacaagacaaaacaaaacaaaaaaactctgcagctcttagtaactgattaggtgtggagaagaagcgaataactactttgaagaatgtggtagtataagaaatacttaagtcagtatagtccaaagtctttatctaatagtttatactatcttccccaagagctattcattataaacattcttataaatacattaccaaaataaggcaaagttctttatattagttttacatgattaataattctcgtttagagttccccatacatagctaacaggttagcatctttattttttcttccttgaccttgaggtaacaccctaacctacataccacatcacagctacacacatgctttcatccataatgttcaataaccagctgcggtgctcagaacctaataggttacactattagttctctatgaaggaatatccagaacaaaacaaagtcaagtaggcccaaaggaaaaaagaaatgtataaccttaataggtacacatacattttaaagataattattatagatattatcaaaattagaatgtgaaatattaaacaaatactttctaattaaaacccttaaaaaacgggcatcacccctgactcccttctctctctgtctctctcaaactctctatcaagcaaatactattggctctaccttcaaaatatatccagatcctgaccactttttgccactgccactaccaccataagctctcccttggattattgcaaaacgcttctgtcaacctgcttttacccttggctcattatgatctgtatcacaggtaggcaaactatggcacgcagggcaaatcaagcctatcatttgtaagttttattgaaacatagctacagccatcccttaagtaatgtctatggcagttttcatgctgcaatggaagagctgagtggttatcatagactactgcatgacccacaaagcctgaaatatttactatctggctatttacagaaaaaagtttccaagccttggtctatatacaacacagtagtcagagtgatcctgtgagaacataagtcacatcatgccattcctctgttgacaatcttccagatacttttcatttgaaagtaaaagctgatgtccttaaaattatctgcttgctattcctctacctcctcaagcatactcctgctgtgtacttgctgttaacactatctacaatactcctctccagatactgtgtttgctcttcacttctttaaagtcatgtcaccttcccagtaagaattccctttctcctgtacctaaaatttcaaaccattcctccttctgaacaccagttaatctcctttggcactttatttttctccataatacttgtcacctgacatatttatttgtctgtccccttatattaagtaagctccatggggacagggatactagagtgttttgttcactgctgtatccctagcacctagaatagtacctagcacagagcagacatcaacaaatatttgttaaatgaaaaagcacaagaataatagataagtaaaattaaatgacctatgtaatactggaaattaagacatttataaatttatcttagaatttcacgactaacaggattgtgcttctccgtattactaaagaagatatgtcaatatattcgaaaggtgactgaaatgcaacacagtcattacttaatattgtattccacaaataaagagggtaactttctaaataaagctatcaaaattatcaaaattctagtagagttgatgacttatattaatcttataagctaaatctaactatccttaactttctcaccctcactaccaaattttcagaccataaaacaaaaggaccacgtagttttttttaaaggtctctgccccatgttcttccgtctaaagaaccagatgacctacattctcctgaagagggttatgttcttagttatatactttcagaaatctaaagcttaatatggggtaggaagtgtgaagtagatagtccatattcaaacctgctttttaaattaagacaggagcaatctagcaccatttcattttgcattatatttagggactaccattaggctcacagtaccacagaaggtattaacgaagatattaggagactgtcatcacaaagcatcaatgtcactttttatttcaccctttaagacttagtttctagtgaaattgcttgaccagcttcattttagtctgttaaaattggctgttcttaacatgaacattttaactttaattggataaatccaacatcaggtatcaactagtgtagtaattcttttaataacatcagttttaaacaaaagtaagcctctctggcaaaacacattctttatgtatttgtatttatttatttagctcacaggccaaagtttgaagggcagagattttttttttttttcacttaaatccattgttagtgacaatgtaagtgtttaaacagtattgctttaggaatctcagaagttcaagtagaaagacatattccatattctgggaaaagacggtacaaagactttaagaatttaattttttaaaagtttcagtaactaccttcagttaccttcagttaactacctacctactcatacttttcaacaaactgggaaaaaagtcttctctaaaatcagcatctacttggcagatgtatgtcatcattgtgtctctcattgtttcatccttaaaaatgtgtaatacttttaattgcagaggtaataaaagatatttatttaaaaaaaataaagtgattatctacttctttcctgaggcacacagactttcagattttgtttatgcacgaaagcatttaaaaatgaggtaatatatatactctttcacctactttcacggtgtttacttttctatgtcaaaacatacaaagttagatcattaccttgtatgtattgctatttaaagtatcttcattggtagataaatacccagttggttccttttgttttgctatttcttatgtaaacttggtgggatttggatactagttactaaaatgagataaaatatgaatctggtttcaagacttctataagggtaaactactttaggagacagaaaaggaataggacaactctccctatcccatgacttggggtgggggtagatgagaaaaataaatggaggcgagaaggaaagaagttcaatctaagaatggagatttcatagcttggtcagacatgcatgtccatacagataaactagcagacagttaaaaaataagaaaagaaagttaagattctgaattcttgatttcttccccatatattattcagcataactagcttatatactgtcaactctccaaacaacattaaaaaacctcactcatctagcaaagctaagtttagcagactgacttcagtgaggaagaacaagaagaggaaagacagagaaggatatttacaaggttttagggttgggtgggctggaccactttaatcagcatttttcaaggtgagaacctggttagaactgacaaaatagttttggattggtaagaatgatgaaatgggaagtcctgaagcaagtctttttgggaaatcagtcttgataaataagctattttagttgtttcaccatcaagagtgagattttcctaaagcaagcatacaactatgtttgcttgttctaagttttatttagcatagaggcatggaaatattcctgccccagaattgtttatcagagtaatattatattggtgccaactctccccattttatgggattaacaaatttttaaaatttattgatcagctttaaaaatgttttagactttattatgaattgttaaaattaaatctggtactctgcaatgatatgctggagtagacaggtaaatctgaaaaataacgagagagaaagcagtaaatttacaatagttcctcaatatccatgggggattggttccaggaatcaccctcccattcccaccctaagacaccaaaatccacggatactcaaagccccttatataggagaatagtattagcatacaatgtactgcgagggtttcattcactcattcattcattttttttttttttaaactagttcttgtcctctgccaatattttgagctgatcttattcctttccttcagttggctgggtcataatctgtgttgataattctaacacagatttttgcaagtctatttatactcattctcttggagagttctcatccagtctcacaactttacttcccatctatccctgactaatccagtatacattttttctccagaactccagatacaacttaattgtcactcaagatctccacttgatgtttaatgaacgactcaaacaaaaatgctcaaaactaaactctacattctccctcaatacataaatgtaaacaatagatagatggaataaagaatacaattactttgcaaaaagactcaagaggaattagccaacaagaaatctcctgaatgctgttcagtaagattccatatgaaatattagatttacaaacaacttttggtaataaattcatgcttttagttcatgtggcattcagtatgtgggatttttaaaggttatttttaaatataagataaaaaaaccccaaatcaatccatttatacttttttagttatgtaatacaattaaaggattaatgcttgaggtaatggataccacatttgccctgatgtgattatttattgcatgccgttatcaaaatatcttgtgtacctcataaatatatatacctagtatgtatctacaaaaatttaagaaaaaaattccaaaccaaaaccacattaagggattctcctcagttaaaaatttcttcacttaattctctacttcagtccatacaatcctactaaaactgcatttcctaacaatttaagatttgctagttgctaaatttctcttcaaagcatcaacactattgatctctaaacatgatactttattgcatattataatgccatagtattctttttatctctcctcttccaaactcttatgtctcctccaataacccaggtttagcctttctacctttgttttttcttcatattgtctatgactttcattcctttattgcttcaaacaaccatttccattatatttaaaaagcagcaacggcctctctctctctttttttttttaacaatttaaaggacagatgatgcaataatgtttcattttctcacactcaaacaaaacacaaaaatgttaaatgttgaaaaaaaaaaaactggaatccagacatttgcattaaaagtcctaagtcttatactatctgtgcaacttttatctcttggtaccctagtttctccatctgcaaaaatgattaaactagctagatgacctttctaaagttttttcttctttaacattctagttcatatttttaaaactgtttacaacttatgtggctctttatggcctttattcccatatctatgactctcatacaaaaaatgaggggattctttaacttacataatattttagacaaatggtttcagaaggataggtacttgagattctgtgaaaataagtcaatgtgctcacttgttacctaaagaaagaaagcttgggccgggcacgttggctcaagcctgtaatcccagcactttgggaggctgaggcaggcagatcacgaggtcaggagatggagatcatcctggctaacacggtgaaaccctgtctctactaaaaatacaaaaaattagctgggcgtggtggcgggtgcctgtagtcccagctactcaggaggctgaggcaggagaatggcatgaacccgggaggcgaaggttgcagtgagccaagatcgcgccactgcactccagactgggcgacagtgtgagactccgtctcaaaaaaaaaaaaaaaaaaaaagaaagaaagcttggtaaacaaattttatttatagagactgtattttgaatcacctcttgatgatggccttttttactccagaacttaaagttcaattactttttaatgtaagatatcaatacacattttacttattctttcttacattattatttacaataattctcattttccccctttgtacttcctatttatataattataagcctgctttagcttttaattttgtctgctcatttgtttataattcatgtagtttggtacataggtttccattttagcatttgctaagttgtcttaatcatctgccctagtaatatggtatcctcaagctaaatcctaaccctattggtcatgtgattattttttaaggtgcgctctctctctctctcgctctctctctctacatatatacagtaagcaaatatgcttaatcagaataaaaccacaaaaatcaactttgatttatagagatcattccatttctagtcactttaatgtccaaataagacaacacaagtttacaataacaaagataaaataattaagcagggcagcagaaataaaaatttaggttaatgaatttttataaatgatcatttggaaacatattatcttgcttcacccctaactgtagtctccaaatattcaatagtgttgccaccattcattgctatgataacataccaaatatatttatgtccttatgcctggttaatacaggtttttttctctgcttgaaatatccatatgttattttctctttattcatttagatttaacttactcttttgggtccacagaaaggttatactgccccccagggcagaataaatcaccatctccttttgctttaccacagcattttgattacaatttcattacagcttgccatttattttttctcttattataattatttattttcctatccaagtccattaggctacatgctttttgaaggtaagtgctgaacatgtgttttctctggtactttctctttcccaaaatcaaacccagtactgacaatgtcttctatttttgtccattaaggtatattggtctttcatcttcctattttgactcaaatatttatagtttccaaatgtacatggtcttttaaataattatttgttttacatattgtatttacatttacacataaattgtctacatgtaaaggtccccttggaataatagcagtaaaatttaaaacttgattcctaatttgctcagttgactcactttgaacataaactatgcattacctgtcaggatgaattaagtaatattgtcgttttaagagaacttcataaaaatagtaagataggcattctttttaggattactgctaaattattctattctttaatggattattttaaacacaaagtacttaaattatttttagacaaatgactcatttgaaacctaatcattttaaacacaactaggattccagcaatattttctatgttgaataaatgtcagatcgcctcatatataaacaatattaattttaaaagtctaaaatatgtttaatattgataagacagcaacatatggatttttagaaattgctgctttaatatctctccagggagattaacttttctcagaaagaattttaattttaacactgaaaattaaaatttttgtttttaaatctataaatcattctctaaaattctgttacttgcaatggatacattgcaaaggtgccatcaaatgccttatgagttatttattatagtatcatttagtcaaatgttgtcatgaaatatgttgtaaagaatagtgtatactgctatacaagtccctcaccatccctcatcctaagggtagggatggggtggcatccctacccttatgtgtctaatccaatgtcctaatctggttatctttctctaccattattattcacttaaaaaaactaccctgccaccccaaatttagttatactatttctaccttcctcttctaagtatgtactggcaaatttaacatttagagatgtgctatagaacaaaacaaagttgggaaagataaacccataaaactaaagggtatgtttttgtattgcaaaataacatttcaaagaatgagtcaactaaaatgtttaagaaaaaatattcagtagttcaaagggaatcatttttaactactataaattagactgtaaaagaaaaatactgaatctgattcataaaaaagttacagtcaagtgtattatttgattaagtcttattgacctacaatataaaaaattcactcagtccagtaatatcagggcattttaaaggccccgttatcagttcaacataattttgaaactacaatttgtttttgttttacagctaatgtttcaatactattgtaacaatttgaacaacagaatctattttagaccttcaaggtcattgacttcttagttaaaaacaaattacaaaccaattaaacactaatttttcaatctgttttcatccagctaaatatgcaactcaaagcacttcaactatcaaccctacttgtgatgtacgtatacatttcaaagtaaaaaatcttgaactaacatcattaactggaaaattctgttctatttatttatactaacaacattttactattatttcttcagacaaaataaagttatccccatcagatgtttatccatctcatctcttgattttaatcctttctctcagttttagtctcttcccttatttccttacaaatcctggactctgtggtcactgtttattttctaaccttcaaattgtcctttgctttccatccttaaatccccaattctccttcagttcttcaatccattccttcccccaaacaacctaagaactgatggagaaaaattatacaagttgtgtagacttgttcaataaaaatataaaattggtaatttcacctctgtccctcgacatatttacctatcattaacttaccttcagttagatcctttcctaatccccttcataggctatcaaaagcttttgctactttcatcaactgtctaccccacagcccgcttaattctcagtatatgtcctgagctcatcctttatagccagttgagataattatacagatatgccacttcttgcctaccctcagatgtaacttgttactatctgaggccatatccttgcttccttctttgcaatgtacagaaggaaatatccctcattctatctaaagcattctgtcctggatattaataccatattgcgcagaattggatgatactggtctatcattcatcctttctgacatttttcttcaatctttcctgctccactagttccatcccattatccctgaagtctctcctaactaaaagaaaaaaaaaaagttcttgactccgcacatcttcttcatggaattaatttttatctctaacattaaattttttctcttttttcagccttcttctccataccttccttatcagcttgcccttaaataatgattatcctgggttccagtgtccattctcttctcactctctaccctctgagtttctcacatatacaggaactcatatgtacccctgagggattggttccaggactctgttggaaaccaaaatccacgaatgctcaagtcccttacataaaatgatgtacttatacacatcatcccacatcttttaaattatctctagattacttataacacctaatacaatgtaaatgctatgcaaatagttgttgtattgctttttgtgttttttttaaattgtttctttgttatcttttatttttcccaaattatttctgacccaaagttggctgaatccatggatctggaacccattaatatggagggctaactgtatacccaactgcttatgagacctccacctgaacatttttgagacatctcaagtcaactaatcatttttttttacaatttttctaaccttagtacttttttttttttttttccctgagacagagtcttgccctgtcgcctgggtcagagtgcagtggcacgatctcagctcactgcaacttccacctcccaggttcaaatgattctcctgcctcagcctcccaagtagctgggattacaggggtgccccaccaccctcaactagtttttgtatttttagtagagacaaagtttcgccatgttggccaggctggtctcaaactcctgacctaaggtgatccgcctgcctcggcctcccagtgtattttttatctcagctggtaacaccaaaattaatcaaagtactcagtaactagagtgtcatgctagaatcttctgtttctctcaccattgctctacaaccaatcagaaattctttcaatttacttcttaaattgctttatttcacaccctcatgaccactgtttagttcaggctttcaactctcttggattattttagatagctctccctcccctaagtgatttccatagtctggtctcaatttctcaaatccattatctatataactgctataattaacttactaaaaataaatcagatcataacttctactttcttacttcaaacacttcattacctctttagtcactttctaaagccttttatgatatgactcatgactctgccttcctccctccaacccctaaacaaaaccaatgtttcaaactctcttgaacacacgcctgtgcaatttaaggtaattgtttgtacactttattcttctgcctagaacagccttcccttgatgtgcataccagataaccttaaaatgtagctctgctatctctttcctgaaacgtttcttttttgactactactccacagtgatccccacaaggcagagttaattgcgtcttcctctggcctatccctgtaccttatacttgttcctaatactctattacattacatagttgaccctgctataaaaaaactcagaatttgtgtttttcataatggtattcatgaatgattcacgcagaaatacactatatttgacacattactttaccataaaataaaagcatgttgaaggcaagattagaaaacacttttacaaattttgaaagaataaatcaggaatccttaatcagaaatccttaataagaatactataacattcaaagaaaaaaaaatcacctaaacaactcacatagaaaaaaaaaaaagatactctaaaaatacacagaggttaagagcacagaatttttgtcagagtacacatataataattaacacaatgccttgaaaacaactgtatgtttttaaagttaactgctactataactaacactattattattaaattaaataaccagacatggatgaattaaaaattgttctaggtcataagtacttttggtcttggtactaagaactgtagattccaccaaactcctttatgtttttaaggaaaaaaaatcacttaagagtgatttcttattatactagtaaatgtgataaataaataaaataaataaaaaattacttcctaagtaattttaatggttctttctctaatgcaaatcctttcatcaacaagaaattctactgaagagatttaccaacctctacttgctaaaagtttccttcttaccacgtagtaaaacaaatgcatcaaatgattaacacagcaaaatgccaggaaattcttttcctaaaaagttgtaagttctaaaacaagctgtttttaccttcaggagcatctgcatcacatctctttggcacagaaagggttgaattgcctttatgattatcagaagttatattagtctgaaagataaaaatacagttaaaatataaaaaccgcattaataaatacatttggatttaaaaagtaatcactatgaactgtatactctgtatactaactacatctatctaacattccaaaatgtaaattttgtgcaacattgctcttagaagaaaaataattatggtaaattaaacattaaggctttttgcaataatcctttaggtcctgtgttgaacaacatggcttcttcccagaacaaacaaattccatttttaatacaaagtatagcatctgaaaggaatgctattttcagactgtggaacatgcaaagaatatcttttgtccaagcaaaagcataatcttccttcattccttcacagaaggatgtttaataagcatgacctagtgaggtaggtgaaggggatgaggcaagaagagaataaaaaggtataagaagtgagaaatatggttcaggtggttttccaggatgctgtttcccaaactcaggtcattcatgtacctccatcatgatcagtgctttatctgtttcacctacattataactaaatatttttcaatgaaatagccttttaacactcaccaatattatggatggtactgattgagggttgataggttcgttagatttttctttctaattgcatgttaaagtaaagaaagaatgaaggaagaacaggataaaaaagaaatgatctgggcacactgatttaatcatgaaagactccactaaagcaatgcttgatcaggccctgaaacataaatatggtttgaacagttaagaagtagagcaaaaggtatttttaaaaacggaaaaaaactaaacaaagtttgaatcagatatggtcagaatattttgaatcgtcagaaaatccaaacttactgttctattaaaactaaaagccacagttcgcttttgagagatcaccaccaccaataaatcagcatatgaggatacccatcatgttaaaagaatgtatagttatctacatataaaatttttataaagcctcttctaggggattcatagtgccaatgaacggacatgctgtgctcaccaaaatgttctttgggagccatattattaaaattcgttaaaacgttattttagaggaagtattttgagttttaataaagtactaaggtaaagctcagtagcttagcaccatgggacccatttaagaaactactgtaatgaaattctgtgtgctgtttcaaaaaaacaacagtatgaaacaaatataaatatgctaaaaatagaaataaaaaaccagttttagcaatattaaatataatctgatgagctaatatcttatgctaaccatcacaattaaaatttcattttaaatatcactatctttaaaatatcaaaataatcaagtttcaaatatttcacttacctctattaagtaattttggcttccatacataacatattggggagcaagactataaatcatgtagctagtgtgaaggacaataagcagaagtatcatgcagagaaaaaggagtgcttggggcctggttctacctcttctgattttatataactggaaagaaaagagtgacaaaatttcagcaatatatttcatttataaagcattaaatccttttcttgtgttatgggaaatgatttacacagttcaatcaaccattatttttcttccaaagtaaatactaaaagttcttaatcatcccaaataattttaagattattcacatggtctatttccagagaaatcttctaaacttattgtgtaacagcatctgttagaagttcatggagctaactgtgaactacctctagttctatctaaagattagaagtatgaatttaaactacaagtatcagtaatatactatggttttatataattttttataatactgcataagaatagacaatgtcatgtgtttataaacatctatttctatgaaatactcgtgacctccttatactttgctataaaaattagtttatgaaaaactctgataatcttactaaagagcttttcacatttatctatactaaagggaaatgaaaacacatggtaactgaaatataaggaaccaggtaacttgcttcatttcaatagcatagcaaatgcttttattttagcaacttaggtatcacctccctgttttattactagattgtagtacaccacaattgtactattgtagtacagactccagttctagatgggatgacaataagatcattcataaatttacatttcccaggttctttcacagccagtagtggccatgtgataaaatattaaacatgaaaaggaaagcagaagtctgttagggatttctgtaaaagtcttgttttattgatataattgtttacccctttctcctaactacctttttcttcacagaatatgaacaggataaaaggaactgcagcagccatactacaatcatgacagagatactcaaagaattacagagatattggatctgactttttgagctactgaagcaatactagattctttttttccatagcaagaaatcttttattagttcaagccactatttaactgagttctcttttacccacagctggaagtagtgtctacctgatacagcttcattttaaaattgttaatttatctcaaaataagcatttgaagaaaataaccaatgatatggtaatctttactaatagggagggctatcttttgagcttcagtgtatctattatattcgaatgtgtttctactaagaaataatataacttttggaccagggtttctcaaccatggaactattgacattttaggctaggtaagtctgccctatgcactacaggatttttaatagaatctctggcccctacccactacatgccactagcattccccaattataacaactaaaaatatctctagatattgccaaatgtttccggggggcaaaatcacccccatttaagaaccactgctctagataaaaagtacttttatgtcaacatgaagtgaaaaggctagtatttctctcacttgtggtataaagatacagctactatattctaaatctaagataatttgtaattatggagatcacacacaaaatgatgagaaaaaaataatactgtaatatatacttactctaatccaaaagaaccatatgccaatatttcgaattcctgccattgaagtaaaaataaagtacataataataattgttataagaatataatcaagagggaaaacctgaaaaaaaaagatgaaattaaatttaacatataaactataagcactctaacagtcatataaaataagctaaaaacttcattattctcatccggcaaatgtttacagtatcaaccttgatttagattaggctactgtgcttaaaaaaaaatcctcaaaaaactaacaagtaccaaactattaccaaaatttttaataccattatcttaagaaaaatactaaagcaaattaaactaaaattgcatttatctatgagataaaagacttgattaaatattaataccaaaaataatttggagaaggtcacctcatgttatataatatatcccaagtcaaattatgtataacataaaagtccaggaatatatcaatatgatatttaaagcaacatgtcagtgtgtaaattacaggcaaataaaaagtaaaactagaaaataatataagcatatgtcaaactattcataggtttttagcataataattttatgtgcaacaggatgtcagaatgtttgctagactctagcattttatactctagcagctacagtataaaatgattgatattttacttactgtttgtagtaaaggcaaaagcatattcagtggattactcaggttagctccaaaaattatgaaaccagaatctattccagctgaatgaagagctttatctaaactaaaaaaaattacaaagaatgaaatttatgttatactatcaaattttcagcaaatttagaaaaaatataatttaagcatgcaaatacacctgagtcaaagaaaacaatggataacaaattaaacctcacttaaatatctcacagctattgttcaattgatggagaataaagaaacactctattattggacgttttagccattctttgagttaatgctatagaacacttcaagtaaaaaagctacttaagatgaacagcctacactaatggcattcagcaacaaaatgtatattatcatagaatttgtataagtgctttagaaaatgtgtctactgtacttactttgacaagaagagagaaattacaaacagcaatgcaactaagatgaaaaatattccccagacgatctaaaagcaaaaatatattcattaaaatatagttctaaaagttgatattaaaagcacaaaatcattatattcaatatgagttgctagaatatgacaatgatctaacaaaaacaatctaagatacattttaacttagtatacaattccaggcatttatacctgaattttcattatgagactatttgattgagaacatgtacataaaagagacaaagcatttgaaaagtcttcactaataagtaaacaaatgaaactctttgttagaccaaatacaaagtctttattctattacactgaaatgagactgaaaagtacattatgactaacacacagacacacacacacacacacaccccaaaaccatgaaatgcaggttatattaccctgttagttaaaatagaaaatttagaacattttcccatagaagtaataatatatataaatgatatatatagtggttaaattatattacaatccataaaagcctatacaagtgatactattcctgaaacagagtactaacaacactgaaaaaattgtcaggtaaaacaatgtttctgtggaaaaaatgtcctaagcactgtaagtagtggaacatatttctcccaattgtatgaactttatattaaagatggtagaaaaagaggaagaaaaatattataactgagtctctaatgaaaagtttcagaatataaaagagttgaaatctatgttagcaaaaacctaagctctttttccccgaaatcttccccaagttgcggggacaactgggctaaagagttgtcaagaccagatccaaaaagaagagtcccagtaagcacagttaagtgtgttgggctcctcctttaactggaattgatataaatagatcaatgaatgttatgaaatcatgaatggtagggagattttttcatcttatttcacaggactgtggaagtaaattttagaatcctgagagaataaaagaagtaacacatgaaactacctagcctgaaaagatgatttttggaagtaattttggacctgtgctctggggaattcttcagttatggctgggtgcctttggggctcactgggaaggagagagttgacgagaggggtccaagaaggctatagtcatctcttgaaaagagagtgatattgcatgtactatttttcatgctaggattccgcaagagaattcattatttaaaaagggtttcattgcaaaagattttgaagtgactcctttatagtaacaactgctcattagtagagggtataaaggagttatacttttttttctactggattcaggcatctatatttggtactgtggtgaactgaaaagcaacacagacttatacttaggattctcaagtgaaaaacattccttcctaatagctgttaacaaaaaatagtttgtagcagtataactatgaaatgccaattagtagtaggagaacatgatatagaaacagcatttgaagttaagattccctctctttggtatccattttggcaaaaaaaaaaaaaaatttaaaattaaaaaaaaaaccctcttagctatcttccaaatctgtagagatgactgacccagagttagactgcttaatcagtgacttaacagaacacagaacaaatgtaaaaaatacaaatattttataaagaccaagaaaactatacatacttaaatactagaacttaaattagtagttacaaaatcatgtcagtgatgaccacattgggttgacctaaaagctacatattatactctagctataatgccaattttgaaataaaaattaaactatagaggtaacatcaataaaaatggaataagacatatgcaaaaacaatacaaagaattccactatacacttcactcatattctccaaattttaacatgttaccttatcattctcttttgaacaagtcttaattattatatatcaatttctcttgaacgaggtctttcataaccttgacattttgtagagtccagggaagttaatttgtagaatgtctctcaatttggattgcctattttctcatgattatatttagattatgcttttttccagaaatgacacagacagagaagtgttgagtccttctcaatacatcatatcaagtggcacagtcatgtctatttgccccattactgatgagcttaacttaaatcatgtagtaaggtggtttcagtcaggtttctccattgtacaattattatttccccctctgtaattaatatgttttgtggtgagatactttcagaatatgcaaaatcttgttctcaccaaacttttaatttcaagttttgtatccactgatgcctcttcccagaaacaatacgtttttttctgtggtatttgtcaaatgctggttttctaattgcttctatatttatttgttggaattctactgtagggaagaggtttcccttccccatcatttactaatgtatttacttatgtcaatatagacttatattttattcaattagttatcatctgttattatcattattttgatacctaaatggtcccagatttaggcaataggagcccctacaaactggttccttttattatacgcccactattctcttaaacacttcttactttctggcatcagatgttccaagcttattaagtgctttcccagccacagtcctagaatcagacatttctccaagcagccctggttccttttaatgaagttaggtagtggtctgtctattaattaaaacatatgcatatgcagaaatcattactttattagtactaaattaggactctattttcaatccatgggtggttgaatctgcaaatgcagaatctgcagatatagagggactgttgtaattcatctgtttttcttctccctacctcactgctttctgcttttatcttattttcttctgtgtgattccttttgttcttctgctagcttttttgggattggacatttgttttttttttttccacttttactggtaagtgtgtttcaggctattaatttctcttttttttaaatttattaaaatactgagttttatttcacatgcatatttttgtctccccaccatttccatgtctgaccaccactactactatgtcctatcataacattccatacatacttaagaccaagcaaagggtggagttccgtctttaaaaactaaacaggcattttggacaacacattattggcaatggagcctggacaacatttatcaaacatggtagggaaagttcccactctgcattataaaaaggacagccagatatcaactgctacagaaatgaagtaagacagaaaaattttaacaaattgtttaaactattttcttaaagagacttcctcaactgccagagatcttgaatagcctcctggtcagtcatccggaagcaattcttcatataattgatgaacttggcttccactttgggaagagaaccacctttttctatacttgcttgcatttttgctttaatgtcttctacagaactaggtccttttggtgttttaggagatttttcctgttttttgaaggattcttacccgtttgatcttggtattgatgatggttttgagtcttttccattctgatttggcttttgtgcatttttggctggagtatctcatatagatttcttcactggtgatttttcttcagtttccttattatcaaaatcatcattatcaccatcttcatcattatcatcatcatcatcatcttcatcagtagcaagttttacttttttctgtggaaccttgctaccacctccagggacagaccactttccagatatacttaagagtttcacatcctcctcctcttcatctactgactgcatcttcctccactgctactaaatgttgttcactaatatgcactggccctgaaccacacttcaaccgtaagaccactggtggtgttatttcaaagcccctaaggaaaattgttggctgtacagacattttcaaagttgccagtgttactttaattggactgcctttgtaatacactgcctctgcttcaacgatgtgtaattcatcttttccatcagcccctaaactgaccgttcttaaagataactagtgctcattttcatcattatccaccttaaagtgataatctttgtcagcctgtagttcacaaccaaatagatagttccagggcctccgggggtttatgtccatgtccatcaaatcttccatcaggtggcagcacacacttaggtgggagagaaggcagatggagataaacaaccacagctcaagagaacagccgcacaggacagaatcacatcagggactgatctctattttaaaggtatcccacagactctaatatgtttcaattatcattaacttttagaaattctgtaatttatttcccctttcttttcactcaaaagttgctgaatataaggttaattttcaagtgaaaagtatgttaatctattgattttgttacaatttctagttttaacgcactgcaatcagagaaaaattgtttgtaatatatctactgtttgaaacttcctgatactttcttcaggatacaattaataatacgatcaacttttgtgttccctgtacatttggagaaaaggttattttctattatctagatgtaaagtttaaaagttgtaagttataccttactgattattaggtcttctatattcttactctatttcatccacttgaaatgttttaccctgagaatgctgttattctcctattactattatatttcaatctctaccttctggaatctcccatagtttttgctttcataaaggtggctgctgtgctaactggtacatagataaccacagttattatatcttcattctaaattgtggcttttcatatttaaaagtgtgtaaattttctactgctgccaatgacacaccaccacaaacttagtggcctgaaacagcatctacttattatctcagtttctgtgggtcagctgtctgtgcacagtgcagctcagtggattctctgctcgaggtctcacaggcccaaaaccaagagtagggctatgttcccttctggagactctgggaaagaaatactttcatgctctttcagattgttggctggcattcagttccttaaggttgtagagttggagttttcctttctttgttagctatcatttgggaacatctctccgtttcttaaggctgcttgcattccttgtcacatttccccctccatcttcaaaccagtcatggcaagtcaggtcattctcgcactttgaatatctttgatgtaccctttatcacttctctctgactctaatccagaaagttctctgcttttaaaggttcatgttattagactgagcccacctgaataacccaggataatctttatatcttaaggtttataaccttaattacatctgtaaggttcctttgccacttaatgtcacaggtttcctggatgagggcatcattaggtgaagaaaaaggcactgtatctaccataaaatgtgtccttctttgttacaattggtgtattttggcttgaattctattttgtctaataggatcattgtttccttattgtttccatttgtctagtatgtctttaaacaccgtttatttttagtccttttgaactactgttttaggtgtgtctcttttaaatagcatacattggatctatcttctttctgaagaaaatacaaattttcttctaatggtgagttaggtgtattcacatttgttgatattatggacatatttagtctcaataatatcttactgttagataattttgtgtatgttatatttcctgtgttctttactccaggtacctagaataggcaaactgatggagagcaaaagagaaatcactagggaatggagaattaccgtttaataaatacattgtttccatttgaaaaagatcagaaaatgaatagtgatgatggttgcacaacattgtgaatgtacttactgctattgaatatacacctaaaaatattccaaatcatagactgaggcatatatattttaccacaataaaaaaatctaaaaaatatatgcaatataattacaaacataaatttataattttgtgtataagcataagaagtatatatagtaaaatctcaagttacatttaaaacctaatgatctagaagttacccaggccaattagctgtataagctcaaagtatactcttctgtcagggaagagtttattcaagtatttaatgaacatcagactgtaggcttagaaatgtgttcaatattatatataaaggctgttttaaagagctattaacttattctaattaggtgcttatttttataattgtcttcagcacaaaactaatctcccttcatttccatggtaggatttaagaacttcaaaaatcctacatatagaactataacagcagcagctgcaattttctgagctgtttacatcaaaaggaactgcactgcatacattatttcatttaattcccacaacaaaataaagtaagtatataattccattttaagaatgagaaaagtgaggttcaaaaagcttaagtaagaagttacagagttggtgaggagcagagcaaggactcaaacccaggattaggtgaccacaaagcctatgcttctgaaataagttatgtatatgctagggaaatgcatggcaatcacaagatcaacaggcatcttcatgggaacaaaaaaaaaaatcctctactaattttaaaaattgtaactttttttacatttgcaaaaatttaaatttaattcatttcataataagacaaacatgaattatagtagagaataaaaggtaacactggcacaaaattttgagatagaacataacttctaagaaatttaatgtcaggaacttctcaaaggtcttaaattaccttcagtatacacagagagagctgtatagaagggcaagtggacctagatccactttcttcctctagtttgacttgaatgttaatgtttaagaaacactaaatgagctgggcgtagtggctcaagcctgtaatcccagcactttgggaggctgaggcaggcagatcgcctgaggtcaggagttccagaccagcctgaccaacatggagaaaccccgtctctactaaaaatacaaaattagccaggcgtggtggcacatgtctgtaatcccagctacttaggaggctgaggcaggagaatcgcttgaacctgggaggcggagcttgcggtgagccgagattgcgccattggactccagcctgggcaacaagagcaaaactccatctcaaaaaaaaaaaaagaaaagaaacattaattgaaaatttggcttcctatttctgaattacaccaattgtagacaaacacagagataaatgaacagcaaccttcatatctcatttaaggaaaaaaagcagtgtttatctcctcataatacacattaaaccctcaattacataacgatcagtttgtacccctagagattccttcaggcatgcctattaccctattcctaacttaggatcagacatggaaagatgggtaaaaatttagatcaatattcagaaatgacacatttactaacaaaaagaataactgtactggaggtttcagccagtgaaattagaaaagtaaaaaataaaagcaattacaaatcttataaggaagaagtaaaactgtcttttagcagctgatatgatcatgtataaaagaaaacctcctaaggaagctacaatgaaggtactagaactaataatttaaccaggttgcaggatataagagtaagatacaaagacaaatttctacatactaacaacaaatattaaaaactgaaattaaacaacataatttgcaagactataaaaaatacttagaggtaaatttatcaagatatttttaagacctctactttgaacactacaaaacattcctgagagaaatttaagatgtaaataaatagatatcatgttcatggatagaatatatcaattctcccccaaatttatctataagagtgaaagtaatcccaatagatatcctagtggatgttttgtggaattataaattgattcttaaatttatatgaaaatgcaaaggatttggcaaagccaaaatgattttgaaaaaggaaaataaaactgaataatttatactacctaacttcatggcagattataaagctctattaaccaagtattagcataaagacatatatagatcaatgagtagaatggagattccagaaatagacccacacttacactacaatcaatttatttgacaaaacttccaaggaaagccaatgagcaaaggatagtcttgaaaaaaaaattatgctggaacaattggatatccacatagaaaataaaatgaaccttaacccttaagtcataccatagcacaaaagtaacttaaatggggtcatgatcccaagcataagatgtaaatctacaaaatttctagaagaaaatgtttcttaccttaggatagacaaacatttctgaggacacaaaaatatgaaccaaaaatagacatataaattaatattcatcaaaatttaagaaacatctgaattacagttaagaaaccaaaaacataaagaaaacttgccacgaactaggagacgatacaatacatatatgtgacaaagtgctagatccagactatataatgaacgcttgtatctcactcataatagaaaaccctaatttagaaaatggccaagagatttaaacacacattttacagaaaatagccaataagcatacaaaaagatgctaaatatcatttagtcaccaatgaaatgcaaagcaaaactgtgagatgctactgcatattcataagaataactcttacagacactacataagagttgacaagaatgtgaaacaatgggcaatctcttattgctgtgggaatgcaaaacggttgtaacccttttggaaaacaacttcggcagtttcttataaacatattaaacgttagatccaaaaattctactcaagtatttatccaaaagaaatgaatgaaagcacatctacacaaaggtttgtacaaaagtgttcatattagcattattcattatagtctcaaaccagaaacaacccaaatttccaccaacaagggtgagtgaataaacaaattgtgatacagacacacactgtaataccaccgaacaataaaactgaataaaccactgggcaaaaaaatagtattaaataataacatgagcaaatctcaaaaactgtgccatgccaaagaagccatcagacaaaagattgtacactctatgattccatttatttaaaattccagaacacataaaactgacctctaatgatagaaaggacatcaataattacctaaagtctgagctcaggggagcaagagagggcatgaggtagatttttcgagtgatgtggatgccctatctatctatattgggcaaaaccagtctgtacacttagtaaagttgatttgaaaatccttctaaacatatgtttggtgaaatggaacatagcatatataaaagaaggcagctgatgttagagaccagattataaatatttataaaaacctaaaaacaatttaggattaaaataaagctggagagagtttcatcatactttcagtgctatgaagacaaatcaccttggggtaaaaaaaactgggatgaattttttaaaaatttattctaacagaagatttaaaaagtgattatatagaaaaattaactgattatggtatatttttaaaaatctctttcaaaccaggcgctttttagggtgagcagttagtgcatttctttctaattataaaaggtggagaaagcagcacccaaattgaacctgactgactcatctttgaatggttctttgaaccatttctttttcttttttttaacatttaagttcacgggtacaaatgcaggtttgctacataggtaaacttgcgtcatgggggttgttgtacagattatttcatcacccaggtactaagcaaggaacccattagttattctacccgatcctctccttcctcccaccctccaccctctgaaaggccccagagtgtgttgttcccctctgtctgtccatgttgaaccacttcttttaaaatttagcacaaacccactttccagcttcattctgcctaacttcaagttagtccactgactgaattttctgaattacaacttgtgtgctattgtatacaaaggtctggtgtttgaaatgcttccagatatacaatgagcatatttggaagtctgtggccaacagtttttgttactttttagtctcagccatattaaagtgatcttaattcattctaggtaattaggtttaagtaccatagtcccaagaattcaaggctggcaaacaatggtttccaaaaaaagaaaataataattttccatgtcaaataatatctttaacatactttcagaaacataatctaacaatgaggcaaattctattactgtcagagttcctatgttttttttttttaaagtcattttgtttctcacagttttaacaacccatacaaatagataaattcataaagaaaatgtcacacatacataattggaacattattcagccttttaaaaaataagagaatcctcttatttgtgacaacatggatgtgcctgaaagacattatgctaagtgaaataagtcaggcacagaaagacactgcacaattcttatgtgagacacctgaaataggaaaaagtatagatatagaaattagaatagtagttaccagggaatgcagaaaagagagaaaaagagttgtcatctaaggggaggcagttacacaagatgaataagttccagaggtctgccatgagagggcctacagtcaacaataatatgtggtacatataaaatcttagaaagaatggatctcattttaaatgttaacaaatcaacaacagcaacaaaggaaaacatagaaagttttggaggtgatggatatgcccattacccagaatgtggtgatagcaacataaatgaatatgtatatttaaactcaccaaattgcattaattaactatgtgcagttttaaaagaaacaattgcatctccataaaagtgggaggaaacaccagtatggtaaagcatgaaaacaaaaatgtacaccaatagaaaagaatagagagcctagaaataaatccacaaacctagtcaatttatttttgataagcgtaccatgaatacatactaaggaaaggatagtcaatccaacatagtgctggaaaaaatgaacacgccaacagaatgaaactaggcccttattttacaccatacacaaaaaccaaatcaaaatagactaaacacttaacataagacctgaatctgtaaatctactaggagaaagcataggctcctaagctctaagtcccagatcaatttataggaaagtataaacttgaagaatatgctagcagcatattgcaatacttatctatatttttattttaatttcccaacaattgttgtaatacattgctcagaaaggttatgcaccttacccaaactaccaaagagagctgtgatttaaaaccagattaaacccccaaatccattttaagtaccatgctgtaatgcctcaaaaggagagctcaatctctccaagaggtactacataaacttggggaagagtgacagcataatttttaaaaacttcatttaccttcaggggacgcagagcgccacaaaattttgtccaccagctgttttcaatgaattctaaatgcctctctctcttcttaagtgttcgtaacctttcttcaaattgttttaaggcgcgtttatcccttgctggcaaaggtcgaccatctttgctctgcaaataacagaacaaaataaaagttttaccattaacatcttaataaagtacccagcagatttagcagatcaggcaacaaaaccttttcaggatggacactctttaggcaaatttacaaactaaaaaaaacctgacaactgcaatatgacaataaacataggataaccaaggtcagcataaaaatgtggatgtgtgtacatttatgcctaccttcctcttgatcccaatacatggtagagttatgtggagagagataaccatttgtaaaaacattccacaaaaagtatgtttgataagaagtgttaactactatgtactttgctcaatgattctccctcctctccaaactcactgtatcacttatttcaatatatttggctctgccccttccctctctttagtcaagtggttatgttacctgaactgatgcttctcagcccaattcaaatgctagcagaatgaagcaacacaagcacagatggcatacagaggtttttgtaacaattgctaagaactgatacttccttgttttccaagtactttggcaaatgagtcaagctttctttggccaacctatctgacagataatttccatctatttttacgcgacactttctgtaaccatgagcagtacctttctcatcatatctcatagatacactttcccactgaactctcctgctcctatcttcaattgggtacaaaaataaaacaactactaaatacagaaaaggtaaaatataaaattgtttttatcagcaggaacaagaaaaatatttgtataggattacatttttaaagtgtagatatattaggtatcagaatgtctttaatattcctattaaggtttaaataggttcctagcagatacacaacatattgctcttcccatgtatcctagtgcagcctcaatttgaaatcataactataatgcagagaaaacctatgtaacctttaataaagagatttacacagttacaacaatctctttacatatcggcatcactatgatcttctggaaccaatcatcctctcccacgacttatcttgttgcttgtcaaacttcatgcataagaatcacttggaaagtttgttaaatacatatatctaggccctatccccagaggatatgattttgtaggtcttgggtggagcctagaatttgaatttctaccaaatttccaggagatgcagatgctactagtccagagaccacacattacatactacagactatattccattcctctaagtacattgggtattatcactggatcccagaaaacgaaaactaagagggattttctgaagatcagagtaataaaatgaacactcccttctggaagataaatccaggtaacaatacttcaagtgtgtggtatgagaaggattcggcactttatatcttaaccataacaatttcccctaaaatttccattatcgtatcaaaaggatactacaaatgaggtaattttgtctcaatgctggcgttcactattttagaaaaaaaaatagtaaactgattaaaggatccacttgaaacaaacccaagttatctgcctacttggtgaatgcttcagtggaatgagggatgaatttccattctgcattgccaattgactaaacgaatataagaataattttgatcagagaaacaaatactaagatgtaaactcagcagtgaacatctacctcatttgaaagaaaaaatgtagttatacaggttaaaatgtagttaaagggaataacaaacccctggttaagaaaaaaagtaaaacatgaaagcttcccttcacactgtctgtctccaattaccatattaccattcccctttcctatggtttttactgttaagcagttaaatatccttcaacaaattttctatttacacacacacacacacgtacacatatacaaatgtatttacgatgtcttattatatgtgtaatttttcctgatcttctccctccttccaccctctgccctccagtgggccctagtatgcactgttcccctctatgtgtccatgtgttctcatcacttagcttccatttgtgagaacatgcagtattagattttctgttcatgtgttagtttgctaaggataatggcctccagctccctccatgtccctgcaagggacatgatctcattttttatggctacatactattccatggtgtatatgtaacacattttctttatgcagtctaccattgatgagcatttaggttgattccatgtctttgctattgtgaatagtgctgcagtgaacatttgtgtgcatgtgtctttatcgcagaatgctttatattcctctgggtatataccctctaataggattgctggggttggatggtagtcctacttttagttctttgtggaatcaccatactactttccacaatggttgaactaatttgcacttctaccaacagtgtttaagccttctcttttctcagcaaccttgctggcatctgttattttttgactttttaataacagccattctgactggtatgagatggtatctcattgtggtttttatttgcatttctctaatggtcagtgatgttgagcttttttcatatgattttttggccacatgtatgtctccttttgagaagtgtcttgagcacctttcttgtgcataaaactggtcttctctttttatatttatttttcataaatcttctgaataactctttgaggctgataatagtattatattcatttattaaatgagaaaaaaaggcctacagatgttatgtgcacaatcagtagagctagattttgaactgagatagtctgattttacatgacataattcttcaagctacatatagatttataaatatatctcattccttttcatcattgcacattacaagatggtatctagatttaacaacttattttgaacatgcagattatttcttttttaaatttttgttgagggccattaacaatgtgccataaacattcttacatacctgggtacaaacatatacatacaattcagcaggataatttcctagaggtaaactgttagattaaactttaattattaaataaatatttaattattaattaattttaaatattaaaatacatatgtatttatatgtacaggcacatgtcacaacattcaattttctttaaaaagttgtatattttatatactcacaaacagtctatctaatccccaaattctgataaaaatttgacacagatgaaaatttaaaagaggtccaaagaatttttaaaaaatatattgagttgttctcgacatatattattattttacagtttgtggctattgtgaatgggattattttgtattacatcttccaactaattaatgatttttatgtttacatctaggcactgtgataaactcttattagttctactagtttgtcagttgattattttagattatcatggtagatgatatttgccaacaaaaaagttattttcctttttccccctcctctccatgcttatatgtaaattctaaattatttcttatctgactcacattgccagatatatgctaaaagtaacaaggatactaacattactcctatatttgacgttaatgggaatgtttctattctttcactattaagtattatgctcattagaggcttcctttccatattttcttatctttattttgaaaagactttttaaaaaaatgtaactacaaattaacttttagcaaatactctgacatctactaagatgtttatatttcacatttaatctcaatatattaaactactttaatgtattttctgatgtatcatgtttgcatttctgagataaacctaatctgatgattatgaaatattctcttattatagcacaggttttgaattgctactttttgtttgtttgtttgtttttaaacagggtcttgctccatcatccagataggctggagtgcagcggcacgatcatggatcactgcagccgcaacttcctgggctcaagtgatcgtcccaactcagtctcccaagtagttgggactataggcatgccagtacacctagctaagtttttgtattttttttgtagagatggggttttgccatattgcccaagctggtaccaaaatcctaagctcaagcaatctgggactacaggtgtgagccaccagtacgtacctagccacttatattttatttgtattaaaatatttgcttctactttcataagaaagccggtatatggttttcttttttgtgtgctgttattgtctggtttatttatcagaatcatactagcttaggagaaaaatttagaggacttgctatttttttaccatgatctttgagtaagatttatctgttacttgaagacgacagaggaagaaaaactttttacagtatttttagaagtacatttaattggcaaggggttacatgtaatctttagcttattcaactagtaaataaaacttgaacataaatattatagtaaaatataatattataaacgacgatacctgagaactagtaagttcttgatcatacataagaaaaacttctgttttttaagtgttagaacaatgatagaaattctcaaattgctagtgtcctacattacacagaagacaaatttttaaaaatatagacatggttttgtaagggtactgtattagtccattcttatgctgctataaagaactactcgagactgggtactttataaaggaaagaggtttgattgactcacagttccgcagggctgcgaggcctcaggaaacttacaatcatagcagaagggtaagcaaacacgtccttcttcatgtggcggcaggaaggagaagtgccaaagggggaaagcctccttataaagccatcaaacctcatgagaactcactcactatcatgagaacaccatgagggtaactgcccccatgactcaattacctcccactgggtccctcccacaacacgggggattattggaactacaattcaagataagatttaagtgaggacacagtcaaactgtaccagatatgctgcaaaaaattcaaacaatgtaaaaagttatggggttgacaatgtctaagtcatatcagaaagcagctctaagacaaagtagttttatgcttcccaattacaccaaaacatcaactcacttttgatttaatcgtttgaatgtgttgttctacttcttcaatgtcttcagtgttttccaaacgttcataagcagcgcttctagtgccttttatcagatttaaaggtaacgcagacatgccataggcctaaaagaaaaacaattgaaatgttttagaaataatgtttcaaacatattatacacaattttaggttaaaaatgtcttttaaagtcataagagtcagcagttgtgaaagagtacagtcactgaaaacatggtatatgggagtgaacattatattgtctcataattctcccgtttattttgcattaaacagagtcaaatttataatactattcctcaaaggttaagttgcaaatttactgtaaatttactgtacaatactttatatcaaagtaataattacaaattcagactaatcgaaggttaagatactataaattagtaaaaaaatttaaaaaaatgattttctataaaaaacaattttctccaagtatatatagtaaacctttggtaaaataagtattttaatatatacatgttatttgattagcatatcaattatctacattataaagtttatttaaaagttctaaatatttataaccaatctttttgctaagtattttaaatattttccaagtaattttaacttattaatcagcattaagaataaacatgttattatatatactacccaatttcatattccagtcccaaatgacagctttttaatataatcattaataatacttaatggcatctgctacataaccattattcagaatcattactgaccatatttccttagcagaaacactgacaactatcacctcctggtggcagcaacaaactctgaagtggatactacattatgtacttaaatgtttttcactttccttctggcacactttaccccgtgccccctgttagatgggccatgagattgagttcaggacaatgaatgtgagcagaagtgataaatgccacgttttaggcatgaccccaaacaccaaaataccctgggtgatcctgaatgctttttctcatgctctctgctacctagctgtcaactccaagaatgacttaagatacctttagtgttaattttaattagtttaatattctaatattcttcactaaatctcttttatgcaatgattaaacattgcttaaaccacaattcaaatagcaaagcataaattctaacaaatcagctttttttttaattaagggagaagaacaaaaaacatgaataaaaattatcctgaaatcaactagttctatcatgtaatatcaactctacagtacgttgtatttagatacttacctagctgaaattattacccaatatccaaatccttgtatttccaaaggagaaacacttaaaaaaccttgcactttaaatattattaaaacataagttagtattctcattatttcccttttatcccaaaaaaggacggggtggaagaagattctgttactattagatgaaaatgtaatttggataccatacactttaagtatccctcatcttaaatggctgggactagaagtgttttggatttcagaattttttggacttttggtatatttggtatatttggtatattttggtatatttggtatattttttggacttttggtatatttggtatattgagcatccctaatctgaaaatccaacatctgaaatgctccaagagagatgaaacaagatggtggaatagaagcctacaccattcatcttcctcactggaaaaccacattttaatatctacacacagaaaagtactgtcacaagaaccaaaaatccagtaagcaatcacagtacctggttttaacttcatattactaaaagaggcattgaggaggtcaggagagacagtcttgaatcaccaatgccacccctccgccatcccccagcggcagccatgaggcaccatggaaagagaatcttttcgctttcaggagggacagcacagtggtgactaaggggactttacactgaactcagtgctgtcctatcaccgttgacaatagagccatactgggctcagctagtgcccatgcatagaaggaacatttgcaccaacaccagccagaggggaatcactcatcccagtggttggaactggagtttctcagcaagccttgccactgtgggcaaaatgctctggaatcctaggtaaactcaaaaggcagtctaggaaacaaggactgcaattcctaggcaactcctagtgctaggctgggcttacagtggactagggtggcatgtgacccagggagacaacagctaagggagtgcttgcaccattcctctcccaaccccatgaagtgcagctcacctcaacaaaggtgactctttcctttggcctgaggaaaggagagggaagagtaaagagaactttgttttgcgtcttggataccagcatggccacaacaggatactgtgccagagtcgtcaggcccccattccagggcctagctcacagatgacatttctagacacaccttggaccaaaagtggatctgctgccttgaagggtagtcaggattgattacctgctgactaaagagcccctggtccctcaataaccagcagtgttatctaccaagcacattgtgggccttggactctgggacatgctggcttcaggggtgatccagcacattcccagctatggtggctgtggtaaaagactccttctgtctgagaaaagtaaaggggactttgtcttgcacctcaggtaccagctcagccacagtaaggcagagcaacaagcagactcttgaggtccccaagtcaaggtctagactcttagaggacagcatttttagacatgccctgtccagaagggagcccattgccctgcaggctgagtctcaggcctggcagcattcaccacaagctgtcagaagagcccttgggctttaagtgaacattagcagtggcctggtggaaccccatggaacagtgtcgatggtggccacagggagagactcctctgcctgtggaaaggggagggaagagcaagtaggactttgtattgtggtggtgtgaatgtcagcttagccacagatcatcaggtaaactgctaaggtttttactccaattcctggctcccagacagcatctcagtagaaaccttacaggccagcaaagaacagcatgacatacttaaagtgctgaagatagaaaaattttaccctagaatagtatatccagtgaaaatatccttcaagtatgaaagataaagatcttcccagagaaacaaaagctaagagacttcattaacaccagacctgccctgcaagaaatggctaaagggagttcttcaatctgaaacaaaaggatattaatgagcaagaggaaatcatgtgaaggtacaaaattcactggaacagtaagcacacagaaaaacaaagaatagtataacactacaatggtggtgtgtaactagtcttgtcttaagtagaaaactaaatgatgaaccaatcaaaaaaaaaaaaaacttttcaagacacaggcagtacaatgagacgtaaagagaaacaacaaaaagtttaaaagcaggaggataaagttaaaatgtcacgcttctatttgttttctttttgtgtgtttgtatatgtagtcagtgttaagttgtcatcagtttaaaataatgggttataaaatagcatacgcaagccttgtggtaacctcaaattaaataacatacaacgaatacttaaaaacataaaggcaagacattaaagcataccaccagacaaaatcaccttcactaaaaggaagacaagaaagaaggaaagaagggaggatcgtaaaataaccagaatataaataacaaaatggcagaagtccttacgtatcagtaacaacactgaatgtaaatggactaaactctccaatcaaaagacatagactgattgaatggataagaaatccaagacccattgatctgttgcctacaagaaatacatttcacctacaaagacatacagactggaatggaaaaagatattccatgccaatggcaacaaaaaaagaacaaaagtaactatgtttatattggggaacatagatttcaaggcaaaaaactgtatgaaaagacaaagaagatcattatatagtgataagggggtcaattcagcaagaggatataacaattataaatgcacccaacactggagcacccagatatataaagcaaatattattagagttagagagacagaccccaatacattaacaatggagacttcaacaccccaatttcagtactggacagatctctcagacagaaaatcagcaaagaaacatcagacttaacctgcactacaaaataaatggacctaatagacatttaaagaacatttcatccagtgtctgtggaatacatattcttttccttagcacatggatcattcccaaggataaaccatatgttaggttataaaacaaatcttaacacattcacaaaaattgaaataatatcaagcatcttctctgaccacaatggaacaaagctacaaatcagtaacaaaaggaatttagagaactatacaaacacatggaaattaaacaatatgctcctaaatgaccagtgggtcaatgaagaaattaaaaaagaaattgaaagagttctggaaacaaatgataatggaaatacaacataccaaaacctacaggatacagcgaaagtagcagtaagagggaaaattacagctctaagtgcctaaatcaaaaaagaagaaaaacttcaaacaaatactgtaatgacgcattttaaagaaatgaaaaataaagaaaaaaccatacccaaaattaggagaaggaaagaaataaagatcagagcagaaataaatgaatttggaataaaacaataaaaaagatagatgaaacaaaaagttggttttttaaaaagaaaaaattgacaaacctttagccagactaagaaaaagacagaacccaaataaataaaataaaagatgaaaatggaaacattacaactgataccacagaaattcaaaggatcattagtggctactatgaacaactaattatatgccaacaaattggaaaatataaaagaaatggataaattcatagacacatacaacctaccaaacttgaaccatgaagaaatccaaatcctgaacagaccagtaataagtaacgagtaacaagatcaaaactgtaattaaaagcctcccaataaaggaaagcccaggacctactgctgatccactgccgaattctatcaaacatttaatgaagaactaatatcagtcctactcaaactgctccaaaatacggaggaggaggaaatagttctagtttcattctataagaccctgataccaaaaccaaagacacatttaaaaaaaaaaaaaaaaacactacaggccaatattcatgaatattcatacaaaaacccctaccatatattagcaaaccaaattcaacatcagaaagatcattcattatgaccaagtgggatttatccctgagatgcaagggatggttcatttgatttgtatttgttgaaccatcccttgcacctcagggataaatcccacttggtcataatgaatgatctttctaatcaatcgttgtaatacatcatatcaagagaatgaaggatgaaaaccacatgatcatttcaattgatgctgaaaaagcatttgataatgttcaacatcctttcaagataaaaaccctcaaaaaactgagtatagaaggaatatacctcaatgtaataaaagccatatatgtgaggtccacagctagtatcacattgaatggtgaaaaactgaaagcctttcttcttagttctggagcaagacaaggatgctcactttcaacactgctattcaacatgaaagtcctagctggggcaatcagacaagacaaagaaagaaagggcatataaactggaaaggaaaaagtcaaactacctttgtttgcaatgatataattttatatttggaaaaacttaaagactccaccaaaaaactattataactgacaagcaaattcagtaaagttgcaggatacaaaatcaacatacaaaaaatcagtagcatttctatatgccaacagtgaacaatcagaaaaataaatttaaaaaagtaagcccatttacaatagccccaaataaaattaaataactaggaattaacttaaccaaaaaagtgaaagatcactgcaatgaaaactataaaatactgatgaatgaggaagacaccaaaaaaatgaagaaatattccatgttcatggattggaagagtcaatattgttaaaatgtccatactactcaaagcaacctacagattcaatgcaatccctatcgaaatagcaatgacaatcttcacacacacacacacacacacacacacacacacacacaaaacacacacctaaagtgtatacagaatcccaaagacccagaataccaaagctatcctgagcaaaaagaacaaaactggaggaatcatattacctgactttaaattctattacagagctatagtaactaaaacagcatggtactggcataaaaacagacacacggaccaatggaacagaatagagaacccacaaacaaatctacacacctatggtaaactcattcttgacaaaggtgccaagaacatgcattgaggaaaagacggcttcttcaataaacagtgccagggaaactggatatccatatgtagaagaatgaatctagacccctatctcttgccacatacaaaaatcaaatcaaaatgaattgaagacctaagatcaaagacctcatactatgaaacgacttcaagaaaacattggagaaattctccaggacattggtctggataaagcttcttaagtaataccttagaagtacaggcaaccaaagcaaaaaatgacaaatgggattacatcaagctaaaaagcttctgcacagtaaagggaacagtcaacacaattaggagacaaggcacagaatgggagaaaatatttgcaaactaccatatgacaagtgattaataaccaaaatatataaggagctcaaacaactctacagaaaaaagcctaataaccatattaaaaagtgggccaaagattggtataaacatttcttaaaatagacatacaaatgacagacaaatgaaaaggtgctcaacatcactgatcatcggagaaatgcaaatcaaaactgagattatcatttcactctgattaaaagggcttttatctaaaagtcaggcaacaacaaatgctggtgaagatgtggagaaaagggaacccttgtacactgttggtgggaatgtaaattagtacaaccactacagagaatagtttggaggttcctcaaaaaactaaaaatagagctactatatgatctagcaatcccactatttggcacatactcaaaagaaaggagatccatatatcaaagagatatctgcactcccatgtttgttgcagcactgtttacaacagccaagatttggaaacaacctaagtgtccatcaacagatgaatggataaagaaaatgtggtacatatatacaatggagtactattcagccataagaagagtaagattctgtcatttgcaacagcatggatagaactggaggtcattatgctaagtgaaataaactaggcacagaaagacaaacatcacatgttctgacttatttgtaggatctaaaaatcaaaacaattgaactcgtggaaacagagaattgaaggatggttactagaggctgggaagggtagtgaggcagtgggaggcaggtaaggatggttactaggtacaaaaaaaaaaaaaaaatgagtaagacccagtatttgaaagcacaacaggtgaactatagtcaataataatttcgttgtacattttaaaataactggctgggcaaggtggcacatgcctgtaatcccaacactttgggaggctgaggcgagtggatcacttgaggttaggagtttgagaacagcctggtcaacatggtgaaatcccatctctactaaaaatgcaaaaaatgagccgggtgtggtggcaagcacctgttgtcccagctactcgggaggctgaggcaggagacggaatttcttgaacccgggtagtggaggttgcagggagttgagatcgcgccactgcactccagcctggtaacagagtgaaactctgtctcaaaagtaaataattaaattaaattaagtaactaaaagaatataattggactgtttgtaacacaaagtatataaatgcttgacagaagagataccgaatttgccatgatgtgattattatgcattgcatgcctataccaaaatatgtactccatctatacagctactacgtacccacgaaaattaaaaataatttttaaaagtgttccaaggaacatttcttttgagctcaaagtttcaaattttgaaagctttcagattttggattttcagattagggagggatactcaacctgtagagtaatttccctctaattacctcaatttttatcaaatgtatactttcaaaatgtatactttggtgaaatataaaaggaaaaatatataattgggtttaaaatgtatattgtaaagttgaaaagttacctactgggtacaacattcacaatttgggtgatggctacactaaaagcctagacttcaccacaatgcaatatatgcatgtcagaaaactgcacttgcaccctctaaatatattttttaaaattaaaagcatctcgtttatatttttaatattaaattatatatcctcaaaacattgaaaaatacaaagaataaagcctatgggaactaaagtacctgatagttcctttaacatttccttataggattttcctatccttattatcattttaacctatttaatttggttattctagtacttccatattctttaaacattattgataaaaagtaacagaataatttaagactctgattaatatatagtattatatgattatttaccaattctcattactcattgtattagtccgttctcacattgctataaagaactacctgagactgggtaatttataaagaaaagaggtttaattggctcacgattccaccaactgtacaggaagcatggttagggacacctcaggaaacttataattgtcgcagaaggcaagggggaagccagcacgttatatgttgctggagcaggaagaagagagtgaagtgggaggtgctacagatttttaaacacccagatctcgtgagaactctatcccaagacagtactacgaggatggtgctaaaccattagacactaccccgatgatccaatcacttcccaccaggccacaccgccgacactcgggatcacaattcaacatgagatttgggtagagacagacagccaaaccacatcattcatattattttcataatccaaaagaatgttgctttttacaacaaaatgccatggcaatattttgctaagcccagcttatatgcaggtatgtttccctgtcccctcaaccacctccaatctaggcctatttgtcctcaatgcttgttattctgtgttggatggattaggttccctgaatgcactaactgcagtactcgatactgtttcccaaggaaccttttgctctagtcagtattaacaacatggcccttatttacagtctactgtcaaacacaaggccttctgaattatcctaaactggtctgctggtctcaatttctacaaatccatcttctacactgtttctaaagtgatctcactctaatacccaagtcaatatatgtcattcctctaattaacatcctttaagattctacaggactaataaatgtatttttcaaagcattctggtatgagttcctaggaatctggaaaggtgccactagggccactacagaagataaggcagctagccatgcaggaatctgctgctactttaaccagagcaattctacttgttcccaacctctatatgtatatgaacatataaaattgttttaaaaagttgttttgctattttttttttatgaaaggtacaattattggttggtattgggaaaagactctaattaatgtaattctacatataaagcacttcatgacctgatccctaccaacttgttaactttatctcatgcttctgaattgttcatagttcttaaaacactacaattttatgctactttaggctttgtccaacatacacattttattccatgtagtgccctcatctagaatgcccaccttctcatcttatttcattaacaactgttaatgcccttcaggtctcggtttaattacaatacgtctgagaaaccttccctgacttgtaaatgtcccttgcttataactcaattataacgcataggtatattaacattattcatctgcacatttgttttatcactagatctgccaaacttggctgaacagatttctaggccagactaataacaactacagtagactatctggtatgtaatgactaagtcccaattctttttcctcctacctttgtttcaagaacaaacatttattattaaattaataaaataatttctccaagaagataataattgaccaataagcttttaggaagagacagctcttaattcacacaaagttatttccttaaatggaattgatatacttattagaagagctgaactgaatttctaaatagcttaatttaaaatattttataaaataaaaaagtttctggtaacaacttgcggtaacataagaccagaacaaaacactatttttaaatttttaattgtccgaagacaacgtagaagaaaggtgccatcgtttggttaccaagcttttagcttgtttttggactgcattttcaataattatcaggaaatttaactacaatatttagattatgataagcttgacatagaccttatataaaacattataacttttaaggtctttaaacaacaatcttttgaacttcacgaacttcacttcagactttttttttaatgtacaaaaaggctatccttttcagaaacacaaaacttttattacttactactgccctctagtgaatttccagaaaaaaaaatcagaaaactaaagagattgtatagtttaaaatgcttctattaataggttggccctaattgtctccaaatttattttgacttccaagaataaatcaccaactgtatttgaaaactaaaatgttttaaaataatatatacaaactacattcctaataacttcttttaccgctcagtttagaagggcacgttttctttacatatctctctcctttatctggaatgctggtttccaactctgcaggccttagattattgtaaagggtcaacactaaatactacctgtagacttaataaatgtcttccacatatttgtgaaatctattattcaaagatgtacatgttattatgattaatgaaacaacacaggtactcaagactttccttttaagtattcactgagtctaagacgtatatattttcttacatttaatatcagtgaaatttggatgcatctaaaaattgaaggcatcatataattgaaggctaggcagaagccatgacatagttgtcgctacatgcacattcacaaatttggtcacagcaagttacattacagtcacttcagttgaattacatgcattcttggtacaattattgagtttaattgccacttatgtcttaaaagataatatgatttgacattaaagcaaaaagttaatgtgtaagtcaggagaaagagaatgaagatgcatcggtagtaaagaaaatattcattagaataatgggcataattctgtattttcttaaaaagcaacagtcaagtgcttcataagcttaagaaaggaagatatccaaaagagaagcatttttctgcttaggtatatgcaaaaggattcccttctatatggcaagacaagaaacaacagcaaaacatcttaaatttacaggataggtgtgttggcagcttcgaagaaaatcccagagataagaatagaacacacaagaaaagctgcacatcaattctcttgatagcataaaagacaatacacttttttagcttctgtgtatgagcgaaaacatgtgaaacttgtctttctgagtccagcttatttcacctaacacagtgactacaactaatgactaaaagagtagaggccgttaagggtagggagtagggaggggagatgaagagaggcttgattaatgggtacaaaagtacagttaaatagacaaaatacaacctagtgttcaatagatcagtagggtgactacagtcaacaataatctattgtatatttccaaatagctagaagagaataattcagatattcctggcataaagataaatgtttaaggtgatggatattccaattaccctgatttgatcattacacattatatgaacacctcagactatcacatgtacctggaaaatgtgtatacctattatgtatcaataaaaataaaagacaatacagttggttcccatgtcacaatggttcaacttaggattttcatactttgtgatggtatgagaccattcttttttactttcagtacagtagtcaataaattacataagaaaatatttgatattttattgtaaaataggcttggtgttagataattttgtgcaactgtaagctaatgtaagtgttctgagcaagtttaagataagctaaactaagctattatgttcagataggctaaactaagctatgatattcagtagtttaggtgtattaaatgcattttcaaactgaaaatattttcaacttacgatggatttaacagaatgtaactccactgtaagtcaaaaaccatctgtgtcgtatagtaaaacatgaacatcaataaccaattcaaaaagtgatatagaattctcacactccaaatataaagttttaggaacgcctttcatttcatattttccttgttatgaatgcagacaaatccaacaaatctcactcactaaatataaaacaaagattataaatgattaagaaaaacttgtcagatttttccttatagtgacacataaagtaacggtgcaccttacaatcggtagcatatattcagtgaaatatgctatcacataggctgagaaatttgacttttaaagggaatttctttctctaaatattattgagaaccactgctgtgattcataaggtgttgtaacatgaactgaatgtttgttttcccctaaaattcgtatgttgaaatctaatccccagtgtgatatttgtaggtggagttttcaagagataactgagtcatgagggtgaatcccttataaataagattaatgcccttataagaagggtcacaatagagcttgcttcctctctctccctgctctttatcatatgagcatagaatgagaagacagccaactgcaaatcaaggaagagggccctcaccagacaccagacaccttgatgttgtacttcccagtctctagaaccatgagaaataaatgtttgttgtttgagccacccagtctatggtacatctgttatactgacctgaactaagacatggaggcaaaccaacatttgatgggtacaagaagaaaatattaaatgttttatttctatatttgaatctttatcactttaatgttctttaacctattagtttatattttacattaaatgtacaaagattagcataataatatgtaaatatgtatttataatcataaatatcctggtggacatatttaaagttttatggatagaggtatatagtaaacaatttagcagtcactgcttctataggcagttcactggtccatacgatacattttgctgaagacatcattattcaacatttccccacttggtggcaccaaaaaattagaatatctacatatatatccgtgcctgttaagttttacttttttaaatttagtaagtatcaattccctttcaatgtaagcttaaaataataggcaaactaatatgctgtttgacctccttctcctaaagctcactgtccaattatttggcattgattaatacagggtacagtagtcagaatcagtaaaatttaaataatcaactagtttcaaaaataaacaataatacataactaagaaattcacacttgactgacacataagataaaaaaatttctctagcctcaatacaaaaaaaaaattcagttacaaattccataacaaacatgatttttacatttcatattatatttagggtcaaagtactcaagtattaatttcccactctgggtactttaattaagattaaacctattctagtcctcatgcatattttctataccctctttcaaggtgccacaaggaaagtccagttctcaaccttttccaaggtaagttaggagaaaactttgtatcccaactacaagcaaatatgataattatactatttaactacctatctacaataaaaccacatatctataaattgttggttttcactgaatttttactaaaatttcggtaagtattattggctcatttttacagatggggaagcttgggatcaggtaatagattttaaacaaactcaacattcatgaccagagctcagctatacacaccatgatgcccctcttgaacagggtatcatctaccttcctcttcccctccctctatacaccacaggtattaaaactggccaaatcatggcttggcagcaaaacctgagctttgagtacttgtagtgctattcgaatgatattatctctctatccacactcccccaaccccaactaaccaccattcaattatgaatgcctttttgacttacctttgaataagaaacattctcactgatcatgatacaactgctttttgcatttggtttattttcactgagagaggaaagaggtgggaactatagtttgaaccatatgaaactgtgaatattcaactgtttaagctaatagtgactattaagtggccagtagattccaagacttggtggattatttaattaaatcctcactactttattacttaaatatcataccactataaagatgaagaaatttagatgggaaagtaggtcaggaggcccatggacttgagatccacatttcagcctctccacaccaattattataattttattgtttatgctgcttaaagaaaaccaataactgctaggaagttggatcttagtgggctgttacatcggaatctctcccttggccttaggccttaagtggcccctctctacctatttagcaactcttctatgtgttcctggttcccaccctcaatcccattataaggtcctctggttgttttatcaatatccttcagcccagccctctatacagtaaatcatcacataacgtcatcaatggattcttggaaactgggactttaagtgaaaggatgtataacaaaaccaatttttttttttttttgagacggagtcttgctcttgtctcccaggctggagtgaaatggcgcaatctcggctcactgcaacctctgcctgccgaattcaagcgattctcctgcctcagtctcccgagtacctgcgattacaggagcccaccactaagcccggctaatttttgtattttcagtagagatggggttttaccatgttagccaggctggtctcaaactcctgacctcaggtgacccgcccacctcggtctccgaaagggctgggattacaggcgtgagccattgtgcctggcaacaaaaccaattttactacagactaattgacgtaaacaaaagctaacttcctattgcatatttctggtcacaagaacatcaccaaacttctaaataaagattcaaagcacttctaatattaaatactgaaataaatgtaagctctacatacatttaggaaagattaataaaaacaaaatactcaacttttggtgaattagtgagtgacgatggttgtggtcatagtgggttaaattaaggaataaatgtttgcaaagtgaaaattataaagagctcctcctaccaccacacagttcaaaaacaaaaacaaagaaacaacagtgttgggctagctgaacgcttttgtattgcaattattgttatgcacttgtatgtagtatacttcatgaatttttattttacaataatttgcattcatttgctcattcattttccaagccacttattcttagttcagggtcacgggtggctggagcctatcccactagctcaggttgcaaggcaggaaccaacactggacaggatgccattccaactgcagggtgcactcacacatacctacactaactcctactggcacaatttcagacataccaattcacctaatacgcacatcttgggaatgtgggaggaaaccagagtacccagagaaaacccacgcagacatggaaacaacatgcaaactccacacagtggccctagccagaaactgttcttttttcacatcaacattataggaaaacaacataaaaaaaaaaaaaaagatgttatttgaggacctgctgtattctagaaaagtgaagttcttttaaggatagcttaaccaattcagtatgaatactatgtcagtttaattgatttaaataattttcaaagtttccatttaaatataaaatattagtttaaaatgtttctttccaataatatcattcctacaaagaagctctctttcaaatagttttagtaacatcttattttctccactcccactcgctaccctcatagcttatttaattcggagccaccagagtgatactgttaaaatgtttgtcagagcccatgccttttccatttaaaaacttccaggggcttcaaaactcaatcagtataaacttcaaaaccctaactgtggactataaagctcacatgacatggcctcttgctacctctcaatgaaacttttactactcccccttgtcaactgaattccagccacaatggctttgcctccttgctagtatctgaatatagcatgtatgtgcccacctcaggatcctcacacttactcttctgtcatggcttactttcacttcattcaggtctctgttcagatgttagaaactattcctgatctttacagtagtctcagcctctactactgtctatctacttatgctgccttatttttcctcatagtatctaccaattgaccactgggagacacatctccacgcatctttcatttctgcatattttgcaagccaggagctaattgaccccccctccgccgacccaccactttttttttctgtactatcttttcaaagatctttgtatagcaaatagtcttggtagatgcagaaaatatctttccctggagcaaaggacaggcatgcttaccatccattataaaagattcagcttccctaagctcagggttcctcttctacaatacactctattatgtgcaggtctcatctagttctctccccattgccctaagggaactgggactccgggaaccaacacacaaaaaagttgatcctatggctactgctattgctgtgagtagaagtcttacatcttcagttgtcatccacaaaactggcaggttacaagtagggtaaatatcctaggtccttcatagttcttgacattgacattacatactgaatttctctctatttttttctcctgacttatgtttcattgattgctatatcctcatttctctaaaggtttcaaagcacttttacaaatagtatcatttgaccttcaaaaatccctgtggaacattttctatttccatttaatagggaagacactgatccagaaaggttaaaggacaaacccaagattagcatagcagatcagtcacagaataatagcagttaaaatccaggtctaattcctaatttgttattaacttgtgactacttcttaaaagacaactactatgctgtacattctgtgagatagaaggataatcacccaatgatattagatgacaagttccttatgtggtatcacataaaaacacaaaaatttcaatgaataataaaactgagtacccaagtaagcacctgtaagatattgaaatgtatgtcttttggggttcttttattatacattatggcacgtgaatgatcatgtgacaaaactaaattctgctcttacgataatagccatttcctttatgtctaaaggaagacatcttaagaaaatacccaaaaatgtttcctttgtaaccagaattttcatctttgcaagaattaagagtgcttcaacataaacttcattaatctgaaaggttccagataatattaatgctgcttatacaactctcaagataggtaataaagaagcatttattactagctttttatctacaatgtgagcaaaagactcaaagagaagtctgtatacaacttggtcagtcatttataattcacaccttaccacttccaggaagactgaggggaaaaaagtctgggagtataagaacagatttcatataaaagagaagtatcaagttatataaaatatctgattttaaaagccctatatccccaagtagagtaaatctgcaaaaccagtaatagatatggtctatggttcagagttctaatatgcttataaatctattaatatgcttatattatatattatatgcttatattataaatctattaatatgcttataaatctataggcatatagatttataagcatatcaggtattataaatctattatatagatttataagcatagattattataacagtatataaccaccttcaaggttcataagttataaaatttctgattatgaaattgcacaaatacagctaaaatgatgatggctaagtagttaaaattttacccttaagtaaagaaaactgaagaaaaattgaaaaagaatcaaaatattataaaggaaaacagaataaagtttaataaattactaaggtaaaaaaattgttttataaggcaattttaactcaattatccccatttcacttactgtgtaagttatagctgccaacattccaatcaaggtcagagaactgatagaaaatgacaatgcagctaaaccatctgtgaagaaagaaaaactgttaaaaatgtacatatatactactcaaatccttatatttagcaaatcaacatagaaagctgagctgcttacacattttgaagaaataaaaaccaatatgtattaccgtattcttgaagtgctaactccaagtggagaaaagagtttctaaaggactctttaaaaattgatttgtaaaaaatctttctgactagctgagattttctttccttcacgtcttaaaattaagaggaaaattactggctaattattgggcccaaaaagagatcagcaaaatatcagatgctcaaaaggtgattaaaaagatcacatggcctttctcaatggcagaccctgagaaataacatttcataggaaagccactgaccttgactctttctcccttctcccctcagtcttgagacttccagtttctttgttcttaattttcaaattggttcttaatagataatcaaaaactaaaatcttaattaaagatttatttcactttttaacttgaaaggacaagcttgcctacttggcagaaaaataaaagcaaacacaacgagaaaataggtttaaaaatacacacacacacacacacacacacacacacaaaatactatgctaacgcattggatttaggaaattatctaaaggaaggtcaaagagtgaggggcaggaatgacactttcacataaatatatcaaattatgtaataaaatactatgcaaatttgaatattcttaggagcaacactttttccagttttaatacaggtcctattaggcctgtattgagcgagtttaaatgcaagtcctgtggaatcaaatacaaagttttgattaatttaatgtattgacattaatcttttatgagtactaataaaattataatgatctatcatcttaaaactcatgtctcagttttgtataacacataaagaaggcatattattaacaaattcacaatcacgcaaggcaaatttttaagccttaattttttaaaactactttttatcaaatcaaagacattttgatgctgttactttactgatcataccagaagtatcatgagaaggtgtttatacaactaggaggggtctgacatctggctgataattttaaggtactatcacttgtaaaatgtatctccaaaacagcgatgtaaaaatctgaaaaattatgtgtcttagaaatggtaaaatagacatgctgacatatttggccaatcgaaatgttaatattactaatagtcaaaatcatctgaaccaaataactcaaaattgatcattattaattattcccatttgggtaaaagatgaataaatgtgtgctgaagatacctgaagatgcattctctttatatattagggggtctatgatctggctgcatatatctttatgatataataaataaatcctattgtaaacaagttgtagtatagtcataaaatgcattactctgctgcaataaaaaggaactactaatacaaatgaatttcacaacattatttcatgaaagatgccaggtatacacaaaaaagaatcattaataaatggaatcagaattctacttacaatattcaaaaaaagtaaaactaatataactaatatatagtggcagaaattataacaatggtgcctctcatgggagatgatattaactgaatggaatactgcgaaaaaattgctggagtgatggatgtgttctacaccttgactgcaatcagttacaatgactatatacatgtatcataagatctacacattttactacatataaagcattttttttaaaaaaggttatataggccgggtgcagtggctcatgcctgtaatcccagcactttgggaggccaaggtgggcggatcacaaggtcaggagttcgagaccagcctggccaatatgttgaaactccatctctactaaaaatacaaaaattagctaagcgtggtggcgggtgcctgtagtcccagctactcaggaggctgaggcaagagaatcgcttgaacccggaaggcaggggttgcagtgagccacgatcatgccactgcactctagccggggtgacagagcaagactccgtctcaatcaatcaatcaatcaatcaataaaaaggtcatatacccttgatgcctgaaaaatgcaatgcaaggaggtgggatgagagacgaaaggactaaaaattaagaatagttgggtaactgttttggacttagacagctcatctagagtgataagtaacatgtattctagaatatggtgtttaacactgggagacaaaaaaaataaagactaaagagaatggaattacaaaaaacagaataatgctacctatctaatcaccaattcaagttatactaatactcaaagtataacttatgaaataatgtttagggtagaagagtagttactcaagatatctaaaggagttaactccaagaaaagaagccattaatttatcagcaatagaatcaaggtacataaatctgacaattcagtattagtagatgcgaggcctgctacccttattcttgctggtatcagcaagatattaatgaatcacaatttacaacatgagatcttaagtggaaagcaagaaaattaagaactcatacagcagactgcaagacttaatttaatcatcgtttagtattgtacctgggtaaaaagaaagaagtgctgattaaagaatgtacagtacctattagaatagtcaaaaaagcaatttttctgcatagtatttatagaattaagtacactaggtatctttgaaaataaggttactatgttcaaatgcacaaggaattttgagtaatatgatacacaatattttaatatcactttctaatgccagttattttttcaatgattaagcaattttcttaacctaatccgtgagccttttttttctgtaaaaacctaggtcacacagagtaagttaagaaaaacttctagaaaagcaatgccaaaatattttgatgaggtaaatttataataaaacatttaattcatataaaacctctaatttacattttatataaaagatgatttaatctcaaacaaaaacataaggttctctcttactaattaaaaataaaatctaatatatccagtacatttctttaacatattattttatattatcctaagtgaattaaaaatcacatagaaattataagagcctcactgctaaaatactttgaagattaaattttctttcaacatggtaattttataaagaagtcaagaaaatagctacgtaatagctagatggctaaaagcaagccttaagaatgcaacacttctaatttgtctagcattaggttcaaaatgacgagttagaaaaactgtggggttaagttcttttttttttttgagatggagtctcgctctgtcttgctcagtcccccaggctggaatgcaatggcgcaattcagctcactgcaacctccacctcccaggttcaaccgattctcctgcctcagcctcccgagcagctgggattacaggcgcctgccactgcacccagctaatttttgtatttttagcagagacggggtttggccatgttggccaggctggtctcaaactcctgacctcgtgatccaccccccacccctcggcctcccaaagtgctaggattacaggcatgagccaccacgcccagctggggttaaattcttaacaaaatacaaataaactgcttctcaaaagtccaaagtatcaggaaatataaactactatgttttttaaaaaaaacaatacttacgactacttccaagttcttcaaatagggacttcactttttcccactctgtagaatttttgttattgggaacattcaatggaacaaaggcactacaaaagagaaaataattgttttaatagctttaaagataaaaagttaaattaaatggtttgaaactcaaattatttttctccaaaacaataaataaataaaatctgtactatgcacagaggggagtgaaaagtttcttatctatgcatttacttccttgtaaatttaatagttgtattactgcattcagaaaaattagtttcctttgtaatcccgtatgttttttgcacttaaaatactttattatactttaataaagctggtaaaaaacaaaaaattaatatataatattttgagaatggaccacaggtttaaaacgatcaaaacaatccacaaaaaaggttaaggacatctgtattaaatcagtaaagcagaatgtaaacatatgcaattatttaagaaacaaaagaaatacattagaataaacagtaaatgtctcactgtggaatcgggagtgattattactttcttattagtatttttctattaatatatctttcaagattctatccaacagacacaatgaaagtagtttctatttgtttttcaacccacaggtgaaaaggaactgtagaaataatagagacagctagcatcctaggacctgctctatgatcttagactgggaaacgatagaataaataaatgtgcactttattatctagcccatatcaataacaagaagataatcaagagattaaggtaaagagctgggtatcccttaggttgtatatgtgtaggaacaaacaggagtaggaagtaactctaataccacgtccttcccaacctaattttaagtgtaagcaaagtgataagatttatcctctgttgtaaagaggaaatgaattagttcaataatatattaaggtacctgctctaataatgttttcatgtaaaacaaagtaattactctaaaattttctttttaattaaaaaaatccctatttcctgttgctactgataactcttatttaaaaaatgactgggcacagcatgtcagggggttacttaaatttctaactatctgcattgacttcagtttactatattcttcttaatcctagagacttatttctcaccacttttagaaaaaaaaaagtgcttacaggcatagagcaataaatgtagaaagtttattatttgttgccccaggtatgaaatcaaacaaatgaaagcagaggtgtggaatcaagaaataaaattataacatttttgtatattacacatccataacagaaatataaactaagcaagaaaaaactacccatatgatattcctttatttggacagtttgttctggatatcccaaaaagtatgctctgaacttgttagctgggaataaccaatctgtgagagtgggaaaacaaaaatttctatgttgtacaaaataccacccatcatactattaaaaaagaaatacgtattaggatatctaaaaatagcattcatctcatagggtttaatacgcaatattctaaaactcagtatgtcagttttaggtaatcaaagatattgtacagaaagagactaaaattaattaacccttgctcttgatgacacatgttcaactcctgagcagaattatctagcagttcaaatagagtaataccagagggaaacttatataatcaaaaaaactaaaaagactaagttaagtgacccacactactatcagaatgacttcaggaaaatactttgaaagcatccatcagagagttaaacatttgagcacatagtattttaggtataaacgaaagcacaaattcaaagcaggttcttaaattactttaccatcaggattttataatctaaaaatcagacctaaaatattttcacataaactaagaaaatatccataagtagaactcaaaatatggcaaaggcactaattaatcaacacagaccctggccttaattctgcaggacactgatgaaccaggctttcctctttcaatggagctgaggtaggggaagaagatccagagggcagagcagcacctgactggtataaaagcatgtcaaccttttaaccaccagaaggaataaaccactgttcattgaccaaatatcagccccatagacaaagatctataaagaaaaagaaatacctcccaacagatgaaaaggcaactgaagtccaataaagttataatatagatatatcagttctgaggaaagaaacagcagttaaaattatcaggtatactaaagcatttactaaagtatcaggtatactaaagtatactaaatgaaatggtgatgatattaaagtaaccgagagttagaatacaatgggatttgtgtggtagaaaggtgcacatacttttaaaatctcagcccttctaaaaaaaatgtatacagaacacctcagcttccaaaaacacaaagtactagattaagccatttatgcctattgttccattattggaatactaagcttgtgagagttatttatattttactactcaaggtcatcatcaaggtctgatttttcaccaaaaaaatttgcaacctctggcataaatgggttaaaatacaaactacagcctagtaagattatacttttccctcatgcccttgaaaataacaaaactaaaaaactgcttagtaaaaatatttcctacccaatctgattcactgaattaacttcacacacattatctcttcagaaacagacaaaggaaaagctaatgaatttcagtagatatgaaatggaaatgatgaattcagcataactgaaaataagatgttcacttcttacactccatcaccaagtcaattcatatttatcttccaaatagcttatgtttcttcctctctgttctctttgtaaccactgtagttccaatgctcacctgaacttatataatggctacttaactgatcttcctacctactatttacataccacttctccaacccaacacccaaaatcctcttgcaatacatccttcacagtgctgtaactctttttttttttttaagacggaatctcactctgttgccaggctggagtgcagtggcacaatctcagctcactgcaacctctgcctcccgggttcaagccgttctcctgcctcagcctccagagtagctaggattacaggcgcgcaccactatgcccagctaatttttgtatttttagtagaagtcaccatgttggccagcatggtctcgatctcttgacctcgtgatccacctccctcggcctcccaaagtgctgggattacaggcgggagccaccatgcccagcccacagtgctgtaactcttaaagcaaagtcatacatatttattttcatgcattcatttacacaaatatatacacatcttcactgtcttacaattaccgggtaggacaaaattaaaaatttcttttttttttttttttgagacggagtctcgctctgtcgcccaggtcggactgcggactgcagtggcgcaatctcggctcactgcaagctccgcttcccgggttcacgccattctcctgcctcagcctcccgagtagctgggactacaggcgcccgccaccgtgcccggctaattttttgtatttttagtagagacggggtttcaccttgttagccaggatggtctcgatctcctgacctcatgatccacccgcctcggcctcccaaagtgctgggattacaggcgtgagccaccgcgcccggccaaaaatttcttaaacatggcatgtaagacccagagtctacttacctggctaatgtcatatcctgtcacttgcccacaggaacacctgaaacatcatattacccttccttttttgaggggaggggaaatctaaattcacatcacactttttatgtcattcttcaaacactccatgctaacctcagcctcccagttaatatattttatagactgaattgtgttccctaaaaattcatatgttgctggctctctgctcccccattctacagaaagcctcatcttctcagcatcaccagacacattactgagacatcatggtgaaagtgaaggccagactaaatggatttggccatagtggtgcctggtcaccagagctccttttaactctggcaaagtgaatattgttgccatcactgacccttcagtgaccttcactacacggcctaaatgttccagcacgattccacccatggcaagttctagggcactgtcaaggctgagaactggaaacctgtcatcattggaaatcccatcaccctcttacagttgcaagatttcaccaaaattaaatggggtgatttgggcgctgattatgttgtggaatctaccagcatcttcactaccatgaagaaggctgaggttcacttaaagcagggaaccaaaaggatcctcgtctctgcccattctgctgatacccccatgtgatgggcatgaaccatgagaagtacaaaaatggcattaagatggtcagcaatgcctcctgcactatcaactgcttagccaccctggacaactgtggcatcatggagggactcatgaccacagttcatgccatcactggcactcagaagaccatggatggcccctctgggatactgtggtgtgacagctgtggggctctctagaacatcatccctgcctctgtgttgccgaagctgtgtgcaaggtcatccctgatctataggaagcttactggcataactttccatgttcccactgccaatgtgttggttgtggacctgatgtgccatctggagaaacttgccaaatatgatgacataaagaagatggtaaaacaggcattggagggtcccttcaaaggcattctggactacactgagcaacaggttgtctcctccaactttactagtgatactcattccttcacctttgatgctggggctggcactgccttcaacaaccactttttcaaactcattttctgatacgacaatgaatttggctacagcaacagggtggtggaactcatgttccacccggcttccaaggggtaagagcccctggatcaccagccccagcaagagcacaacagggagagagaggccctcagctgctggggagtccctgacgcactcagtcccttaccacactgagaatctcccctggacacagtttctgtgtcagaccccctgaagaaggagggacctagggagtaccacctttgtcatgtactatcaataaagtcccctgtactcaactctccaaaaaaaaaaaaaaacaaaatccatatgttgaagccctaacccccaatgtaatggtatttggatatacgtcatttagcaagggaattagtgttaaatgaagtcacaagggtggggccctaatcatcccatggcattggtgaggaagagacaccagagagtgctccttctctctcctccaccctctcactctccccctccccttctctctctgcaagcacaaaggaaaggccatgtgaagacagagcaagaaggtggccttctataagccaggaagagaactctcaccagaaaccaaatttgccagcaccttcaacgtagacttctaacctccagaaccatgagaaaataaatgactgttatttaagccacccagtctatgataccttgttatggcagccaaagcagatgaaaacattatacatgttactcatcttttttatttgtcaagtcagctgaccaattcccattccttcgaatctcaactcaaatattacttcctcttagatctcctgattctgcaatgcagagtaagaacctgctcctctaccatcaacatctggtatgtatctcctatcagagcacttaaacactgtaattaaaggtatgtatctgcatgcctccacaatgtaaacctagaggacagagaccatggtcctctacctttagccctaagatctagcacagtatccaacacataagtgtttcaaaaacgtatgagctacatgaattagttaaatctagatcacggctttgccataaaattatctagttttattagcaaaagcatatcacttaaaagaaactctgaatatgccaccttcaaaaatatttcaagaccttttgtcaatcagttaacctaaatgcacgcctcattcaaatatttacgtatgataatgagaagaacactgtcctagatggctgaaatgctaatagtctttaattcactattttcttattctcactgttgcaaagatttgtagttttattgatgattctcactcatgttctaaaataggagttggcaaactattggctgcctgtgtttataaataaagttttcctagaacacagtcatgttctttgtttatgtattgtctatgattacttctgagctacaagagagacacaaagaccatacagacaataaatctaaaatacttactatctatgctttaagaaaagtttgctgattcccgctccagataattcaggtttgcatacaagggacctcgatgttaacaagggaaattaacataagtagatttggctttctttaaaaagccaaaaaaatactttagaaatatactccagagctaaaatacatagaaaaaccactaaaaaaagtgcttacaaaagtactctttttcatgacacatcaaggcaggtaaaaagaactgaaaatatgacttgactataaaacacatgcatcctaagaactcctggaactacaaaaagttcaagaattttattcccattactcaacaattttattcccattacaagttacatgtaataagtaatttttttatttatggaaagttatttattgaaaattgtgagactaaattataaacagaaactttaaaaaatttattaactcctaatatatttcctaacataaaaaatgagactaatgacctatttttaacaaagataaatgtcttccattaacaaggataaattttagaagtacaaacaaataagcaaaatcttactgatattagtataaaaacaagaagaattaagaaagggaattcattgacaaagatttaaaagactgatagggtcaaatctgaaaagatgcacagacaagaattttcatcaaagtgttatttataatggggaaacattataaatgtctaagcagtcatcactagaagatcagttaaatatatttttgtatccttagaaggaaacgcaatatagtcaaaattgatggagctacacttactatcctgcagagatgcccacaatatgttaacaggcagattaccaagaattatataaaacataatcacatttgtgtaaaaagcatgtagaatgcatgcaagaagggaggtgaactctgcttgcattcaagcacataaaaatgtctagatgaaacaacatagacaaaactgttaaattgtggctattgttccttggagatttagagagtggattgttcttttttcttacatttttttctttcctagatttttctgaatgatccttttattttttttttcaaataattctatttccatttcatggtttaaaaaaaaaaaatcaagacttacccaactaaaagaagcagtgcacaaatcacaacaaatcccaaagtatacttgagtgccgttttaatttgctagatgccaaggagaaaaaagtataacatttagcaagccctttaaaatataaaatattcttgcaacactttaacagtaccttcacatcagatacatgcttacactcaatattgaaactaaggttgaaaaacaaccttaaaatttaaagaaaacaggtatactacatcttaagtatctttgcaaaacatgagattttttaaatcttttcaatagttaggcccttgtaaaaaccaatccacctaaagcatagttaattctccagtaggcatctttagtaaaattatcagaatatgtaataaaatattcccccagacagcaatcagaatctacaatgccccaacccaattcatcaaaatggtttataacaataataaacacaatatatacgtttgtgtttgagtatatacatgagtatatattaaatatatttgtatatatacatactcatatatacatatataagtatatatacacatatacatactcatatatacatatataagtatatatacacatatacatactcatatatacatatataagtatatatacacatatacatactcatatatacatatataagtatatatacacatatacatactcatatatacatatataagtatatatacacatatacatactcatatatacatatataagtatatatacacatatacatactcatatatacatatataagtatatatacacatatacataaatatatgtgcatatatacttacatacattaatatatatcttatacatatataacatatatcatgccaggcactgataagaacgtcacatatgttaactcatttaattctcataataactctaagataggttgttctcatctttagacataaggaagcttaagtccagagaagttaataatctgtcctaaggcacataggtcataagtgattaaataagtacttaagaccaggaacttgggaatttaaaaaccatgttttgcttggtgcttataatatactccaaaggctaagaaaagcaaataaagacaaagctggacattctgaatacgaataaaaaagttaataataatctcattttaaatcggtcagaaataacatttgtcctctcagactaacgaagtatctaaaaatcatcttttaaaatctgaattaatgtttcacatagttcttattcacaaagggggtaagatattctttaggaaaaaaactaaagaaaaggtaaagaagatcctaagatcaaccaaagggtagaagaatgtgcactttggaagaagtgaaagagaacgcatacatctcgtggagatcttatcaaatttgtaactagctaccttactttacataccttggtttttccaaatatagagtaaaatagtatctgcaaataacaattttgactctcttcataaatatttaaatacctaactttttttctaggagtcatttaaaatactgttaatttacttgctcctaatcttaatgcaaatgctcttgaagttttaagcatgattaagcatgatgctagcttttgacttaatacatttatttctgtatttaaatacaaatataaacaaggtataaaacaaaatcctataagtcaaaaagataagacatttagtcttattgtataactgttcccctaaattacagtgttcgattttgacatataccttttaacatatatttttttctttgacctattaattactatatattaatagatttcctgattttcagtcatccatgcaattgagagacaggcccaactcggttatataatatcaatatatttctaagatgctcctgaattatatttactattattttagttgtttataccaatacttaagtgataatggtcggcagttctgaacatggatgtgtgctgtatttgtcaggtttttaaaaagtcggtcctttttttttttttctgagatggagtctcgctcttgttgcccaggctggagcgcagtggagtgatctcggctcactgcaacctccgcctcgcgggttcaagcaattctcctgcctcagcctccggagtagctgggattacaggcccttgccgccatgcccagctaatttttgtacttttagtagagacaaggtttcgccatgttggccaggctggtctcttaactcctgacctcaggtgatccgcccgcctcggcctcccaaagtgctgggattacaggcgtgagccacagcgcctggccaaaaaaaaagtcagccttatcctggattagtaagaacaacctacaagtgctccttctttatgcttttgaacaggggccagcaaactacattcagtgtgccacatctgattcatcttctgttttactggatcataaaatgttcgctgtctctggatacttttaacactataatggcagacttgagtggctaagacagagaccatatagcccacaaatcctaaattatttactacctggccttctacagaaaaaattttgtatgcctgatctagaattgctttgtctaaaacaatagttacaagccacatgtggctagaaagcacttgaaatgtggctagcttgattgttgtgtaaaaaacaacccaaatttcaaagacttagtgtgaagaaaagaaacttaatatttcattaatagtttgactatatttgaaataatatttggaatatattatgctaaatacaatgtataattaaattaatttcaactgtttctttttattttaatttagctaacattgtatttctattagacaacactgctctagaaaaaattcagtcattcattctctgaaaaagcaggtaatattatttttctttcctaaactaaggcctctaaaataaagatacttacagtacatttactagtatcatcatcatccttttcttcataatagaagtagacaaaagggatccagaagaacacacagaacaatataacagaatataaagctgtggaaataaataataaaccgagctttactaaatacatatgtacttaatcatggttatctatctatatgtatatatattcacttaacaaattcactcccctatctgattccctcttctcataactctttctatatagtacatgatgcccaaatagccttttctgtcccatgtcccaagaaatcaacagtattatcagaataacaacccataattcaagttaactttacagcaatttctaacaatagtaataactgggtcaagaacaattgtggcagctgacatatgagctcttactctgtactaactacaatgctgagaacgtcctataaaccatcccatttaaatgaactttaacttttgtgttcattccaacttaaatttgagtacacttgacacaacatttgctattccagcaagttaaagaaacagctataaataatattctttgtgatataaataattttctcatctcaagtttaaaaaaatatgcagtattatataaccaatcttacacaaatcaaaatagagaaaaggtaaaaagaatagtagaacagtaaaattagactctctatttacccatcaatggaccacaggggttgcttccaaattttgcaatttgtgaataatgcagctatgaacatgcaaggacaaatagctcttcatgaccctgttttcaattcttagattatattcaaaattagattcaacattaactgataggaattactatttatctgctttttttaaaaaaaatgttagatttgacatacttttaaccagcagtcagtcaaaatatttatctaaattcaatatagagcttaagttaatccaaagatacagtacctttaacaataaaaacagaataaggaacatttgagacttaagcctaagaaacctgttttaaaatctgtatattcacattcatttgtttgtacatattcatgaaacataatagtaccagtataattatataaagcaattacagaatgataatcattgtattgctttataaaagaaagcagctgttaccatctcagacccattaggatggctactaacaaaaaacaataataatgacaagtgttgtcaaggatgtggaggaactggaaccctgtgtgctgctggtgggaatataaaatggtatagcagctgtggaaaacagtacgatgtttcctaaaaaaatgaaaaatggcattacatatgatccagcaattctacttccaggtgtatgcacacaagagttgaaaacagactctcgaagagttatttgtacacccatgttcctaactgcattgttcacagtaactaaaacatgaaagccacccaagtgtccactgatggatggatagagaggcaaaatgtggtatacaggagatcgagaccatcctggctaacacggtgaaaccccgtctctactaaaaatacaaaaaaattagctgggcgtggtcgtgggcacctgtattcccagctactcgggaggctgaggcaggagaatggcgtgaacctgggaggcagagcttgcagtgagccgagatcgcgccactgcactccagcctgggcgagagagagactccgtctcaaaaaaaaaaaaaaagttaggaaatgatatatggctatatgctacaacacagatgaacttagcataaccaggacattacgctaagtgaaataagccagtcacaaaaagacaaatacgatatgactctacttatatgaggtactgagagtagtcaaaagcaaggacacagaaagtaggacggtggttgtcagaaggagagaggaagggcagaatagagttactgttaataaggtatagttcaattttataagatggaaagtgttatggagatgaatggcaccaatggctgcatattatgaatatatttaataccactgaatagtacacttgaaatggttaagatggtaaaaaaaaaatacggaaaaaatgcatgttagtaatgtataataaaatctaaattacttattgtgttggaagaaatgactttaaagagttgtcttaacatttgctagcactatctcatttatctggaggacacttatgaaacagccctactacatgcaatacagataaaagaaactcaaatcaaataggaccctaaataatcaacagaggcgcagagttaatttatacttagcaatcacaaaatgtctgtcaacatactgaatttggcactatagacatttaatgaaatttatgcaggcttttaatattatgagcaactaatagtgacaataaatcttttagggcaatgaatattggtgtttctactacaaaccaaagaatagtgagttttaacatttctattgcaaatctaacagccaacagacataaacatttatctgcaaggaacttaaacaaatttacaagaaataaacaaccccatcaaaaagtgggcaaaggatatgaacacttctcaaaagaagacatttatgcagccaacaaacatatgaaaaaaagctcatcatcactggtcaataagaaatgcaaatcaaaaccacaatgagataccatctcacgccaattagaatggttattaagtcaggaaacaacaaatgctggagaggatgtggagaaagaggaatgcttttacactgttgatgggagtgtaaattagttcaaccattgtggaagacagtgtggcgattcctcaaggatttagaaccagaaataccatttgacccagcaatcccattactgagtatatacccaaaggatcataaatcattctactataaagacacatgcacacatatgtttactgcagcactctttacaatagcaaagacttggaactaacccaaatgcccatcaatgatagactggataaagaaaatgtggcacatatacaccatggaatactatgcagccataaaaaagaataagttcatgtcctttgcagggacgtggatgaagctggaagccatcattctcagcaaactaacacaggaaacagaaaaccaaacatctcatgttctcactcataagtgggagttgaacagtgagaacacatggacacagggaggggaacatcatacactggggcctgtcagggggttgggtcaaggccgggggagagcattaggacaaatacctaatgcatgcaggtcttaaaacctagatgatgagttgacaggtgcggcaaaccaccatggcacacgtatacctatgtaacaaacctgtacattctgcacatgtatcccagaacttaaaaaaaaaaaaaaaaaaattgttaacaggtattccaaagctttaaaaacttaaatacaaaatgccatttgtaaatcaccctaaataccatgccaatattaggattaacataatcaaataaaataatttgtgtaaactagaaaaaaaagtgaattagcacaacagacttgagtaggctgacagcctcacaacaaaaactggttgataaactgataggtggagtaagatttagcttcagcctgagtatgccactgtgtctgttacttggtgggcttggcctttagatagccaaacagcctaatgactattttataagcatttctggtgctcctaatcttgtgtgataaacaatcttttgaacacctaagttaccattatatttaattagcatagcaaagtataagacaaattcctgtacctcaataaaaagacaacttttttaaaaaatgggtgaagacttcaatacttcacattagaaaatatacacaatttctgggcatggtggctcacacctgtaatctccgcactttgggaagccgaggcaggcagatcacctgagttcaggagttccaggccagcctggccaacataatgagatcccgtctctactaaaaatacaaaaaaactagccaggcatggtggcaagcacccgtaatcccagctactcaggaggctgaggcaggagaattgcttaaacccaggaggcggaggttgcagtaagcccaattcgcgccactgcactgcagcctgggcaacagaacaggactcaatctcaaaaaaaaaaaaaagaaaaagaaaatatatacattggtcaacaagtacattttaaaagatgctcaacaccataagtcatcaggaaaatgcaaagtaaatctaaatggctaaaattaaactggcaataccaagtgttggcaagaatgcagaaacaactaacattatcatactttacttgtaggagtgaggtacaacactgtaaaaaactgtttagtagtttcttatcaagttaaacatatacctatcatgtgacccaacaattttcttcctctagcaataaagtataacaacttatgtaaaaggacctctgcccagagaagcttggttgatttgcagagtccagggcacttattggagacttgcaaaacaagtgcatttgcctaagtgaccagctttgattaccaaaactacagactccaaaaaggaaagcaagaattctccaaaaatcatgtttttgcacaatctaaactagccagtagtgcatggttccatatccagctgtacaaaaccacctttcaattagtaacatagagaacacaccaagggctaagttcctaggagttagtcaaaggtaagccacacaagcaggacctccctgaaaacatacaagcattcagcaatattaggtctgctgcattaactcttttacaataatgatgttgagagaaatattatatgcagtgatcaaaaactggaaatgatccaaatgatcaacaagtggatggataagcaaactgagtgatatattcacataaaagacgatcacacagcaataaaaaagaaacatgagaaacagatgaatctcatagaccttgtgttgactaaaacaagcccagacacaagactacctttctatgattgaacataaggaagtttgagaatggacaacactaatctgagaagtcaaaaaaaaatggggcagctattgacttaaaagatgtatggcaaccaaaattcccatgttgctggtaaaagtgcccacaaaagtttttagcaatcaacatctggggaaatgaagtggagaacagacacaattctcaacagactataatatccctctagtagtcaatgattcaaaataggtttaaaactgctctaaatatttgtttccctgatacaaccttctaagctatcttctaataatctgttctttctcagtgtcctttataaagatttcttcttttagtccataaatgttgaactgtaaagagagaattaaatgaacatttattttataacatttatcatatgatcagttctaatgtcaagttgagtttatatatctgtaaatgggggaaaaaatattgctgcctccactatcatgaaacaggaaaaactgcttttttaaaagttctacatcaaactcacagccattttcaaaggcaaattattcttgactctaaagttatgacactctcatatcctaacatctctataaaatatgcttttacttataaatgtttttgttaaaagattgctactagcaaataaaagataaacagatttttggtttagcagacccactaacatcaaagaacacattaagaaaaaatttttaagcctcatgtccatagaaattgagcgaaattaaactcatgaaacaagttggttttttaaaacaacttatcgagaactagcaaaaaacaagtgaatagagagccacttaaaggtcatggacaaaaactgtaccaaagaatacatagtaattcctaagatgtttaaacatatacgaagcaacaatctaccttttaaaagccacgtatcattaaattataactcacatgaaaattaacttggatacattagacttttaaattgttaaaaattttttaaacatatccttcccaactaccaatgaaaatagctaacatttacatcaaaacacaatgacaaagaaaagcagtcaatattgtgacagaataattagtcattacaaagctttttgttttagaggtcaaagtataaagatattctgggaattctaaaagccttctaaaattatctatttacccagctgaaaaactcctgagtcgagactgatagttgcatatctatacccatttcctttcagctggcactccctttcttgaccttcccccttcctactgcagcctacttgaaactgatacatgatggcttaaactctagcaccattttaaaatctgtggtgaccttaagatggaaatcatgtcctaaggatggagagtagagaaggaatgaacttagtactctcatgatgttatggcactgccataccagccctggatagcctatctccatacttactttaagtgagactgaaacactatatgactatttaaaccaggaacttctgaactgctaatagcagccacacacaattcctgaaacagaatttggtactagaaatgggcaaattcaaatatttattcctgagctattccaagcccttggtcatcttgtctgtgaagggtaggcataatagatctcaactaacttttgccactgaacatgataatatcatgaggtgccacagaaaatcccatgggttcaagatatacttctccttgcattaactgtgtagcagcaaccctacttcccctaatagggtcaatcactccatctgatatggtaactattcactggaattagatcaaagtggcctggtagaaatcataccttctaatggaagggaaccattatttcatcctacagtggaagtactcccagatgtctagtaagaattataaaccagtaagcaaggtaagaagcaaaagttttgtgagtaacaaaccactcaaaattactaataaatgaactactcaatactgaattaggaataatagtgtaaacttctatgctcacttctacttcttagttactggtaacaagtatatattttataggaggaagagaaacataagtgctcactggtccctggcattctctaaaatgtagacagacttttcaactcattttacaaggctagcagtcttaatactcacacctgacaagaataataagacaaagaaaaattacagaccagtctcacctgcaaattgattctttaaaagaatcccaattaagagagcagcaaatcaaatccaaaaatacatttaaaaaacaaaccaaaaaaaaaccaccaagatggccaatttaggtttatgctaggaatgcaaaattagtttaagtataatctagccatgtaatacctgatataccacttgaaagaataaaccaaaacaaacaaaaaagctttatatgatatcttatagatacttctgtatcttaatagatacagaaaaggtcccttttaaatgtattcatttaacaaatacctactgagtatgtttcaaccatcattctagggagcagtatacagctaaatcaaaacacagaagcctctcatgagacttaattctagtgaggaaaagacacaatatttaaaatcgtagtatgtactactcaaattatctttaaaaaatttcttaaatcaataagaacacaacccaactgaaagttacttgaagcagaaaactgaaaaagccaacaaattttttaaaaacatacaatttcatttacaaataagtgaaacatagactagtgaactctcatttcacactcaccagactagcaaaaactaaacatgtatgacaatatcaaagtttagaatatagagcaactagaaggcttatgttcttctaataagaattacattagtacaaacacttagcaaaatagcttgtcattatctaccatactgaagatgcatataacttatgatctatccgtttgactcctatgtatgtactctgcacatatacaacagaaaacatgtgcaagaatgttcattgcacaattttaacatcaaaaaactaaatgtccacactgattaatatgtggcatagtcatacacaatgaaattatactttcttcaataatctgtataaatgtctagaacatgaagatgaatgaaagcaagcaagccatttcatataaagttcagaaatgtaaaactaagtaagaatataacatgataaaactgaaaggcaaagcaagggattaacacaaactaaatttagagtatttctaagggagaaatagaagaaatggcatcaggaaaaacacaggagacttcaaaatgaccacctcaaacttcacacttaatatgatcaataaatagtctgctaagcataaaagcatatgtcaagtaaacatcaaagatgttgatatttgcaagactgctgtggtaggcagcttctaaagtggctcctgataaccctgcttctgtattcacgacctgtgtaatctcagcttgagtgtgggctggcactagtgacttactgctaaggaacagaatatgaacaaaaatattgggatgtcatttctgagattacgtgacaaaaagactggcttccatcttattgctgtatccttctctcactctgagacgccctggctgccatgttgtgagctgccctatagaaaagtccacgtaacaaagaactgatgttacaggccaagagagagataaaacccgaggcctgtctcaacccatgtgagagagcttacatgtcaactctctcccttgcggaatcttggaatgactacagtcccaccagacatcttccttgtagcccaacaagagaacctgaccgagcacacccaactaaggtgcatctggattcctcacccaaagaaactgtgaaataaggtttgctgttttaaactgctaaatgttgaggtaatttgttacatgacagtagataactagtacaactgctgacagtatagcaaagtgagtcagatgtgctgtgtaagttctaagaatatacaacttgagaataaaaatcatttacagggttgaacttagactttgtattctgaagaacagttgttttccccatggatatttttggttatttccccttctcaatggtatttattccaaggtttacactgcaatgccatttttttaacaaaaaaaaaattgttaaataaaatggtcagacaaaaggctaaataattcatgctataattcacaattgtatagcaacaaagaatcacattccaatgtataagccttagtccttcataactttttaacctcatttttttaatctatgaattagggataagattacaactctagaaaatcaaataataaaagtgcaaatcctctaagattttaagttatattaatagcaactatcctttactgactctccataatatacacagaactgtattataatcttcacttacattagctgattcgatacttttcccaacaactttgatacacaatttacatatcctgaaattcacaaattataactgtgtaattcaataatgtttggtaaatttataaagttctatagccatcactacaatccagttttagaacatttccattactccaaaaaaagttgttttgtgccagttcacaaataatccccaatcccctagcttgaggtaaccactgatctgctgtctttagagatttgccttttctggtcattttatatgcatagaattatataagatacagtcttctgcatctggcttccttcacttagcacaggggttgggattttttctctgttaacacataataaatattttcacgtttgcagtttatacatctctgttgcaaatactcatctgtgctgctgtagcaaagcagtcatagacaacacataaacaaatagacacagccaggtttacacaagccatgccataatttgccaacttgtaactcagattgctgaatatattaatatagtccattgtatgcgcatactgcattttatttaaacattcaccagttgttggacatttgaatactttccagtttgggactactataaaaactgctactatgaacatctttgcctagatattgcattcattcctgttgggtaaattcctaggagtggaactgctggaccatataggaaatttaactttttaaagaagttacaaatggctgggtgtggtggctcatgcctgtaatcacagccctttgtgtggccgagacaagaggataacttgaagccaggagttcaagaccagcctggacaacacagtagagaccctgtctctaccaaaaaacaaaaaaaaaaaaaggaagttacaaactgtttttccaaaacaactacaccatattacattcccaatagcagcattcaaagattctagtttctctatatacatggcagcacctgggtattgtctgtgtttcttattacagcctgttacagactgaatgttggtgtccccgtaaaatccatgtgttgaaaccctaactcccaatgtgatagtatttggaggtggggtctttggggggtaattaggattaaatgaagccacaaggtaggatcccatcatgggactggtgtccttagaagaagaggaagagagaccagagttcaatctctgtctctgccatgcaaggacgcagcaagaaggtggccatctacaagcaaggaaaagggtctccgccaggactgaagttgttgagaccttcaacttggacttcctagcttccagaattgtgagaaataaatgtttattgattaggtcacccagtatgtggtattttgttagagaagcccaaactgactataagacagattttggtactgagaagtgggctgctgtcctaacacatatctaaaaatatggaggtcgctttggaacatgccactggacaattttttttttaagtaatgttataaaatagcaaagaacttgggaactgtgttctagtgttttgtggaaggcaaagtttgccagtgatgaaactgaatatttagctaaggagattcctaagcaaagtgttgaagaagtggcttgattcctcctgactgcttagaataaaaagaaaaaagaaaaaaaaaaaaggaattgttaagcaaaatgagccagaacttgaagatctggaaaattctcagcctatccacattgcaaaaaaaaatggaaaagcttgttttgaagagaacactaagggtgtatttgataattagattagtgaagatatgaaccaagaagaacctaatcagccatcccagcagaaacactgccagtttgaactgaaggggaggaagatgggatgaaatgaaggaaggttgataggcttcttggatcctacaggaccagatcacaaacttgtttggctatgaaaatgtactactctacaagacataaaaagaatgtccccaaaggtgattaagagatcaaggctgcatcctcatttcaaagggggtgggaggggattgtctaggtttcaacatgtcagagaatagctgccttgaagccttgtgggtacaactcctacccatcagagccttgaggtttaacactgccccgcagaatggtagaggcaggaccatcaccacagtgggtcctgaaggcatagggtcaaaccaaagaagactgtttttgagctatcttataattctaatagtatctgcattgctaggttttttactttattgaaacgcttttttccttctgaattttcccttagaatgtctatcctatacctgtactgccattatattttaaaagcaaataacttatctggttttagaggttcacagtcagagaagaattatgactcaggataaattttacttgtggtcacacacatatctgatttagaaaatatttagacgagactttgtactttagagttgatgctgcaacaaacttaacactcttggggctgttaggatggaataaacgtattttgcataggaaatggacatggattctgggctgccaggagtggaatgttatgcagtaagtttgtccccccagaattcatatgttgaagccctaacgccaatgtgatagtacttggagatgaggcctttgggaggtaattaggttcagatgagggcatgatgttagggcccctgtgatggcattagtgtccttataagaagagaaagagaccagagtacatgcgctagatcgttacctcactctctctctctctctctctctatgccatgtgaggacactgcgagaaggcagctagctatctataagcatggaagaaggccttcattacaaaccaaatctgctggctccagaactatgagaaatacatgttcgttaagactcccactctatattttgttatagcagccttaactaataagacagcattctagttgatgtgctggtatatctcattgaaaacgtaatttacatttccctaatcattaatgatgttgaagatctttctatgggtttttaagccattcataaatcttccctgattaaatgcctgttcaaatttttgcttattttttaattgaatggttttattaatgattggtaagatacattttgaatataagccctttatgatttatacatgatttacaaatatgtttggcttgtctgtggtttataattatttttgttttaattgtgtcttttgaaagacaaagatttaatattgatgaagtataacttattaaggtttctcctatgaatcatgcttttggtgccatatctaagaactctttttctaacttaaggtcaccaagattgtattccttaatttcttttcttttttttttttttaatttgagatggagtcttgctgtgtgacccaggctggagtgcagtggtgagatcttggcttactgcaacctctgcctcctgggttcaagagattctcctgcctcagcctccccacatagctgagattacaggagcctgccaccacgcccagctaatttttgtatttttagtagagacagggtttcaccatgttggccaggctggtcttgaactcctgacctcaagtgatctgccagccagggcctccccaagtgctgggattacaggagtgagccattgtgcccccctcccttaatttcttctaaaagtattatacttttacagcttaggtctatgattgatttttgagtatggtgtaaggtaaggctcaaaaaaaatcattttttgcatataatagtccaactttcccagcaaaaatttttttaattgaatggaattaaactgaattggcacagctgttgaaaatcaattgaccatgaatataaaggtttatttttggactctgaattttattccattgctctatatgtctgaccatctgcaatactatatagtcttgtttactgagttttatattatgttttgagatctgaggatgtaattctctgatgtcatttttcttttccaaaatgttttttggctactgtaaatcctgttgacttccacgtaaattttaggattggcttgtcagtttttcaaaaatatttttaaaagtctgtgtgactttaatagaggctgcattcaacttataggtcagtttgagagaaaactgacataattgcatctttacagcattgtgttttcaaccccataatatggaattgtttatttaaatcttctttagtttctatcagcaatttttctgtagttttcagtgtagaaatcttatgcttttttgttaaatgtgaagtacttttttcaccctttttgatggtttctgattggaattgcttttctcagttcatctgaattgtctgtttctagttttcatatcaatcttatacttgtgattctgctaacattactcactggttgtatttgtccatatataggttccctgaaattttctacctatagaatcttatatcacctgtgaaagtaagacagtaataattcttcttttccagtttggatgtatttacttaagtaaatatttaaataactaaataataaaaattaatatttaagtaaatttattcatttaattatttatttatttatttagacttatcacactggctagaatcactagtacaatgttaaatagcagtgttgagagcagacatagttatcttgctcctaatctcagaagaaaagtattcagtctttcaccactaagtataatgtagctgtaggcttttcatagatgtcctttgtcagcttgggaagttctcctctgtaactattttgctgataatttttaatcaatgatcgatactggaattttttttgcatctattgagatgatcattcatttctgtcctatgtatgctaacatgtatgttaagtaaagtaatttctggatattaaagcaaccttacatttctgggatgaattcacttttgtcatactatgtaattctttttatatgacactggattcagtttcctaaaattttaagaattctgtgtctacattcatgagggatattagtccacagtttccctttcttgtgatgtcttaatatgattttggtatgaaggaaataatggcctcaagtgagttgggaagtgttccttcatcctctatttcctaaaaaggttgataaaggattggtataatttctatttataatacataaatagaaattggtataatttcttatttaaatatataattggtataattatttaaatacataatatgtgaaattcttcacatatttcttgtgtgaagaaatctaggtatggggttctctttgtgggaatattttaaataaataattcaacttctatgcttgctacagtgctatttcttcttaaatcagttatggtaattgattcaattggaaaattgtctaggaatttatccacttcatctaatttattggtataaagttactcaacattcctttgtaattcttttaatttctgcaaagttggtaatgccacttctttcattccttattttgataatttatatcctttttctctctctccctctttcccaatgccctaagtctggctaaagatttgctgatttcttttttttcaaagaacctactttggtttgaattttctttattgtttttctgttttctatttcattgatgtctgctctaacctttatttttcttctgcttgtttaaagttcagtttgctcttctttttctgttttcctaaggtagaagtttaggtagttgagaattcttttttaaaagagggatttaaagctgcaaattatcctctgagctctgcttgagctatatcccgtaaattttgatatgttacatttttattttcattctgttcaaaatattctccaatctaccttgtgatttcatcttgatccatgggttatttagaagtatgtggtttaaatgccaaatacttgtggattgccaagatttttttccattgctggtttctaatttaattacattatgattggaaaatgcactttgtatgatttttaatccttttaaatttactgataattattttataacctatcatatagtctatactgaagaatgttctccatgtgctttaagtcaattgtgttctgcatccattgggatacaattttctacatttttaagttcatcagtattgttgtttacatcttctcaaccttcactgattttctaactgttctatcagaaaacaattatttcctaaccagtaaagagttggttactcaaatttgcaactaatattggtgaattatctattttgcctatcaattctgcccattttgaatttgtgtattttaaagctctgttaataggtgcatacagaattataatttttctgtcattttaatgattaaccattttatcattatgaaatgtccgttgtcttaaagtctattttatttgatattaatatagtcatttcagctgtcagaattactatttgcatgacatcttttactaaccttttctttaaccatatactatttgtgtccctgaatctaaggtgtttctcttatagacaacacgttgacgaatcttcatttgttgatccactatgacaatctcatttgattgggggtatttagactacttacacataatataacaattattgatatggctgtaattacatttgccattttatactttattatgtcttttttgttgttccaggcttctcctttactaccttattttgtattaaaagttagtttctacattaccaattcctgacttattttatagatatttatagatacataaaataagtatatttttgagtcattttcttagtggttgctataggaattatactacataccttaatttatcacaatttaccttcaattaatattcacacaatacaggcaaaatatatattttttaaaaacttgctccaaaatagctctaatacttctttttctttgtgccattcccatcatatattttatgtctatatattataaaccctaaacccaacatttacagtgttataattattactttatacaatcttaaatcttttacaaagataagaaaaggagaaaaaatatagtgcctttatattaaacattaaccattataatttctgatttctttcttcctatgaatttggtttactgcctagtgtcatttccttttatccttaaagacttcctttagcattcttgtaagaaagggattcttgcaatgaattttctcaggttttatcttggaatgtcctattccaccttcatttttagtggattttagaggacacagaaatctttattttttttttcttttcattttagtgccctctggtgtccactatttcacattagaagttagtcactaatcataaagatgctgttatgtaattttttggctgcttttaaatttttgtctttggctttggcttttaataatttaacaatgatttgtccaggtctgtatctctgcttttcctacttgggcttcactgagcttcttagatgggtagattgctttttggccataatttcttcaaactttttttcctgccctcttctttctcttttcattctgagattcccatcacacatacataggtaaacttgatgctgacccacagatctctgtggctctactgatttctctttaatctttcctctctgatcttcagattagatcatctacctttgaaattcactgcttctttcttctgtcatgtcaaacctctggtaagaccctctagtaaatttttcacatcagttactatattcttcaatctcagaattttcattttgttatttttaaaatcatttctatctcctttttgaacatctctatttgtcacactttattttcattcttagcttactttgctgctttaaactgatttacaatagctgctttgaagtctttgtctgctaaatctaacatctagaaatactgtttccactatatgctgttttccttagcattgttcatgttttcctatttctttgcatattttataattttattgaaactggacatgttagacaatatgttgtagcaactctgtattacgctttttgctcctgaaggttgcctctttaattcctttgttcacttatttggcagggttaagtctataaaatctgttttccacaagtgtgcaactgctgatgtgtctattttttttaacgatttttttagtgttttttttttttaatttttatcccagctcaaaaaaatatatatttatttaaattactgtttttaagcctggcttcctagggattgctcctgtgtctatatagcttaataatcagacaataaccagaaataaactttgctcaaacaactcaagccaataagacttccagcccttccttgccaatgaacctgcatattggtaggagagtgtattaaaagttcaggccaattgcccctggcttttcctttctggtctcctacacacgtgtagagcctctagggcagccaggagtacatgactaggttgggccctctccagtctccaatacacatgtatgcagcttcagccagacatatgcttgtcccaattatgaccacaatcccatgctagtagaatcctgggtcctctccgctcacctgactccaagattgtcacttccataaacaatagcactagaagtgagcaccacccaactgagtgagtccccttctgatacagcagtacagctgtaggtcctccctggacccaccctgccctggcagatcttctgcaataaccaagctggaagttgggggtagggaaacataacagccctaggctaaaatacaagaaactaccactgtcccttagcagtttttaagtataaacacttctcagactgttgtatgtctttcattgattgctaaagaactgaagctgttgttttctgttcagttttgtccaacttcatatttgttttctggtgagagaatctgccaattttcaaacttggccatggctgaaatcccaccccactcactcaatcttaacaacacggaagtacacattattctctctcattaacaaagtaagaaattcaagtgagtttccctaaattacatagaaaataaaaaattcatgaatttcacaaatatttgagtacctactatgtgccaatatctgttctttgtgcttaaaacacatcaaggaccaaaagagataaagattcctgccctagcacagtataaattctagcaggaggatacaaacaataaacataactaaaactatataatgcatcagaatgtaattaaaggctgtaaagaaaaaaaatagactaggataaaatgagccagagattgaaggtaggcctcattcacaggtaacatgtaagcaaagatttaaaggctaaaggagttaaattagtcaagtaaataactggaagaaaagcattctaagcaaagggaacataaagcaaagggtctaaggtaggagtgaaactgaaatgttcaaggaacattaataacaacattaatataacagtgatggagagatgtactagttatctactaccatgtaagaggctactcaaaacttagtggtttaaaaaaacatttactgacagattctatgagtcaagaatatgagcacagtttagctgggtccccaagctcagaatttctcccaaggctgcaatcaagatgttagccaatgcagcagttatcccaaggcttgactggggaagaacctgcttccaggttcactcactgcgtttttggcaggattcagttcctcactagctgttggctggaggccgctatcagttccttgctatgtgggcctctccataaggcagtacacaaactggcagcttggttaatatgagcaagcaagagaaaaagccaaggagtatgagcaagacaaagtcactgtcttctacctaatctcagaagtgacatcccatcagcatcattttagccacattctctttggcagacgcaaatctctaggtccagcacacactcaaaaggagggaattacataagggcatgaatattaggaggtggacagcactgtgggccatcatgagagtttgcctagcacagcaaaatagtagatgagaacaaagaagtttgtggggtggggaagaatgtcagatcacataaggccctgcaggcttcagtaatgacttcgtcatttcctctgaattacatgggaagctacttcagggttttgagcagataaggaaaagacgtatcatatttttaaagaatcactctgactgctatattgtcagtaaaacaagggtggaaaagacagacttctgtgataaccccaaaagagacaatggtgtcttagacaggattatagctagaaaaaaaaaaggtagtgagaagtggtcagattctagataaattttgaaaatcaagcacaagggaattttctgccatatttgactcaaaatgtgaaaaagtaaagattcaaggatgactctaaggttttcagcctgagaaactctatccttcttgttgctatccacaagaaaaaaaacctactgtatgacagattaaaggtcagttgctttagaaatgttaaatttgagatgtctttgattttttggtagagttctgtaacggttggacataggattgtgaagttccagagaggtctgcacaaagattcgaaactgggaattgggcatataggtgatatttagaaggaagcaatggtataaaatcaccaaaggattaactgaaacagaacaggttcaaggattaacccgtgggacatacaaatattttaaaaggtcagaagaaagagaacgaaccaacaaaggaaactcaaaaggcacaaccaagaacataagaagaaaaaacaagaacatatgtctcaatctccaaaatctggagtgtgaaggaaggtttatgatattaatgtgacaaatcatcagttcatttagagacaaaaagtacaagtcacactagttataagtccaagagatcacttgctttcttagtatttccaactggaaacaaattcttacgctactaggtctctagagattatctagataatctcttgagcaaacttaacagaaaccacttagaaaacatcccctttaattaagaatactttcttttaaaaagggggaaaaggggcaggagacaggacagaactgtatcttatcaaacaagattttgtaaaaaggattttgaatcaaacaaatctaaaaattagtctcagtctttctatcttgtctggaaaagcactgaaatatattattagagatgttttcaaaacaatagtgtcaagaaaattgaaatttgatgagatactagtcagttctttcaatattaactttcctatatcattgcactaacagagaaaatttctcttgttctcttatctgatttgaataaacagcagtaaataacacctatttagcactaatcacatgtctcacactcctaaccttacgaagtaggtactactttatcaccatttcacaggtggagaaatcacaaagaagtcaacttcaaaggtctcatgtactcttctcaagttagattctaggagttgtaaaccctactatgatttgaatgtgtccctcaaagttcatgatcactacccaatatggtagttttgggaggtagggcctaatgggaggtatttgggtagcaagggtgactgctcatgtgtggattaatgtcactatcatctgagtgggttcattataaaaggatgtgtgtgcctccattgcccttctgccatgggatgacagcaggaaggcccttaccaaatgccagttccttcatcttgaacttcccagcctccagaactatgagccaataaatttctgttccttacaaattaccaagttttgagtattctactttaacagcacaaaacacactaagataaacctaagttcaaaatacataaaaaagtttccagatacaaattatcagcacctaatcaatagggaatgaagagaaacttccaaaaaactctcttaggtgctctaaaagtatggcatagaaactggaactgaaaagcttcccggtccatcttattctcccttagttccataacttaattcatctaaatatgtgtatactttgactcactcctatttttactacaaaattgttttaacagcaaaaaaaaattttattaaacacctaataaactgggatttttctatgaacatccatacaatggaaaacaatgcagtaaaaatcttttaaatgtacatatataatatcttcttaacagctgcatttgaaaagaccaaatattgtcaacaaccccatttttcatcaacactagcatggataaactacggtatgttaatatagtaataagaatcaacagagtactgttgcctgcatcaatatagatgtttcaaatataatgttacacactgaagaagccaaacacaaaacattatgaactatatgattcaatttacatctacacacaagatgatagcctgaaaactagtgtcaagagaagaaagtctatgtggatgatatggtttggctctgcgtccccacttaaatctcatcttgaattgtaataatccccatgtgtcatgggagggacccagtggaaagtaatggaatcatggggacgggtatttcccatgctgttctcatgacagtgattaagtctcacgagatctgatggttttacataaaggggagttcccctgcacatgctcttgcctgccaccatgttagatgtgactttgctcctcctcgccttccaccatgattatgaagcctccccagccatgtggaactgtgagcccattaaacctctttttctttataaattacccagtcttgggtatgtctttatcagcagtgggagaacaggctaataacatgaggaattgataggccagttacagaagaactgaacaaaaatagcctcaaataattcctgcttagggtttgggatagttttaattcatttacccccgcctttcattaatttcttttacatgaatttccttttacttaatgttttttctcacttcttacttttgcatgcatgcaggggttgtagaaatagggagaggccaaatataaagataaaaataaatttgaaataaaaacaaattagataaaaggctaaaacacagacaacataagggataaaaggactgcaaagcaggcttaaatatgaaattaaacagaactcagaagtcactgctaagcctgcatagcaggtctaaatacaaaattaaacaaaactcagaactcaaaactcacacgagggcagttttataaaagaaaagagtaggctgagtgtggtggcttatgcctgtaatcccaaccctttgagaggccaaggtgggagtactgcttgagcccaaggagttcaagtttacaatgagctatgatcacgccaccgcactcctgcccaaaatacagtgagatggaaggaaggaaggaaggaaggaaggaaggaaggaaggaagggagggagggagggagggagggagggagggagggagggagggagggaaggaaggaaaagatgaagaactaaataaaacattcaaaagaaataaaaggtacaaatccttaaagtttctggggcgggcataaccttcccagatgagggagtcacctgatcagagtccttaggtgtgcagggaataggatgaaaatgaacaactttaccctctcatacttcaacaagctccagaaaactgaatctgctttgtaagtagcttcagttaatgaggattattaataactaatcaacagctggggagtgctcacaaggagaagcagcaggcagcctgatttctgccagcttctcagaacaaaacaccccaaattccattaatataacagaagatccttaaaaatgtggtttccagaccctaggatttgcagagatcctctcagggtattcacaacatcaaaactgtttgcataatgatactaagatattatgtgcctttccactatgtttacagttaaactaatggtgcaaaaacaacagtggataaaactgctgcccctttacaggaatcaagatagtagactcaaattacactagaagtcattgtattcttcagggaggagggagatttgagccttttattcacaaaagtcccttttgaagcagtaaaaattctagtgtccacatttgcatatatatccttttaatattctgtgtgacaggaaatacacataaaccatgctgtacttgtgtctcacaacatctcaattttgtctgcgctctttgagttgtgagctacagtagccacttttttttcaaagaacatcatttttacttgaaagaacaactgacagataagcaatggttatccagacttgattattagacaggctttctcaaaaatgaacagtgagactatcactccaaaggaaataagtgacagtatttgtcaccaatgataaaactgaagctttcaagagaaaattagaatgttggaaaacttgaatctatctttgagttttacagcatctcaatatatacttttctgataagaataatggcaatattaacaaatgtggttttttcaatgtataatgatatgtgtcaacattcagaagacctatattattcactgaacaaatattttccaaatgaataaggcataatgtcaactgtcttatttggcatttgacaaatggacaaaagatccattcaaagtgcaaatgggccaatagatttcaatgtcatggagtatgaaaaagcagtgagactataaatttgaatcagtagtttaaaagtagttaacactcctaaacaatttcattgaggaagatgactaaaacttctttaggagttttaagagtttaaacctttttgatcagtttctcctctatggaaaactagcatctaaactagcacctaaactggtacctaagaaaacttgacacatacagaaaaaaccctgcattagtaactctatgaaggaaaatatgtatacagtttactcaaagttatcatgaattaggcatctaaacattaatcttaatattctagaaaagagattatcacatgatttgttaacagaaagctcttcttttgaaaacacacatggaacccgaacataaaagacaattaaagcataagtaggtcccatggagtcaatgcttagccgccttatccctcaaacctttatctcattgcacatgcacgagacatctttagaaaagccactgacttaggccactggtttctaaacttggctgtgctaaaatcagaatcagtaccattagctttttagtaatagattcacaggctgcctaacacaacaaagtaaattagaatctctcgggatacaatctaccattctgtattatttaaaatgtccccagtgggcaggtgcagtggctcacgtctgtaatcccagcactttgagacgggcagatcgcttgaggtcaggagttcgagactagtatgaccaacatggcaaaaccccatctctactaaaaaatacaaaaattaactgagcatggtggcgaacgcttgtaatcgcagctactcgggaggccgaggcaagagaatcacttgaacctgggaggcgaaggttgcagtgagccaaaattgtgccactgcactctagcctggacaacaaagggaggctccatctcaaaaaaattaaaaaaggggtccgggcacaatgagtggctcccatctgtaatcccagcactttgggaggctgaggcgggaggatcacctgaggtcaggagtttgagaccagcctggccaacatggtgaaactttgtctctactaaaaatacaaaaaattatccgggcgtgatgacatgtgcctataatcccagctactagggagggtgaggcaggagaactgcttgaacccaggaggtggaggttgcagtgagccgagactgcacttcagcctgcgcaacagagcaagactctgttgcaaaaaaaaaaaaaaaagaggccccagatgatttctgaagctgctcttgggagttcagtgctgctaatccttcttataagtaacatccccagtactatttatcaaaaggcagctcacttaacagtaagaagctacagctgaggaaataagaactactttgggctatgccatttactgacaaactgatcttcaacatctctccacatcaatatcttcatctgtgaaaggtagaaaatacaaaaaaaaaaagggggagagagggcattcatgaaaactagataagattttgaatgtaaaagtcttacacagtgcctagcaaggttagatcatgaaaatatgttgatatattaagagggataggaaggattagacaaacttagcctctgacagaagagatggataaaaactgtgttttctgtttgaactctgtatagtcctcaaaatccaggagaagacaaattagatgtttcctattagggcagttagatagtatctagcatttgaaaagaaacagctgagcttcaggatagtaactaccttcgaagctacggaatcctttcagggtcctagctgtaggtcacctctgggtcagagccaaaggcctattagccatagctgagatggagatgactaatattataccactaaccattcatattatccaattaaattttcttgttttgattccatggtcataaaacaaatttttcaattcataatctggctttttaaacaaatttttttcctagatcactgtctcaactatcctattcaaagcaattatatttctcactataaattaagttctataggaaatcaagccttaagtcccaagacatctactgtttgtaatgattaacttatcacacaggcatttaaaatgatactaagggcacattatccttgagtggattgaggacacaccatctttgggaggactaagaaaaatacttacaaaattcttttctgtgggcttaattctctccatggaacaaactgaaaaagcctgcatgaattaacattccagtttacaagtcttttgcgaacttaattacaaaggattagtccaatggcctctaggttcaacgataagatacagttcacagaccttgacttcactaacgtataaactggcttatctcaacatatgttctacagaatcactacactttagtgtcatacaggtgacagacctccccccctaaaactttgtgtagaagtatttatattctatttatactaaaaaggcaacattctacttaatatagctccatttcaaaacttttaataggtcaaaattgtattttattatatttaatatattcatcagaaataataaattatattttgaaatttcataaatactaaaatctacccgaaagaaataaaatttcatggggcctacagattttagattaggataaaggcaaaggagcaaagcagctgaattaaaattcaatggggcagggcacggtgcctcacgcctgtaatcccagcacttcggaaggccaggatgggcggatcactaggtcaggagttaaagaccagcctggccaacatggtgaaaccctgtctctgctaaaaatacaaaaattagctgggcgtgatggtgtgtgcctgtaatcccagctactcgggaggctgaggcaggagaatcgcttgaacccatgaggcggaggctgcagtgagccgagactgtgccactgcactccagcctgggcaacagggcgagactcagtctcaaaaaaaaaaaaaaaacaattcaatggaactcgaaaacatatcccatccatagaaacttttgtagatttttttcagtttcccatttaatgtcctactgaaatcttactcagaatctttattgctgaaaaaaatgacatccttctcctaactcaacaattacacttttttttataaaacacaagtttcatgtttattcaaagagaaaattctggaaacatttagcttttgtattattataaagcttttataatctaatactgagaatgatgtttgagggagggaaggaggaggagccaagcaaccataagtctgggattaaaatgactctgtggagagtaaagttgatagtacaaattccccagagactgcagtctactaatggcaatacttagaaaaaatttttagaaaattgaaatttaaaatcaaaaaaacaggagtgggaaattggtaatgataaaaggagaggtgagatttaaagtaacttgactgaactgctacaaagaagtgttacaaagtgaatctaaatgaagcaaagtaggttcaagaagtttcaggattttgaaaatgaatacatattatttattcctgttgtagaaaacagaaatctcatatgtggtttcaaaattaaaagtttatatgtagctttatattgtaggagttattaagaaattattgtaggcagatagagaggaaaacggtccttaggaagttttcatcttttaaagcatctccagaaaagtttaggcaacctttgatatgcaaatgcaagccattagaaactgggtccacccaaacctggcaataccagcactcttcttcttgcccttgccccacatgttcctggcgacatggccgtccccacatatccccacctgtgtagaagatcatggcaccctgtattggcatattaaaaggctaggtgggagggtcctttttttttttttttttttttttaacaggctatgtggatgacatgcctggtcaaaccaatcctgagccctatgcaaatcaaacactggcaccttcagcctcttcatatacctgactggtatccgtggcaggtggggttccctctcttggttttggagctcccctccctctgtctctgtacaggggagcttatttctttcttcccccttctttcttgcctactaaactccctgctccttaaaactactccatgtgtgtccatgtcatttttttctaattcgacccaagaggaagaacctggggttctccactcatcggagtcgtatcagtattttggttagcagtccaaatagggaaagaaactgaaagatacttactatagtaaccgtataatacagtgtcctcaatctgtctgctgacattagcattagcccagtcctaggataaaaggaaacaatagaaatattaatgaaacacccatttgcctaacaattaaaagtcaagttttaatacgactgaatatcacttccaaaatctatccacccacataaaaacaatctatgtcttcaataagtgagagacagacaatagacaaatttcagtatgtaaatgctgagataagacaacacagttctgggaaaacacagacaaaaggcacctaactcagactgaagatgaggaatggcttctcaaaaatgactaaactgagacctgaaaggagggagaatgatctcagggaaacagaaaatagtaggaaggaaagagggagtaaagaacatacacagaacgtttgaaaaaagcttcaagaagctaaatatagattaaattgagcttttggaaaggtaagagaaaccaggtggagagagggaagagaaggacacatatgtcaggggcttgtgagtcatgctgagtactttggactttgtcctaagggcaatggaaaatagtgatgaattttatgcagagagcaacaaacctgattagtacttcagaaagaacatatttgagcatattatacatttttttaaaaacctacaggaaaaatcagtctaatctcctttgcattcatcccacacaagggttgttcgaattactaagcttagaaaatataattcaaattaatcttttccaatagaaaaaaaatctataccctattctgtcagaactaaggtacaatgtcaagcctttttggcctatactctaaattctgtgcatgtgaaaaattaaacgtggagaatctaaaggacttatcactgctattaagtataaagcaaaatttagaatccaggtcagtgttttataaacacttaaagagctcaagtcagtgtcaacattctatgagtgctcttaaaaaagggcatcaatatttaattctcttaagataattaaggatttttcttttctcttttttttgcccataaacacctctagcaatgagtagctataaatttgctgataaatgcctaaaatataaaaaaagtagaaaatccaaacttacttctacaaaggcaaaaccttgatatccaaagcacaataaaaacaatatgttcccaatagtaataaggaatagtaacaaacccttaataggccaaatagaaacatttatgttaaccatataaaaaataaatcacaggatataacaaatttaataaatggaaagtcatctgttcccacatttaaagattgtaaataccaactgccatccaaattaatcttaaaattaatatatatcaccaatcaaaatcccattgtgctaggaggtagagtatattaacatattgattctaaaaatcatctgacaaaacaagctagggccagaaataaatttgaaaaagaccaacaagaaggaatttcccaattactatcctttactaataaaacgtgaaaatccactattatataacctttcacctacctattggcaaaatttaaaacaataacatccagtaatgccaaaatgtggagggaaagccatctgctacacagtaagatagtctaccatgtagacattctttattgaatcgatcctaaaaatattcacacaaattaggatggatattagtacatagatagtttattcattggacaatactacttgtccaacaaattacctcaggagctcttacaaagcgataagctagcccaaatgggcccttcctttcccacacagcaggagctgtaccaaattccatcactcattggactaagagacccaaagtctccaggtgttcagcaattgtcctagcattcagtgaactacttgtacctactcagctcatattctttggcacccaagtccaaggtgtttattctacctgcaagaccattcttaagaggccaggtgcggtggcttacatctgtaatcccagcactctagaaggctgaggcaggtggattgcttgaggtcaggagtttgaggccaggcattgtagtacacacctataatcccagcttcttggaaggatgaggaatgagaattgctttaacttgggaggcagaggttgcagcgagccaagatcatgccactacactctagcctgagcaacagagcaagactctgtctcaagaaacaaaaaaaaaaagagagagagagagaaaagactaggaggttatatgcctctactaaagcacctgcactgtgggagagtttctctctttgcctaatgtagttacaaaagaacctgagcacttgctgacccttgtcagggtaaattagaccctgtactaattaacatttattggttttgggccaagagtcctttacccaacaatattcggtgtagggtcgtttaaaatattttttaaaagaaaaatgaaactggagacaatctaaatgccagaatagaaatagtaaaatttactactgtacatgcataacatagaataacatgttgacattaaaaacaatgagacctatataaactagcatagataaatatctatgaagtacttttgagtaggaggaaacagaacaaatcacaaccaaaagttttaacacatgtaatctttgtctaaaaaatgtaatgaaagaaatacccaaacatattatagaaaaaatgaaaagaaaatgtaagtagcgcttaccacacagaatgggaaagcactggggagaattctgtgcaatgactgaaaattttttcatcaatgattcaagtatccaaatgaatatgtacataatcaaagcttcaactcctaagagctgtgcttctttagtgattacttctgtatcaaaacagaaatttaaaagtatttttgtgggttttgttctgtttttgagacagtgtctcactctgtcacccaggctgcagtgcagtggcatgatcatggctcactgcaacctagaccttcccaggctcaggtgatcctcccaccttcaggcttccaagtagctgggaccacaggtgcatgccaccatgcccagctaatttttgtattttttgtagagactgggtttcaccacgttgcccaggctggtcttgaactcctggactcaagtgatctgcctgcctcagcctctaggtttacaggtgtgagccaccatacctggactaaaaggattttgaagatgagcaaattaagaacaatgtatcaatgggccagagaataataacaactatcttttttttacttcttatatgttatacaaacttcccaccaatttccaagacagccccaggaggtagtaatgtctccactgagaatcacttaaaaattagtttaaaatcagacaaaatcccaatctcaaaaaaaaatattaaaaataaaaagtctgaaggttaacttgaagcaaaagaatcattgaaatttagcatcttttactctataaggatcttttgcctaaccagttcttgtggcaacaggagtattgctgttactattttaaagctacaaatatgtgtaagatatacaacatcactcaagtactgttagtgtatttggcttttacatactctcttgcctccaagatacttgatgtattgtcaagagagcttagtttgtaaaactttccttctaattttgggaaccactatgaccttgatatgttttataaactattgcctctcgaagtagaaactaaaagaaacttcagagtcatttaggacacaaaagaatgtgagacaatcaagaactaaataaagaatattaaagaagaatatttcagaagacaaggatatgaattccacagaacaagaatgtaattggtcgcatatgtaaattccattccccatttttcaagttgacttttgaaacctgctgcataacccaaaactccaaaatgattctcctcacttttacctgataacttcaccataaaaatggtggttctcattcaggagccattttgatccccatggggcatttgacaatgtccggagacatggtggacagagtcagtatactacaggaatctaggaggtaagaggtcaaggacgccactaaacacctacaattcacagggcaggcccccataacaaagaattatccaaggcaaaatgtccatgattgagaaatactgacttagaggtctctaaaataatttgcagccccaagacaggagctcactcaacttactattaaatctaaaacatatctccatttgtatccaaattctagaccttctttcctctgaaatacccacactcctattacacccaaccctttcactttcactcacccttctggaggaaactgcacctgcaataccttctctcccctcaaaaatttctctcactgtactgaattctaaagtatacaaattctagtaactattaaacacaaagagatacacaaacaccacaaataaaaacacctccattaacccacttctcactttcgtagagaacaaaaacttcctgaaaagttgtcagcattccttatcacttcttccttacttctctgtccatatctaacccactcaacctaaccaccctactgttctgctgaaattattcttcatggtcaccactgaccaaagccaccagtcacttctctaccccattcacttcacctctcaacaccactgaaaaaagctatcattctttcttcctgaaacacattattctgatttccataaagcctccctcttctgtttttcttatctctcaggttgcagattctccccttcagctgaccttctacacgatagagaactccagtcctcggtccagtgtcaaggcttctctgactactcagtcttcccagctgctagtcagtccataactgtagatatcatccatatgttgcttcccaaatacttctctccagccctaagctcttcacagagcttcaactccctacttaacacctccacctggatagatagtacagtacacactttaaaggtagcctgtccgaactataactcttttctctacaccccctcacttgcccatgcacatgccctcttattcctctaagtttccctatttctctaaggtatacaaaaacctaggcatcagtgctccaattttctttttctttcacctgtccccctatatctaatctatcagcagatcccagcagctctacctctaaaatacatgccaattttaatcatttttctctactagcaccactctagcccaagtcacctttatcttttaccttcattaacttcatattgcagttaggagaaaatctaaacttattaatatgacttaaaagtcatgaacagtctggctcctgccttattctggatctcagcttttaccaaagcaaaaccctcaacaatacatgtcagccaaataagccaagttcatcctggcctaaaggcctctatatttgctgctgcttctccctaaaggctctctccctctggctctttactagattggctcctcatccaggtatcatggcaagaaacctcagcagttttgccttcctatccccctctccaaaacactcataacctgactagactctcatatcaatctatttcctcatagaatttatcactataaagttaccttatcttatttgttgattattgatctggccttgcagactaagctccatgagaaaagcaacctcatttgccttaatgattaatctccagtacctacaattgtcaggcacatactatatatttagtaaatattaagtaaataaacatatttaaggttcaataaagagcacaaagttctaagatacagttcccaccatttgaaaataggaatgagggagcagtagagtttagcccagacatctaataacagtccataaagatattcataattagggaacaggagtaagatatgaacaaacaccaaaacattaaatgttttcatgacataccttaatattaactaatttttttatttttacatgttgtgtaaaagaaagaatatttattcatattagtgtcgatttctttttttttttactattggatcagtatatttcatgtatatccccatccaatgttactggccaactatcaaagactgttaaagacagcacttccagctgtactctaaaaggttctcttctgttatctaaaaagttaattactttagaaaagaagctagaaacaaattatctagctaaaattattaataatgccatatgctgaaagaaaggtcaacagaaacaactcaggcattataatatacccctgccataagaaggcagagaaagctagaagggtaactaaaacaaaaataaagaaactagcaatgactgcctgctcacagaaaagcctgggcaccttctgtttttaagaaaaatgttagcaatcattaatatgtagagtttccaaataattataccttagaagacaagtccataattagagagaggcttcaaaatatttgaggtggaagtagagaaagttagagaatgtatatattcatttaggaatttcaaatgcacactgtaaatattattatacattagcattcatcatggaaaacaatgtcaacttgtacattcatctttacaaacaaggttggaatagaccaaaaccacgttggcatcctttttactctgactacatttacaatcgtggcatgaagtttgaagaattaattcttaaatacttaaacttatctttcactaggcacctgaattcagtaataactttaggaaaaactactgtctagagtttatcaggaaaatgttttcaaaaattttttcagtactacttttgagagtcagcaaatagtccagtttcaaataaaaactcatgaatttcactaatcctcaccgagccgcccaaaatgagaagggaaaatacagacacacagaatgtttcaaggtatcaaaaaaactaccaagaaaaatctgatacattatctaagttaaaagcaaacagaactagagacaacttaataatgaaaagtaggaaaggccagtcacaggggctcatggctgtaatcccagcactttgggaggccaagacgggtggatcacctgagatcaggagttcaagaccagcctggccaacatggtgaaaccccatctctactaaaaatacaaaaaattggctgggcatggcggtgtgcatctgtaatcccagatactcaggaagctctggcagaagaatcgcttgaacccaggaggcggaggttgcagtgaaactccgtctcaaaaaaagaaaagtagaaaaaaacaagaaccaacaactgatgaataactaatatcctaataatgaaacaaagttttaaaaaagtagagggaaaagttttaacagatattttccccttctaaatattagtgtaacatttagatttaacaaatatagtgtgttaactacagccatattttttttcttttaagggcacatgtattaaaacaagcaccctcaatttttatagttaatatttttgcttctttagtggattcttaaaatcttgttcaaacaagtataatgcaatctcatagatttaaatatcgaaaacaaagaaacaaaacaaacctatttcctaggaagcgagcactaatttaagcatgtgctcaaaacaatacttaatctaatagaaagttcataatttcatgaaaatactttagaaatttttttattatattttaagttctagggtacatgtgcacaatgtgcaggtttgttacatatgtataaagatgaaatgttttcccacaaaatctaaataaatcaaacatgctcaattctaaactaaaaaaatctccgattcaaacaataattataccagggataattatatgacctctatacatcagaatacacacatatacatatatatcattatctatttaaacttaacagctttcagaaagaaaaatatcctagaaatttataattatgtactgtacatttggaagtatactacactgttttaaaataaaaagaatatccagaaattctgaaaatgtcaaaatctcttatccaagaaacaaagcgatatacagagccaaaagaaattaaacatttttatagaatttaattctaaaatgacacttatttatcagagaaaatgacctcataatgttacaatcaaccatttaattatctatgtctaacagtattaaaagtgtatttattcttgcccaataataaaaagcagagaaaacccaatgacaccagtaaaattagtcattttctctagaaataatgtttcaacccaaaatataaaatgtgaattaagtttatattttgaaaaaatgtagaatcactagtaggtatcctatttactaggctacctgaaaatatctcttacttgtttagaagccatcttcccaagaaacctcatgaacaaagctctctggaaccaaactgcagagcttcaaatcccagcttcagcacttacaggctatgttatttcacctctttgaaccttgatttttcagccacaaaaacacagatactactacttatctcacaggattgtttaagagaccaaaggaagttactaaatgtaaatcacttaaaatagagtctgacacatagcaaatatttaatagatgttatttactatctttataacattacaatgtttggcacacactaagtgctcaattaaaacttgctaaatggtgtacagaaaaaaaatgtggttttcacagcaatcagagtatatctaattttcatagtaatcagaataaatttaaacctaactacaaaaatattttcaaattatttaccccatttggaccagggatcgtggctcatgcctgcaatcccagcactttgggaggctgggcacgtggatcactcgaggccagaagtttaagaccagcctggccaacatggcaaaaccccatctctactaaaaatacaaaaagaactagccaggcatggtggctgcatgtctgtattcctagctacttgggaggctgagggacgagaatcgcttgaacccaggaggcggaggttacagtgaaccaagatcatgccactgtactccagcctgggcaacagagtgagcctctatctcaacaaaataaaaaatatatatataaaataaaataaaaaataaaataaaattatttacctaatttagcccaattcaggaagttattttgtaatcatgtattattaagataaatgaaaaactatttcattcaaatatttaagtactaaagctaaatactggggctacaacaacagagacagttcctgagtcacagaagcttaagctagtaagaaacttaaaagtaatttgcataatttaaaggaaactcagaaacctttagtccacacccttcatttttaaaatgaggaacctcaagtccagaaaagttaagtggtttggctaaaggtccacagctagacagttaagggtcaagactagaactcagatcttataattcccagcctaattcactacaccatactgactcaaagtactcaatatgaaacggagattaggatcctgatctgccactaacaaaagcccttctcaattatttacttattgcattaatgcaaatcaaataagcttcaagggagttatgagcagcaaaaaatatataacctattatgattacttaaagcatttgcagggcggctgaattaatagttcttatgtcagttgtaagtctgcttctggtctatcaggttagatgtcacattctcagcttctatgttgtatttccattctcattcattcccagatacaaaaataaaacacaatatgtatcggactgccaagtgtgccagaaatttgaaaggaaaaaaaatctgcaaagtaagattatatttaccttaaatgtaccattttgatttttcatgtaagaaaccaaaaatatatccactggtagaagtgctgatgtgataagtgcaattgctagagaaaaaattgctgttatggtggagacaacttcactttcccgccgactttggtatttacgaacatatatccagcagaatgccaaaatagcctgaaatagaacaaaaagagatgtttgttactacccagtgtattttctctgatttttgtatgtgtttgaaagtttctagcaggaaaccttatgtgaagtaaaggttattttagttgtgtaaggaaagcccactatcccttaaaaacttgtccaagatgtataattttcaaagcctacttcatgaatgcagtacatcacgtatgcatacacacacaatactattaataacagtgctcagctacatatttcctcattaaacacagtgcaaacgttaatggtttcacacatcacagttataactagctttgaatatttttttccctgtagatttttccaacctaaaagagatatgagtagaagctgttctattctaggcttattactgaagcattacaaaatataacttggatgaaaattaacttctgtcctgttctgacagttcaagaatagcattgagctaaagattaactgccagtaatcaccatgcaattatcacattatactataatttaaattttaaagagcattaaacaaagaaaagtcaatgctgaaaatggatacatgtgcacagcaaggagctttccagtgaaaaaagttcactcagaggtagaggttgacatctctagtcagccaagtactcttaatagttaccaatgccattctagtgactaacacagagcataggactttaatgattctctaacgttaggaggcatcggaatcacttggaggaactgttaaagcacagattgctaggccccatcctctgagtttcagattcaagaagtctggagtggagccagaaaatctgcatttgtaacagcttccccaggtgaggctactgctggtccagggctgtattttgagaacttctactctactcatagggagttgcagacagagactgtgttatttcagccttcactgtgagtcagaatcacctgggtaacttttaagtacccttataacttccctacattccccaatcaattctatcaacggagaataaggctcctccaggcatcagtactttaaatgcctgaggatttcaatctgagccaaacttgagaaccattgttctaaataagagctctggtagttttaaaagccttgttttgacctttcactttttcaacagcggttactttctttctgagcatcctacaattccagggcccaaatgaaactaataaaaccaccaaactagttttgcagcttccaaatccttctaccgcaagcaagatacaagaacaattccatcatctcagaaaattcctttgtccctttgtagttaactcctctctctgcccccagcccttgagacaggaataatgcatgatgttcacaagggctaaaaaattccagagagcagttttccatgactagaggctaagggctaataagaccctgaaaaaccagggtgtggaccaagctggttaagacccactggacccaacatggcaatggatttgacctaggtttcacctaggacctcattatatgctcattaacatgctcaatcacacacctaccagcaccatggcagttccaagaccactcatatttgatgtaaaaatgggtggcaccacaatttcaagaagtctctacttttttccaggaattttcatgaatatgtcccttggataaagaaacccataaaggtagaaactccaaacctcaccgtgtgtctctctcttaagaatgcccacacgagtgtgtacttttccctttaataaatctccacacttacactattttctgacttgccctttaatgtcttctcatgacagtgtcaagagcctgaaaaccagctggggttgagatcccaccagtgtttggggatctccctcagcccaccagtatcaccctgacaaccactatctgttttctgcccctatagtttctgccttttctagaatatcataatgccttcatatagtatgttgtcttttcagtctggctagtgtcatttggcacagtgcatttaaaacccatccaagttgctgcatgtcattgcttcatactgctggcctttcaactggtgacagaatagcaggaaagaattgactgagaagggagttaagactttggaacaaacaaacaaaaaggatctaggctcaaattcttgattttgggaaatttatttttcataaaatgtgactttgtattaatatttgaatgagcttgtttttaaaggaattcataaatatttttaacattccccaaattcattctgaagtctttgaaagctgagtctcatctttatatcctcagcagtacttgacacaaagtgttccaataaattttttattggatttcaagaatgaaagaaaacctgcattttgtaggtattactgcaaacaaaggattttgccaatatcaggcagacaagctaggaaacggcaaccaggcagaagagttaagccagagattcccaaactttttggtctcagaatccctttataatggttttaaaactgataaccttaaagagctttttgttcatgttatcaatcattactacaatataaaataaaaccaagtatcctcgtctataggaatacttctttcataacaagttataaggattaaatgagatataaagggtttaccatagtggctggccatagtaactgcttaacaaacagtagtagttattagataatttgataaaagaaacaaatatataactctgttaacaattataaagaaaagtttcaaatagtccccccagcttctcccaaaagattcaaaataaattggtctgaacactgagatttttaaaactccccaggtggttctgatgaaaggtcaagtttgcaaaccactggggcagaagaaggaatgagaagagatgaatcttcattaaactaatgagaatagatgacatactgtatgggatcttgttaaactgcagatctgattcagtaggactggggtcacatatttggtatttctaacaagttcccagatgatgcccacactttaaggaacaagaataaatttgctttacaaaaatggagagtctcctattgtaatggcaaatacaatttaaaggtggtgtgagccaaattacagaggacattgaagctagatagaacagtttagatttgatatagtaaagacagacatagttagattacaggcatgagataccaaatctaacaattccttatgtgtgaagaaactgaagtccattctttttgcccacgatcacaaaagtaggcaacattcatgtcctgaatctttttttttttttttttttttttgagacgaagtttccctctgttgcccaggcactatcagagcttgctgcaactgcctccacaaaccacctcctgggctcaagcaatcctcccacctcagccttctgagtagctggaacctcaggcatttgccacctcgcccggctaattttttgtatttttagtaggaatggggctttgccatgctgcccaggctggtctcaactcctgagctcaactgatccacctgcctcagcctcccaaagtgctgggattacaggtgtgagccaccacacctggcccatgtcctgaatatttagtagatgattggcagaagttctccaagtgtgaaatccctaggccctggtagtccccagaatcctttctggagattcagaagttgaaaactattctcataataaatactaagatgctatttgcctttttcactgtgctgacatttgcactcatggttcatagccacagtgggtaaaactactggtgcattagcgtgaatcaagacagtggcaccaaactgcaccagtaatcattgtattcttcaccacaagttcaaaaagggacaatttaaattaagactgtgcttcacaaagcagcataaattcattttattgaaattcaacccttgactctttttaatactttgtggggtaaaatatgaagcatgcgtacataaagtcctgctgcataccaagatgtgatggctatctccaggaaaagtttagagttaaaagctaaaccaaccactcttcaaggaacaccatttttacttgaaagaacaattgtcaaactggttattcagacttcgctttttggcagattttgtcaaatgaacaaagggaatctatcacttaaagaaaaactgacagtatttgataccaatgataattatgagtcaaactttcaaatgaaaattggattttgaaagacttacatccacaagtatgagcttgacaactcttcaatacttagaattttcagagacatttctgacaagatcagttgtaatttaatgaaatgtgatattttgatattgtgtaatgaaacgtatccatatttaaaagatgtgcataactcagtaaaccaacattttctaagtggccatggcatcatgttataaaaccatgcatgggtaaaagagcctttcaaagtgcaagatgggctaatggattttaatgtaacaatgaatgaaatgctcattgatagggtttcagattccaccttgcagctgacatgaatcttccacttgttgagctttggtgtagtgtcaaaaaacatccacaattatctgaaaaacgctcctctgtttctgactacctatcattgcagctgtattttctccatacacttcgactaaaataacataccccaaaagactgaatgtagaaggcaacaaaagaaaccagcctttcttctaataaaccaggatttaaagagatttgcagaaatttaaacaaaagtccttcttcctaatgcttttatccacgacaacattcaattctgattttatttgtccttgctgtaatattgccaacttaaatggcctctcttcttcatctatccaaactctaccacaattctcattttcttccaatattgttgtctattctcttaagtcctgctttatttatagtcacactttggctttcggtccataaaatacatgtttcaagaatttcagttttctcacttatcttcaggccctctttaaagccgtattttgtttggtttacatcctcttacaattcacaccacttctgtaccgtaaatgtttattaatttataactgccaagatagtctcacgtaactttcatacattacatgcttatttatttttttctaaacaaactaaatctgatggactggaaaagccagggggctctccaaatacaggactgggtggctgcagagaccacagtcaacctttagggtttcatttcctccaagagaggactaacatgttccagggtaaaggcagtgtttttatctgtgacagtgatggcagtaacaagaggatccttttcttaaattttcacaccattcttttcttttattttctttttttagtctctactgcaaaaatctactagaacatactacataggtaccagacaccaactggatctgacaattaaagtaaaaccaaacaagcctgatttccagaactggaggtttttgttttgcaatgcaaaaaggtcaaaatacgtgagaacagaaagtaactacagcctcggacgatgagaaaagagaagatttgagaaggtagagaagttatgaaaggaaataaattgaactcccaaataaaccaaagggttttaatatgaacagggaagtaatagccaggccactctgagacatttctatctacactttgctcactgaatatgcagaaataagatcgttggaaaagaaagcacctgaggtcagacaggtagtagtatatactccgatactggtaataaagagggctacagctccgccctccacaggtatctacaccaatcaaaaaaagattagaagagaatgtgacacctggaagtcagaacgagcaactcacgtcatcaaggcagaatcacacaatgggcacagaggttggagactcactagccccaagggtagggaaaatgagggaaaaaacatacagagaaggtgacaagtaaacaacgccagcgcctacttaacttgcaaagatccagcgctgccgccccacaccgtgtgacaatgttttac

SEQ ID NO: 49 - DNA, 122599 bp, Homo sapiens
  source 1..122599: mol_type = genomic DNA
ggcttaaacaacagaaatttattttctcacagatctggaagctggaacctcaagattaaagggttgacaacactggattctcctgaggcctctcctgttggcttgcagaccactgccttctcattgcatcctcacatggcctcttctttgtacatacacattctagatgtctctcccccttcttataagaacaccagtcatattggatttgggcttcacgcaatagcctcattttactttaattacttttaaaaggccctatctccacataaagtattattctatgaagtaccaggggacaagatttcaacatatgaattgtaaggggacacaattcagcctataacatagaaagtggagaagaagggacaaatggaaagataggaagtagaaattaacatgacatgattgtttgatgagtcagttatacagaagagatatggagatctacctgattctttgtttaggcaatcaagtgtctgcggtgccatttgtcaaaaaaatgaatgcagaagaaggcttagtttgcccccacaaaagtgaatacttcaattttcaaaatgttacagttgaagcagtaatttctagctaaaagataactcaaagttcagagcttaagaacaagtagtatagatagaagccaagggtatgtgagattgtccacaaagaaaatgtaatataaggccgagcgtggtggcttatgcctgtaatcccagcactttgggaggccactgtgggtggatcatgaggtcaggagttcaagaccagcctggccaagatggtgaaaccccatctctgctaaaaatacaaaaactagccaggcatggtggcacatgcctgtaatcccagctactcaggaggctgaggcaggagaattgcttgaatgcatgaaggggaggttgcagtgagctgagatcgtgccattgcactccagcctgggcgacaagagtgaaactccatcttaaaaaaaaagaaaaaagaaaatgtaaaataagaacagaagggaatgaaatcctggtgaataatgctaaagggtagttgcagaagcagaagccaaatacgaaagctgtgaaggtttatcaagagagatgaagaatcagaacagagaaaaatggcacaaaaattaagggagagaataattaacttagatatagttgttaattcctaaactttttttcagaaacttaatgatattttacctcaaggatcatgatatatacttttttatgagttctaatgtgcttatgttagtaaactagaatataattttttattatttctcactatccagaatgtgttcaaaataccctactgatgtcatacagctttcattacatcttttgcaaatttcaaatctttagaatgaaaaattatctctaaaaccaaaatatgatgccatatatcttaaattaatccataaactgatttttttttccaggattaattattcttgacaatacccctatttatattgaaatacacattttgaggtcagatgcaaaacaaaagctacctataacaatatgtatgccttaaatactgtagaggttgtaagttatctaatggactgatatttgaacaatataacacatcttggaacgccatgctcttagagcactaactagagtttgaaatcttttcatgaaatctacttgagtggtgctaaagattttatgcagaaaactgaaaacaatttgcatatgggagtaacattcatcagctatattgtaaatattatttggaggcaatcagagagagacactttaaaattccacatcactctggagaacctaaggcacagatacagatgatttattatgttttcaaaaagtgacaaaagggaatattaattctggaagatttttaatcaatttaacactattatacattagaggaaaaaattttgcacaaacattccctcacaaagccagtagtcttatatttacatagcatgattatggtaatttaaaatgttaatctatgatacaatgttacttcagaaaacatataataaaatatagttgtcttatagccatgctcccatttttgatgaaagctagttagcaaatcctaatgttagtttaatactttaaaaatgcataacagatattcagtcagcattataaaacctttaagacagaaggctgtcaagcagaatagacagagggctcatcatcacttatgtctgaatcttcatctactccttcaataaccgatttcttccctttacaacaggatacaattaatccaatcaaaaatacctgtaaatttaaataagccatgtgttatttttcaaatttaaaatcatctggaaagtaatgctttaaaattcaatgacagtactatgatacaaatggcctagtaagataaaaagagtttacacatttaactataatttataaaggaaggtcaaatcacgcgtgggatatctgcacttaccccaagaaaggcccagttaccaaaatagtaagcagcactgaagaaccagaacttgtgaaggaataggtatgtccgggtaacagtacactgatctgtgaaagcaaataaaagactatggtgagataggttctttcataaaattgatgattaatactttctctaaaagattattaaccaaagctaatgactaagatcatatggctagtaagtgtcagagatggtactgaaacttaggtctctctccaaagcccactctttcaatcaccttaatgtagtgttaaaaactgccaattaatatgacatattaaaaaaaaaatgaatgccaccaatgcaatccagatcttaagtataaaaaaatcatcttgactagtttgctttactggaaatagaagaatcatttttacttggagtgtcagacatatcataaaacaaaaaaaaagttttcctgatgaacatcaagaagaaagaacaaagtaatcagatgtggtcagtattaagttgcacttgtaggggcagaaaggtctaatacctttcctcacccattgtaagtttcacggtcaacactcctataacagaagacaggttaacaagagaaaagcataacaaatttatttagtcagttttacatgacacaggaggcttcagaaatgaagactcaagggaaaactgtgtattttcaagcttcgtcaatgaagaatggagagctaagagctaagaatagagagtaattggacaaaagtgtataaccaaatggtaacagactgagcggggaaagccagcaaggtctgtatgttcagattcttcctggtctttctacacagcatcccctccttcaaggtatagggcagaactccttttggaatgagggtcttatgacctactattagacaaggtaggtcatagaatttctttatggccagctcctacatagaaaggcaggggaaggttagaataatatttctaggtttatggctggctttggaaaagtggggttctaatttctatgacatggttgggggaagagaagttccagtttctatggtctgccttgggagagaaaggggaacagaagaaagaagggcaagggaaggttgaaaggatactttgcttctgggggtcttccaatatccttcagttcaaagtacttagcatgttacagtgtgtgctatcattttcttatccccaacacacttttctaagaaaccaattctcacggcagctcaagcttgagaggtttctttcagcttttatctttttatgactgctattgaatggatgactactacttctaaagaaataggaaaatcattatttactgatgtgattcctgtttgaactttagacggcattatagatgtaattaaaaataaatcatatatttttctccttcaaataaaatgtaactctcaaagagaaagtagcagactggttatttgatatttgtgtaaaccccatattagttttgtacaaatacattatttccattagttgcaaagtcatctacacatattcaagccattcagagaggcctgtggcaacacagtacagttgaccctcaagcaaaacaggttagagttgccaaccaccacacacaatcaaaaatccacatataacttttgacttctccaaaacgtaactactaaatagcctggtgttttctggaggccttactgataacacgaactatagattgacacatattttgtatgttatgtatattacatactatgatcttacaataaagtaagctaaagaaaagaaaatgttattaagaaaatcataaaaagtgaaaatatatttactattaagtggaagtagattatcataaaggtctttatcctcattgtctttacattgaattggctgatgggaaggggaaggatggggaagaggaggggttggtcttgctgtctcaagtggcagaggtggaagaggtgaaggaagtagaataggaggcaggagaggcaactgaaacttttattgaaaaaaaatctggcataagtgaacccatgcagttcaaacttgtgttgttcaagggtcaactacattatgtaattgagtgtaaaattatatatgctgcatctaatagaggatactaacctcacaaatttcagaaggcctacttcttttcagtctgttaattacaaaataaattataatttctacatatttttattcaaaatggacaatggcaaaaagatcctacatgcaattagaagaccaatctcatatcctattgttaatcaagaaaatacacctttagttctatttttctgagctctcttctcagcttcaataagtaagtgttcttttctctcaaaacataaaattgagctgagggctacatagtccagcttattacataagggatctaataacactttttttgttcctgtcacatggttttccaaaaatagcattaaagttatattttatcaacatataagacttgttacataaagcttcagatatgtgatgtaaagatttagataatctaaattttatctactctaaacccttccactgtacttcaacatttacttctgaattgctcaataccaaactgaacaaacctgtctctttctggttaaaacaaaaaaaaaaaaacaaaaacaaacaaacaaaaaaaatcacacagtttaataaagaagcaacttcttccttttaggagcaaggactaccaatctaattcctatctattgagcccccaaaagctcccttcagagtctttcttctctttatcaacagaaaagtctagaatgaatattcacagttttctaagaaaaccagaaagcctttaagcagcattagctggacatatttctgtctcctatagttaccatagatgagtacagctttacactaggtgctgggagttcagactcacagcagagactcctggatagaaaatttgtcatttacttcgtgctcccaccacattttattctcacttttattacagaacttacttcacagtgatatagctattcaatttgtcattttttttccagtagatatactgagtatcctaaaataccattggagtactcaaatccattcatattcaatgactgttgacgttaaaaggggatattttaaatttatattaattaaatagcccattttctaatttttaaaaattgaaatctgacaagattccaagggtataaaaatgagaaaattgaatatatcttgaaattaaagcataactaaaatgtccagcatggtgaacgaagagcccaggctccggactctgacagacttggaggtgaatagcatttggtcacttttttgccatgtgtacaggcaaatctgaactgtggagcctgtggacttataaaaaggggatatcaccatctttcctcacagaattgctataaagatcatatgacatatacatcaaaagccccaggcaaagtggcgcttaatattaattttcttcctttttcctctgcaaggtatagagaacaattgtgaagagctactcaaatggttgcaagtcttaagatttcagacacgcatgtccaacagtaggaaaataattggttagtcattaatatcatgactactctgtgcatgcccattatttttctgtctctacagttgaaacagacacaaatggatttggcaaaattcaaatttgtataatcagtatcagcatacactgctaaatatacctttaaataaccaatttgaatgtttcaaaaatgaagagcagggtaggcttggacctacccaaaaaatgcctgttcataattattttaaaaacaagaatggtatcattcatggtttaagtattactttagcttcattttacaagtataagcctgtgaaaaactcaactttctcaatactgctaatgctgtaaacttaaaaaataaaagttatttcactcatttccatacttatgatattttgggagtcagaacttgacaaaattagaaatttcagggccagaacagggctaacaaaacagaggctgagctggcagaagcaagataaatcaaatcattcttctccagacatctaataatccacttagtgacattttaaattggcttatactctctgactcttgcccaccaccaaaaccatatcttaaatatttttttgatcacattattttacatgtttacctttttaaaaggttgtggactttgacagaagccttttaaaataccataaaaatgtatcatcattctgcgttgttgttgaaaaatgatagaaggctaaaaatccacacacacaataagtaacagctctttatatgcatctttatacatatatatcattttatttctattaactgggatatacccatataaaaatttttgctaataagatgcatgcatatatttcctattcaagtgacaattccaccctgaataaatggaggggagtgccgttcttcaccatctgccatcttccagctgctcacctgaatcacagatatctaggagatatatagatttctttctataattatccaactaagaaaatcacaataaaggttctgaatttggttttaccttcaaagtaaatttaaactgttggatatttcatttaggaattgtgttctaaaatcagaagtattccagaaacttctgactgttgttcctcaaaagaaaatataattgaattaaagattaaacttccaattaaactaaagattagatgttaacaatgaacactaaacatgggggaggggggctcagataatttttttttctgatgagaaagtggccatacaaaaaagaattcaaagggccaaaaaggggcatctgaagcatatgaataaaatcaagacttttgaatcctgctactaccaccattccttcatctcttctcacatatcatcaaacagagaaataacaggaaatgcaagtacaccattttttttgtaatttaacagcagtctttaaggatttatctgataaattttatattatatatttcctgtttcctttgttatgtcacttttaatgtatcttgactgccactaagataactttggttaagtagaataaataataccttttattttaaatacatattttaaaaacatttaatgtttaagccacaactgagtcatcatgttaaaccttcacttgaaatcaatttataattaattactctatatttgcattttataaaacaaagccttattttacgtgtatatatatagaagacatttgagaacactcatgtaacatggagaataattttaaaacaagcaatttatttgactagtgaccaaaaaaacttagaagcctagactatttagaagccacttcatagctcttggctgcccatgactgtgccaattggttcctgattagggtcttgctactattgaatatttataatgaacatatatatcttaactgtatacaggctaaggagcttggattttattgtgatatgatttgaaattatttataaaatggttttaagaaagaataacaagagtggagtacagactagaagaggagattgaaagtagaaagaggtttaccaagttagaagactatacaactggaaaaaatgagctcagggatgggaagaaaaaagttgggatctgtgagatttttaggatttaaaatcctaatgttttatcgtcagatggaatacatacacgtaaaaagatttcggaaactaatgaaatacatccaaataaatgggaaggcagaaaaaatgaagatatataataaaaaccaaagttgtatatttatattaaaatttaacaagtggcatacagttaaatcaatgttttgttaaatctcactgggagatttaggtaaaggggaagagaactgatgaatgtcaaaactcacagaaattttgaaggacacagttttcttatactttaagaatacacaaactgtatcaggttaataaagatatttgccagatattttgcacttaagaataagtttcagagtaaccatttttaagaacaagtataatctgtgttgagctctggttatatttaaataagtttaaagcatttccaaggtgctaaaatatatatttgccttttaagaaagaatgctactaatttcattttattactaattggccatataacactcattaaaagggagtacaaggtaagtattagcatataaaatgtagaaatggtataatcacaatctgtataagtgaactctaaattactgagacttactatctgctggttgtaattgtccaaggatagtcagatataaagcaattgtcttctattactttaacttttgataaaataaaagtagtttaaacggatatactagaaaatattaaagacagaaaactgagatttagttgagtctgacactaatttactatgagacccttgaggtaattcatttagcttctaaatatcagtttctttgtaagtgacatacagatatgtgtggtatatggtgctagatcaaatttctgggaatttagagagaaatttgcatttgaaagaaaagaaaagactgatgttttcagagttagccaccttaagcaataatctgtgagtagctgagaagtttcacaaaattatttaggttggctttggtgtagatactggagaacttagaaagcatacagctaatcaactttactatactattttagttaaacttctatcaacacaaccgcaatgtcacctagaaaaagaacctcaacatcaggagactttctagatccccagcaacatccaagaaaaatgatgctctgatcaatactcaattttccagtctgcatcgcaatcttgattgacaatagacataatacatcaggctatctaagctagataccagccaataagatcactgaggccctctttctaacttcatgtttacctagacattgtatgactataaatttgattttccatgcaaattctttctctctggtaataattcactaaccttgatcatctagtttatttaatagttaaactttctagggtaaattaattagctgccatttgggtgacattagattcttgggctgttctctgttcagtcatatgaagctaaatatagatgctggagaccaaagtatggcacttcttagaaatagttcgatctcatcacctactattgtgctacacatcttatgggtttactataatcaaatcaaatgaggttatcaacacaaacttcttatttgtcaaataaaagattagaaatgtatagtatttaaccacaaaaaaaattttaacctgttgaaaacatagcttactggttcaagataacagacttagcacagtcatttgtttcttatccttctcaggacctcattactgttctagtataggaataaagccaggagcaatcctttatcagcaaagagaatggaagtagaaccatcagctgatgagaggttccaacaataatccagaagatggaaggccacatttaaaaggtctccagtaaaacagatggttttcctcccatttattttaaaatataatatgaggatcaagaagtcccagatgcatgcacagagttaccagcaatgacacttcccagttcctgatatttaaatacaaattggcataaatgtgaatggatcatcaaatatatgtagagaacaatcaacatgagggaaaaagaaaacaagataaacaactgcactaggataaccaaaattataattttacttaaaggaaactattaagaaaaatatttactatcttcaggtattaaagatattacatccataaaataaggacacttgaaaagaacaatcagaacaacaaaatactcaggaaaataacaatttatcatatgaaattaaaattcataatatggttgacaaagctgaatacataccaaagaacatagagtaaatggtaggcagaaaatatgaaaatgagataatacaaacaatcaattgaagatattcaataaataataaaaaagaattccccaaagagaaaatagaaaatagaaagaaaccatgaagtaccttcagaagaaaaaataaactggcattagatttcttaccagttaaaatgaaagtaggagataatataatgcctttaaagttgtaagaggaaatgacttctcatgcagaattctaagcacagccaaactatccattaattgtgaggacagaatacttttcagatatataagcacttttcagatatgtatttcatataaagaattttattttttaccctagtaaaactaagggcttgggagaattcaccaagaaagaagatatgatttacaatgcatcggaagtctaatggacagaaattgtagcattataatatataattatgatttgtaaagctgagcagcagaatcagaaaagaattaatccaaataaaaacaggaaatcagtaggttcccagaaggaagttttcaggtcaatacaatgggtttcatccaacagataaagtgagcaagaagctagaaaatattaggcatactaacatcttatgttactttaataatactatttaaaaagagaaaagacaaaggaacaaattttagaatgtggttcaattctacaaatgtttaagggagacaaagatatattttcttattctcaaggaacttacatttctataaaaagtagaatagagataagatatatgaagactatacattgagagagaataaggtaacgttataaaaagtataaatgctatgggaattcaaaggaaaaaagagagcacacacatgtttggagattgaaaaaagaaggttgagttagaaattaaccttgtaagaagatccggattctgactgatgaaaatgggaggggtagggcgaagattttttgtgatatttcaaaaacaaatcattgaaaagcaaaggtagataagaatctggccatgtccgaacatgtatgaaaaaaagctagagacttgtaagcgttaaatagtagtagtccttaaatcctagactgaatttatcagatgatgtgaggggagcacttacagtttttactagagaaatggcattatcagcatactttggaagagtggtttccacagtgtggttcccagaccagaaaattctagggtcccacctcagatccactaaatcaaaaactttgggtcaggcgtggtggctcatgcctgtaaccccagcactttgggaggctgaggcgggcagatcacctgaggtcaggagttcaggaccagcctgggcaacatggtgaaaccctgtctctactaaaaatacaaaaattagttgggcatggtggcacgtgcctgtaatcccagctactcaggaggctgaggcaggagaattgttggaacccgggaggcagaggctgcagtgagccgagatcacatcactgcactccagcctgggtgacaagcgaggctccgtctcaaaaacaaacaaacaaacaaaaacacacacacaactttgcaatctcggtttcacaaatcttccaagtgattttgatgcatgcgaaagtttgataacctttcttttactctaagttaaggtaaaatcactaaaaggtacagtaatttaagggagacatgatggaaaggggatgtaagggtcattatggcaaacaaaacaaaataaaacaagacaaaacaaaacaaaaaaactctgcagctcttagtaactgattaggtgtggagaagaagcgaataactactttgaagaatgtggtagtataagaaatacttaagtcagtatagtccaaagtctttatctaatagtttatactatcttccccaagagctattcattataaacattcttataaatacattaccaaaataaggcaaagttctttatattagttttacatgattaataattctcgtttagagttccccatacatagctaacaggttagcatctttattttttcttccttgaccttgaggtaacaccctaacctacataccacatcacagctacacacatgctttcatccataatgttcaataaccagctgcggtgctcagaacctaataggttacactattagttctctatgaaggaatatccagaacaaaacaaagtcaagtaggcccaaaggaaaaaagaaatgtataaccttaataggtacacatacattttaaagataattattatagatattatcaaaattagaatgtgaaatattaaacaaatactttctaattaaaacccttaaaaaacgggcatcacccctgactcccttctctctctgtctctctcaaactctctatcaagcaaatactattggctctaccttcaaaatatatccagatcctgaccactttttgccactgccactaccaccataagctctcccttggattattgcaaaacgcttctgtcaacctgcttttacccttggctcattatgatctgtatcacaggtaggcaaactatggcacgcagggcaaatcaagcctatcatttgtaagttttattgaaacatagctacagccatcccttaagtaatgtctatggcagttttcatgctgcaatggaagagctgagtggttatcatagactactgcatgacccacaaagcctgaaatatttactatctggctatttacagaaaaaagtttccaagccttggtctatatacaacacagtagtcagagtgatcctgtgagaacataagtcacatcatgccattcctctgttgacaatcttccagatacttttcatttgaaagtaaaagctgatgtccttaaaattatctgcttgctattcctctacctcctcaagcatactcctgctgtgtacttgctgttaacactatctacaatactcctctccagatactgtgtttgctcttcacttctttaaagtcatgtcaccttcccagtaagaattccctttctcctgtacctaaaatttcaaaccattcctccttctgaacaccagttaatctcctttggcactttatttttctccataatacttgtcacctgacatatttatttgtctgtccccttatattaagtaagctccatggggacagggatactagagtgttttgttcactgctgtatccctagcacctagaatagtacctagcacagagcagacatcaacaaatatttgttaaatgaaaaagcacaagaataatagataagtaaaattaaatgacctatgtaatactggaaattaagacatttataaatttatcttagaatttcacgactaacaggattgtgcttctccgtattactaaagaagatatgtcaatatattcgaaaggtgactgaaatgcaacacagtcattacttaatattgtattccacaaataaagagggtaactttctaaataaagctatcaaaattatcaaaattctagtagagttgatgacttatattaatcttataagctaaatctaactatccttaactttctcaccctcactaccaaattttcagaccataaaacaaaaggaccacgtagttttttttaaaggtctctgccccatgttcttccgtctaaagaaccagatgacctacattctcctgaagagggttatgttcttagttatatactttcagaaatctaaagcttaatatggggtaggaagtgtgaagtagatagtccatattcaaacctgctttttaaattaagacaggagcaatctagcaccatttcattttgcattatatttagggactaccattaggctcacagtaccacagaaggtattaacgaagatattaggagactgtcatcacaaagcatcaatgtcactttttatttcaccctttaagacttagtttctagtgaaattgcttgaccagcttcattttagtctgttaaaattggctgttcttaacatgaacattttaactttaattggataaatccaacatcaggtatcaactagtgtagtaattcttttaataacatcagttttaaacaaaagtaagcctctctggcaaaacacattctttatgtatttgtatttatttatttagctcacaggccaaagtttgaagggcagagattttttttttttttcacttaaatccattgttagtgacaatgtaagtgtttaaacagtattgctttaggaatctcagaagttcaagtagaaagacatattccatattctgggaaaagacggtacaaagactttaagaatttaattttttaaaagtttcagtaactaccttcagttaccttcagttaactacctacctactcatacttttcaacaaactgggaaaaaagtcttctctaaaatcagcatctacttggcagatgtatgtcatcattgtgtctctcattgtttcatccttaaaaatgtgtaatacttttaattgcagaggtaataaaagatatttatttaaaaaaaataaagtgattatctacttctttcctgaggcacacagactttcagattttgtttatgcacgaaagcatttaaaaatgaggtaatatatatactctttcacctactttcacggtgtttacttttctatgtcaaaacatacaaagttagatcattaccttgtatgtattgctatttaaagtatcttcattggtagataaatacccagttggttccttttgttttgctatttcttatgtaaacttggtgggatttggatactagttactaaaatgagataaaatatgaatctggtttcaagacttctataagggtaaactactttaggagacagaaaaggaataggacaactctccctatcccatgacttggggtgggggtagatgagaaaaataaatggaggcgagaaggaaagaagttcaatctaagaatggagatttcatagcttggtcagacatgcatgtccatacagataaactagcagacagttaaaaaataagaaaagaaagttaagattctgaattcttgatttcttccccatatattattcagcataactagcttatatactgtcaactctccaaacaacattaaaaaacctcactcatctagcaaagctaagtttagcagactgacttcagtgaggaagaacaagaagaggaaagacagagaaggatatttacaaggttttagggttgggtgggctggaccactttaatcagcatttttcaaggtgagaacctggttagaactgacaaaatagttttggattggtaagaatgatgaaatgggaagtcctgaagcaagtctttttgggaaatcagtcttgataaataagctattttagttgtttcaccatcaagagtgagattttcctaaagcaagcatacaactatgtttgcttgttctaagttttatttagcatagaggcatggaaatattcctgccccagaattgtttatcagagtaatattatattggtgccaactctccccattttatgggattaacaaatttttaaaatttattgatcagctttaaaaatgttttagactttattatgaattgttaaaattaaatctggtactctgcaatgatatgctggagtagacaggtaaatctgaaaaataacgagagagaaagcagtaaatttacaatagttcctcaatatccatgggggattggttccaggaatcaccctcccattcccaccctaagacaccaaaatccacggatactcaaagccccttatataggagaatagtattagcatacaatgtactgcgagggtttcattcactcattcattcattttttttttttttaaactagttcttgtcctctgccaatattttgagctgatcttattcctttccttcagttggctgggtcataatctgtgttgataattctaacacagatttttgcaagtctatttatactcattctcttggagagttctcatccagtctcacaactttacttcccatctatccctgactaatccagtatacattttttctccagaactccagatacaacttaattgtcactcaagatctccacttgatgtttaatgaacgactcaaacaaaaatgctcaaaactaaactctacattctccctcaatacataaatgtaaacaatagatagatggaataaagaatacaattactttgcaaaaagactcaagaggaattagccaacaagaaatctcctgaatgctgttcagtaagattccatatgaaatattagatttacaaacaacttttggtaataaattcatgcttttagttcatgtggcattcagtatgtgggatttttaaaggttatttttaaatataagataaaaaaaccccaaatcaatccatttatacttttttagttatgtaatacaattaaaggattaatgcttgaggtaatggataccacatttgccctgatgtgattatttattgcatgccgttatcaaaatatcttgtgtacctcataaatatatatacctagtatgtatctacaaaaatttaagaaaaaaattccaaaccaaaaccacattaagggattctcctcagttaaaaatttcttcacttaattctctacttcagtccatacaatcctactaaaactgcatttcctaacaatttaagatttgctagttgctaaatttctcttcaaagcatcaacactattgatctctaaacatgatactttattgcatattataatgccatagtattctttttatctctcctcttccaaactcttatgtctcctccaataacccaggtttagcctttctacctttgttttttcttcatattgtctatgactttcattcctttattgcttcaaacaaccatttccattatatttaaaaagcagcaacggcctctctctctctttttttttttaacaatttaaaggacagatgatgcaataatgtttcattttctcacactcaaacaaaacacaaaaatgttaaatgttgaaaaaaaaaaaactggaatccagacatttgcattaaaagtcctaagtcttatactatctgtgcaacttttatctcttggtaccctagtttctccatctgcaaaaatgattaaactagctagatgacctttctaaagttttttcttctttaacattctagttcatatttttaaaactgtttacaacttatgtggctctttatggcctttattcccatatctatgactctcatacaaaaaatgaggggattctttaacttacataatattttagacaaatggtttcagaaggataggtacttgagattctgtgaaaataagtcaatgtgctcacttgttacctaaagaaagaaagcttgggccgggcacgttggctcaagcctgtaatcccagcactttgggaggctgaggcaggcagatcacgaggtcaggagatggagatcatcctggctaacacggtgaaaccctgtctctactaaaaatacaaaaaattagctgggcgtggtggcgggtgcctgtagtcccagctactcaggaggctgaggcaggagaatggcatgaacccgggaggcgaaggttgcagtgagccaagatcgcgccactgcactccagactgggcgacagtgtgagactccgtctcaaaaaaaaaaaaaaaaaaaaagaaagaaagcttggtaaacaaattttatttatagagactgtattttgaatcacctcttgatgatggccttttttactccagaacttaaagttcaattactttttaatgtaagatatcaatacacattttacttattctttcttacattattatttacaataattctcattttccccctttgtacttcctatttatataattataagcctgctttagcttttaattttgtctgctcatttgtttataattcatgtagtttggtacataggtttccattttagcatttgctaagttgtcttaatcatctgccctagtaatatggtatcctcaagctaaatcctaaccctattggtcatgtgattattttttaaggtgcgctctctctctctctcgctctctctctctacatatatacagtaagcaaatatgcttaatcagaataaaaccacaaaaatcaactttgatttatagagatcattccatttctagtcactttaatgtccaaataagacaacacaagtttacaataacaaagataaaataattaagcagggcagcagaaataaaaatttaggttaatgaatttttataaatgatcatttggaaacatattatcttgcttcacccctaactgtagtctccaaatattcaatagtgttgccaccattcattgctatgataacataccaaatatatttatgtccttatgcctggttaatacaggtttttttctctgcttgaaatatccatatgttattttctctttattcatttagatttaacttactcttttgggtccacagaaaggttatactgccccccagggcagaataaatcaccatctccttttgctttaccacagcattttgattacaatttcattacagcttgccatttattttttctcttattataattatttattttcctatccaagtccattaggctacatgctttttgaaggtaagtgctgaacatgtgttttctctggtactttctctttcccaaaatcaaacccagtactgacaatgtcttctatttttgtccattaaggtatattggtctttcatcttcctattttgactcaaatatttatagtttccaaatgtacatggtcttttaaataattatttgttttacatattgtatttacatttacacataaattgtctacatgtaaaggtccccttggaataatagcagtaaaatttaaaacttgattcctaatttgctcagttgactcactttgaacataaactatgcattacctgtcaggatgaattaagtaatattgtcgttttaagagaacttcataaaaatagtaagataggcattctttttaggattactgctaaattattctattctttaatggattattttaaacacaaagtacttaaattatttttagacaaatgactcatttgaaacctaatcattttaaacacaactaggattccagcaatattttctatgttgaataaatgtcagatcgcctcatatataaacaatattaattttaaaagtctaaaatatgtttaatattgataagacagcaacatatggatttttagaaattgctgctttaatatctctccagggagattaacttttctcagaaagaattttaattttaacactgaaaattaaaatttttgtttttaaatctataaatcattctctaaaattctgttacttgcaatggatacattgcaaaggtgccatcaaatgccttatgagttatttattatagtatcatttagtcaaatgttgtcatgaaatatgttgtaaagaatagtgtatactgctatacaagtccctcaccatccctcatcctaagggtagggatggggtggcatccctacccttatgtgtctaatccaatgtcctaatctggttatctttctctaccattattattcacttaaaaaaactaccctgccaccccaaatttagttatactatttctaccttcctcttctaagtatgtactggcaaatttaacatttagagatgtgctatagaacaaaacaaagttgggaaagataaacccataaaactaaagggtatgtttttgtattgcaaaataacatttcaaagaatgagtcaactaaaatgtttaagaaaaaatattcagtagttcaaagggaatcatttttaactactataaattagactgtaaaagaaaaatactgaatctgattcataaaaaagttacagtcaagtgtattatttgattaagtcttattgacctacaatataaaaaattcactcagtccagtaatatcagggcattttaaaggccccgttatcagttcaacataattttgaaactacaatttgtttttgttttacagctaatgtttcaatactattgtaacaatttgaacaacagaatctattttagaccttcaaggtcattgacttcttagttaaaaacaaattacaaaccaattaaacactaatttttcaatctgttttcatccagctaaatatgcaactcaaagcacttcaactatcaaccctacttgtgatgtacgtatacatttcaaagtaaaaaatcttgaactaacatcattaactggaaaattctgttctatttatttatactaacaacattttactattatttcttcagacaaaataaagttatccccatcagatgtttatccatctcatctcttgattttaatcctttctctcagttttagtctcttcccttatttccttacaaatcctggactctgtggtcactgtttattttctaaccttcaaattgtcctttgctttccatccttaaatccccaattctccttcagttcttcaatccattccttcccccaaacaacctaagaactgatggagaaaaattatacaagttgtgtagacttgttcaataaaaatataaaattggtaatttcacctctgtccctcgacatatttacctatcattaacttaccttcagttagatcctttcctaatccccttcataggctatcaaaagcttttgctactttcatcaactgtctaccccacagcccgcttaattctcagtatatgtcctgagctcatcctttatagccagttgagataattatacagatatgccacttcttgcctaccctcagatgtaacttgttactatctgaggccatatccttgcttccttctttgcaatgtacagaaggaaatatccctcattctatctaaagcattctgtcctggatattaataccatattgcgcagaattggatgatactggtctatcattcatcctttctgacatttttcttcaatctttcctgctccactagttccatcccattatccctgaagtctctcctaactaaaagaaaaaaaaaaagttcttgactccgcacatcttcttcatggaattaatttttatctctaacattaaattttttctcttttttcagccttcttctccataccttccttatcagcttgcccttaaataatgattatcctgggttccagtgtccattctcttctcactctctaccctctgagtttctcacatatacaggaactcatatgtacccctgagggattggttccaggactctgttggaaaccaaaatccacgaatgctcaagtcccttacataaaatgatgtacttatacacatcatcccacatcttttaaattatctctagattacttataacacctaatacaatgtaaatgctatgcaaatagttgttgtattgctttttgtgttttttttaaattgtttctttgttatcttttatttttcccaaattatttctgacccaaagttggctgaatccatggatctggaacccattaatatggagggctaactgtatacccaactgcttatgagacctccacctgaacatttttgagacatctcaagtcaactaatcatttttttttacaatttttctaaccttagtacttttttttttttttttccctgagacagagtcttgccctgtcgcctgggtcagagtgcagtggcacgatctcagctcactgcaacttccacctcccaggttcaaatgattctcctgcctcagcctcccaagtagctgggattacaggggtgccccaccaccctcaactagtttttgtatttttagtagagacaaagtttcgccatgttggccaggctggtctcaaactcctgacctaaggtgatccgcctgcctcggcctcccagtgtattttttatctcagctggtaacaccaaaattaatcaaagtactcagtaactagagtgtcatgctagaatcttctgtttctctcaccattgctctacaaccaatcagaaattctttcaatttacttcttaaattgctttatttcacaccctcatgaccactgtttagttcaggctttcaactctcttggattattttagatagctctccctcccctaagtgatttccatagtctggtctcaatttctcaaatccattatctatataactgctataattaacttactaaaaataaatcagatcataacttctactttcttacttcaaacacttcattacctctttagtcactttctaaagccttttatgatatgactcatgactctgccttcctccctccaacccctaaacaaaaccaatgtttcaaactctcttgaacacacgcctgtgcaatttaaggtaattgtttgtacactttattcttctgcctagaacagccttcccttgatgtgcataccagataaccttaaaatgtagctctgctatctctttcctgaaacgtttcttttttgactactactccacagtgatccccacaaggcagagttaattgcgtcttcctctggcctatccctgtaccttatacttgttcctaatactctattacattacatagttgaccctgctataaaaaaactcagaatttgtgtttttcataatggtattcatgaatgattcacgcagaaatacactatatttgacacattactttaccataaaataaaagcatgttgaaggcaagattagaaaacacttttacaaattttgaaagaataaatcaggaatccttaatcagaaatccttaataagaatactataacattcaaagaaaaaaaaatcacctaaacaactcacatagaaaaaaaaaaaagatactctaaaaatacacagaggttaagagcacagaatttttgtcagagtacacatataataattaacacaatgccttgaaaacaactgtatgtttttaaagttaactgctactataactaacactattattattaaattaaataaccagacatggatgaattaaaaattgttctaggtcataagtacttttggtcttggtactaagaactgtagattccaccaaactcctttatgtttttaaggaaaaaaaatcacttaagagtgatttcttattatactagtaaatgtgataaataaataaaataaataaaaaattacttcctaagtaattttaatggttctttctctaatgcaaatcctttcatcaacaagaaattctactgaagagatttaccaacctctacttgctaaaagtttccttcttaccacgtagtaaaacaaatgcatcaaatgattaacacagcaaaatgccaggaaattcttttcctaaaaagttgtaagttctaaaacaagctgtttttaccttcaggagcatctgcatcacatctctttggcacagaaagggttgaattgcctttatgattatcagaagttatattagtctgaaagataaaaatacagttaaaatataaaaaccgcattaataaatacatttggatttaaaaagtaatcactatgaactgtatactctgtatactaactacatctatctaacattccaaaatgtaaattttgtgcaacattgctcttagaagaaaaataattatggtaaattaaacattaaggctttttgcaataatcctttaggtcctgtgttgaacaacatggcttcttcccagaacaaacaaattccatttttaatacaaagtatagcatctgaaaggaatgctattttcagactgtggaacatgcaaagaatatcttttgtccaagcaaaagcataatcttccttcattccttcacagaaggatgtttaataagcatgacctagtgaggtaggtgaaggggatgaggcaagaagagaataaaaaggtataagaagtgagaaatatggttcaggtggttttccaggatgctgtttcccaaactcaggtcattcatgtacctccatcatgatcagtgctttatctgtttcacctacattataactaaatatttttcaatgaaatagccttttaacactcaccaatattatggatggtactgattgagggttgataggttcgttagatttttctttctaattgcatgttaaagtaaagaaagaatgaaggaagaacaggataaaaaagaaatgatctgggcacactgatttaatcatgaaagactccactaaagcaatgcttgatcaggccctgaaacataaatatggtttgaacagttaagaagtagagcaaaaggtatttttaaaaacggaaaaaaactaaacaaagtttgaatcagatatggtcagaatattttgaatcgtcagaaaatccaaacttactgttctattaaaactaaaagccacagttcgcttttgagagatcaccaccaccaataaatcagcatatgaggatacccatcatgttaaaagaatgtatagttatctacatataaaatttttataaagcctcttctaggggattcatagtgccaatgaacggacatgctgtgctcaccaaaatgttctttgggagccatattattaaaattcgttaaaacgttattttagaggaagtattttgagttttaataaagtactaaggtaaagctcagtagcttagcaccatgggacccatttaagaaactactgtaatgaaattctgtgtgctgtttcaaaaaaacaacagtatgaaacaaatataaatatgctaaaaatagaaataaaaaaccagttttagcaatattaaatataatctgatgagctaatatcttatgctaaccatcacaattaaaatttcattttaaatatcactatctttaaaatatcaaaataatcaagtttcaaatatttcacttacctctattaagtaattttggcttccatacataacatattggggagcaagactataaatcatgtagctagtgtgaaggacaataagcagaagtatcatgcagagaaaaaggagtgcttggggcctggttctacctcttctgattttatataactggaaagaaaagagtgacaaaatttcagcaatatatttcatttataaagcattaaatccttttcttgtgttatgggaaatgatttacacagttcaatcaaccattatttttcttccaaagtaaatactaaaagttcttaatcatcccaaataattttaagattattcacatggtctatttccagagaaatcttctaaacttattgtgtaacagcatctgttagaagttcatggagctaactgtgaactacctctagttctatctaaagattagaagtatgaatttaaactacaagtatcagtaatatactatggttttatataattttttataatactgcataagaatagacaatgtcatgtgtttataaacatctatttctatgaaatactcgtgacctccttatactttgctataaaaattagtttatgaaaaactctgataatcttactaaagagcttttcacatttatctatactaaagggaaatgaaaacacatggtaactgaaatataaggaaccaggtaacttgcttcatttcaatagcatagcaaatgcttttattttagcaacttaggtatcacctccctgttttattactagattgtagtacaccacaattgtactattgtagtacagactccagttctagatgggatgacaataagatcattcataaatttacatttcccaggttctttcacagccagtagtggccatgtgataaaatattaaacatgaaaaggaaagcagaagtctgttagggatttctgtaaaagtcttgttttattgatataattgtttacccctttctcctaactacctttttcttcacagaatatgaacaggataaaaggaactgcagcagccatactacaatcatgacagagatactcaaagaattacagagatattggatctgactttttgagctactgaagcaatactagattctttttttccatagcaagaaatcttttattagttcaagccactatttaactgagttctcttttacccacagctggaagtagtgtctacctgatacagcttcattttaaaattgttaatttatctcaaaataagcatttgaagaaaataaccaatgatatggtaatctttactaatagggagggctatcttttgagcttcagtgtatctattatattcgaatgtgtttctactaagaaataatataacttttggaccagggtttctcaaccatggaactattgacattttaggctaggtaagtctgccctatgcactacaggatttttaatagaatctctggcccctacccactacatgccactagcattccccaattataacaactaaaaatatctctagatattgccaaatgtttccggggggcaaaatcacccccatttaagaaccactgctctagataaaaagtacttttatgtcaacatgaagtgaaaaggctagtatttctctcacttgtggtataaagatacagctactatattctaaatctaagataatttgtaattatggagatcacacacaaaatgatgagaaaaaaataatactgtaatatatacttactctaatccaaaagaaccatatgccaatatttcgaattcctgccattgaagtaaaaataaagtacataataataattgttataagaatataatcaagagggaaaacctgaaaaaaaaagatgaaattaaatttaacatataaactataagcactctaacagtcatataaaataagctaaaaacttcattattctcatccggcaaatgtttacagtatcaaccttgatttagattaggctactgtgcttaaaaaaaaatcctcaaaaaactaacaagtaccaaactattaccaaaatttttaataccattatcttaagaaaaatactaaagcaaattaaactaaaattgcatttatctatgagataaaagacttgattaaatattaataccaaaaataatttggagaaggtcacctcatgttatataatatatcccaagtcaaattatgtataacataaaagtccaggaatatatcaatatgatatttaaagcaacatgtcagtgtgtaaattacaggcaaataaaaagtaaaactagaaaataatataagcatatgtcaaactattcataggtttttagcataataattttatgtgcaacaggatgtcagaatgtttgctagactctagcattttatactctagcagctacagtataaaatgattgatattttacttactgtttgtagtaaaggcaaaagcatattcagtggattactcaggttagctccaaaaattatgaaaccagaatctattccagctgaatgaagagctttatctaaactaaaaaaaattacaaagaatgaaatttatgttatactatcaaattttcagcaaatttagaaaaaatataatttaagcatgcaaatacacctgagtcaaagaaaacaatggataacaaattaaacctcacttaaatatctcacagctattgttcaattgatggagaataaagaaacactctattattggacgttttagccattctttgagttaatgctatagaacacttcaagtaaaaaagctacttaagatgaacagcctacactaatggcattcagcaacaaaatgtatattatcatagaatttgtataagtgctttagaaaatgtgtctactgtacttactttgacaagaagagagaaattacaaacagcaatgcaactaagatgaaaaatattccccagacgatctaaaagcaaaaatatattcattaaaatatagttctaaaagttgatattaaaagcacaaaatcattatattcaatatgagttgctagaatatgacaatgatctaacaaaaacaatctaagatacattttaacttagtatacaattccaggcatttatacctgaattttcattatgagactatttgattgagaacatgtacataaaagagacaaagcatttgaaaagtcttcactaataagtaaacaaatgaaactctttgttagaccaaatacaaagtctttattctattacactgaaatgagactgaaaagtacattatgactaacacacagacacacacacacacacacaccccaaaaccatgaaatgcaggttatattaccctgttagttaaaatagaaaatttagaacattttcccatagaagtaataatatatataaatgatatatatagtggttaaattatattacaatccataaaagcctatacaagtgatactattcctgaaacagagtactaacaacactgaaaaaattgtcaggtaaaacaatgtttctgtggaaaaaatgtcctaagcactgtaagtagtggaacatatttctcccaattgtatgaactttatattaaagatggtagaaaaagaggaagaaaaatattataactgagtctctaatgaaaagtttcagaatataaaagagttgaaatctatgttagcaaaaacctaagctctttttccccgaaatcttccccaagttgcggggacaactgggctaaagagttgtcaagaccagatccaaaaagaagagtcccagtaagcacagttaagtgtgttgggctcctcctttaactggaattgatataaatagatcaatgaatgttatgaaatcatgaatggtagggagattttttcatcttatttcacaggactgtggaagtaaattttagaatcctgagagaataaaagaagtaacacatgaaactacctagcctgaaaagatgatttttggaagtaattttggacctgtgctctggggaattcttcagttatggctgggtgcctttggggctcactgggaaggagagagttgacgagaggggtccaagaaggctatagtcatctcttgaaaagagagtgatattgcatgtactatttttcatgctaggattccgcaagagaattcattatttaaaaagggtttcattgcaaaagattttgaagtgactcctttatagtaacaactgctcattagtagagggtataaaggagttatacttttttttctactggattcaggcatctatatttggtactgtggtgaactgaaaagcaacacagacttatacttaggattctcaagtgaaaaacattccttcctaatagctgttaacaaaaaatagtttgtagcagtataactatgaaatgccaattagtagtaggagaacatgatatagaaacagcatttgaagttaagattccctctctttggtatccattttggcaaaaaaaaaaaaaaatttaaaattaaaaaaaaaaccctcttagctatcttccaaatctgtagagatgactgacccagagttagactgcttaatcagtgacttaacagaacacagaacaaatgtaaaaaatacaaatattttataaagaccaagaaaactatacatacttaaatactagaacttaaattagtagttacaaaatcatgtcagtgatgaccacattgggttgacctaaaagctacatattatactctagctataatgccaattttgaaataaaaattaaactatagaggtaacatcaataaaaatggaataagacatatgcaaaaacaatacaaagaattccactatacacttcactcatattctccaaattttaacatgttaccttatcattctcttttgaacaagtcttaattattatatatcaatttctcttgaacgaggtctttcataaccttgacattttgtagagtccagggaagttaatttgtagaatgtctctcaatttggattgcctattttctcatgattatatttagattatgcttttttccagaaatgacacagacagagaagtgttgagtccttctcaatacatcatatcaagtggcacagtcatgtctatttgccccattactgatgagcttaacttaaatcatgtagtaaggtggtttcagtcaggtttctccattgtacaattattatttccccctctgtaattaatatgttttgtggtgagatactttcagaatatgcaaaatcttgttctcaccaaacttttaatttcaagttttgtatccactgatgcctcttcccagaaacaatacgtttttttctgtggtatttgtcaaatgctggttttctaattgcttctatatttatttgttggaattctactgtagggaagaggtttcccttccccatcatttactaatgtatttacttatgtcaatatagacttatattttattcaattagttatcatctgttattatcattattttgatacctaaatggtcccagatttaggcaataggagcccctacaaactggttccttttattatacgcccactattctcttaaacacttcttactttctggcatcagatgttccaagcttattaagtgctttcccagccacagtcctagaatcagacatttctccaagcagccctggttccttttaatgaagttaggtagtggtctgtctattaattaaaacatatgcatatgcagaaatcattactttattagtactaaattaggactctattttcaatccatgggtggttgaatctgcaaatgcagaatctgcagatatagagggactgttgtaattcatctgtttttcttctccctacctcactgctttctgcttttatcttattttcttctgtgtgattccttttgttcttctgctagcttttttgggattggacatttgttttttttttttccacttttactggtaagtgtgtttcaggctattaatttctcttttttttaaatttattaaaatactgagttttatttcacatgcatatttttgtctccccaccatttccatgtctgaccaccactactactatgtcctatcataacattccatacatacttaagaccaagcaaagggtggagttccgtctttaaaaactaaacaggcattttggacaacacattattggcaatggagcctggacaacatttatcaaacatggtagggaaagttcccactctgcattataaaaaggacagccagatatcaactgctacagaaatgaagtaagacagaaaaattttaacaaattgtttaaactattttcttaaagagacttcctcaactgccagagatcttgaatagcctcctggtcagtcatccggaagcaattcttcatataattgatgaacttggcttccactttgggaagagaaccacctttttctatacttgcttgcatttttgctttaatgtcttctacagaactaggtccttttggtgttttaggagatttttcctgttttttgaaggattcttacccgtttgatcttggtattgatgatggttttgagtcttttccattctgatttggcttttgtgcatttttggctggagtatctcatatagatttcttcactggtgatttttcttcagtttccttattatcaaaatcatcattatcaccatcttcatcattatcatcatcatcatcatcttcatcagtagcaagttttacttttttctgtggaaccttgctaccacctccagggacagaccactttccagatatacttaagagtttcacatcctcctcctcttcatctactgactgcatcttcctccactgctactaaatgttgttcactaatatgcactggccctgaaccacacttcaaccgtaagaccactggtggtgttatttcaaagcccctaaggaaaattgttggctgtacagacattttcaaagttgccagtgttactttaattggactgcctttgtaatacactgcctctgcttcaacgatgtgtaattcatcttttccatcagcccctaaactgaccgttcttaaagataactagtgctcattttcatcattatccaccttaaagtgataatctttgtcagcctgtagttcacaaccaaatagatagttccagggcctccgggggtttatgtccatgtccatcaaatcttccatcaggtggcagcacacacttaggtgggagagaaggcagatggagataaacaaccacagctcaagagaacagccgcacaggacagaatcacatcagggactgatctctattttaaaggtatcccacagactctaatatgtttcaattatcattaacttttagaaattctgtaatttatttcccctttcttttcactcaaaagttgctgaatataaggttaattttcaagtgaaaagtatgttaatctattgattttgttacaatttctagttttaacgcactgcaatcagagaaaaattgtttgtaatatatctactgtttgaaacttcctgatactttcttcaggatacaattaataatacgatcaacttttgtgttccctgtacatttggagaaaaggttattttctattatctagatgtaaagtttaaaagttgtaagttataccttactgattattaggtcttctatattcttactctatttcatccacttgaaatgttttaccctgagaatgctgttattctcctattactattatatttcaatctctaccttctggaatctcccatagtttttgctttcataaaggtggctgctgtgctaactggtacatagataaccacagttattatatcttcattctaaattgtggcttttcatatttaaaagtgtgtaaattttctactgctgccaatgacacaccaccacaaacttagtggcctgaaacagcatctacttattatctcagtttctgtgggtcagctgtctgtgcacagtgcagctcagtggattctctgctcgaggtctcacaggcccaaaaccaagagtagggctatgttcccttctggagactctgggaaagaaatactttcatgctctttcagattgttggctggcattcagttccttaaggttgtagagttggagttttcctttctttgttagctatcatttgggaacatctctccgtttcttaaggctgcttgcattccttgtcacatttccccctccatcttcaaaccagtcatggcaagtcaggtcattctcgcactttgaatatctttgatgtaccctttatcacttctctctgactctaatccagaaagttctctgcttttaaaggttcatgttattagactgagcccacctgaataacccaggataatctttatatcttaaggtttataaccttaattacatctgtaaggttcctttgccacttaatgtcacaggtttcctggatgagggcatcattaggtgaagaaaaaggcactgtatctaccataaaatgtgtccttctttgttacaattggtgtattttggcttgaattctattttgtctaataggatcattgtttccttattgtttccatttgtctagtatgtctttaaacaccgtttatttttagtccttttgaactactgttttaggtgtgtctcttttaaatagcatacattggatctatcttctttctgaagaaaatacaaattttcttctaatggtgagttaggtgtattcacatttgttgatattatggacatatttagtctcaataatatcttactgttagataattttgtgtatgttatatttcctgtgttctttactccaggtacctagaataggcaaactgatggagagcaaaagagaaatcactagggaatggagaattaccgtttaataaatacattgtttccatttgaaaaagatcagaaaatgaatagtgatgatggttgcacaacattgtgaatgtacttactgctattgaatatacacctaaaaatattccaaatcatagactgaggcatatatattttaccacaataaaaaaatctaaaaaatatatgcaatataattacaaacataaatttataattttgtgtataagcataagaagtatatatagtaaaatctcaagttacatttaaaacctaatgatctagaagttacccaggccaattagctgtataagctcaaagtatactcttctgtcagggaagagtttattcaagtatttaatgaacatcagactgtaggcttagaaatgtgttcaatattatatataaaggctgttttaaagagctattaacttattctaattaggtgcttatttttataattgtcttcagcacaaaactaatctcccttcatttccatggtaggatttaagaacttcaaaaatcctacatatagaactataacagcagcagctgcaattttctgagctgtttacatcaaaaggaactgcactgcatacattatttcatttaattcccacaacaaaataaagtaagtatataattccattttaagaatgagaaaagtgaggttcaaaaagcttaagtaagaagttacagagttggtgaggagcagagcaaggactcaaacccaggattaggtgaccacaaagcctatgcttctgaaataagttatgtatatgctagggaaatgcatggcaatcacaagatcaacaggcatcttcatgggaacaaaaaaaaaaatcctctactaattttaaaaattgtaactttttttacatttgcaaaaatttaaatttaattcatttcataataagacaaacatgaattatagtagagaataaaaggtaacactggcacaaaattttgagatagaacataacttctaagaaatttaatgtcaggaacttctcaaaggtcttaaattaccttcagtatacacagagagagctgtatagaagggcaagtggacctagatccactttcttcctctagtttgacttgaatgttaatgtttaagaaacactaaatgagctgggcgtagtggctcaagcctgtaatcccagcactttgggaggctgaggcaggcagatcgcctgaggtcaggagttccagaccagcctgaccaacatggagaaaccccgtctctactaaaaatacaaaattagccaggcgtggtggcacatgtctgtaatcccagctacttaggaggctgaggcaggagaatcgcttgaacctgggaggcggagcttgcggtgagccgagattgcgccattggactccagcctgggcaacaagagcaaaactccatctcaaaaaaaaaaaaagaaaagaaacattaattgaaaatttggcttcctatttctgaattacaccaattgtagacaaacacagagataaatgaacagcaaccttcatatctcatttaaggaaaaaaagcagtgtttatctcctcataatacacattaaaccctcaattacataacgatcagtttgtacccctagagattccttcaggcatgcctattaccctattcctaacttaggatcagacatggaaagatgggtaaaaatttagatcaatattcagaaatgacacatttactaacaaaaagaataactgtactggaggtttcagccagtgaaattagaaaagtaaaaaataaaagcaattacaaatcttataaggaagaagtaaaactgtcttttagcagctgatatgatcatgtataaaagaaaacctcctaaggaagctacaatgaaggtactagaactaataatttaaccaggttgcaggatataagagtaagatacaaagacaaatttctacatactaacaacaaatattaaaaactgaaattaaacaacataatttgcaagactataaaaaatacttagaggtaaatttatcaagatatttttaagacctctactttgaacactacaaaacattcctgagagaaatttaagatgtaaataaatagatatcatgttcatggatagaatatatcaattctcccccaaatttatctataagagtgaaagtaatcccaatagatatcctagtggatgttttgtggaattataaattgattcttaaatttatatgaaaatgcaaaggatttggcaaagccaaaatgattttgaaaaaggaaaataaaactgaataatttatactacctaacttcatggcagattataaagctctattaaccaagtattagcataaagacatatatagatcaatgagtagaatggagattccagaaatagacccacacttacactacaatcaatttatttgacaaaacttccaaggaaagccaatgagcaaaggatagtcttgaaaaaaaaattatgctggaacaattggatatccacatagaaaataaaatgaaccttaacccttaagtcataccatagcacaaaagtaacttaaatggggtcatgatcccaagcataagatgtaaatctacaaaatttctagaagaaaatgtttcttaccttaggatagacaaacatttctgaggacacaaaaatatgaaccaaaaatagacatataaattaatattcatcaaaatttaagaaacatctgaattacagttaagaaaccaaaaacataaagaaaacttgccacgaactaggagacgatacaatacatatatgtgacaaagtgctagatccagactatataatgaacgcttgtatctcactcataatagaaaaccctaatttagaaaatggccaagagatttaaacacacattttacagaaaatagccaataagcatacaaaaagatgctaaatatcatttagtcaccaatgaaatgcaaagcaaaactgtgagatgctactgcatattcataagaataactcttacagacactacataagagttgacaagaatgtgaaacaatgggcaatctcttattgctgtgggaatgcaaaacggttgtaacccttttggaaaacaacttcggcagtttcttataaacatattaaacgttagatccaaaaattctactcaagtatttatccaaaagaaatgaatgaaagcacatctacacaaaggtttgtacaaaagtgttcatattagcattattcattatagtctcaaaccagaaacaacccaaatttccaccaacaagggtgagtgaataaacaaattgtgatacagacacacactgtaataccaccgaacaataaaactgaataaaccactgggcaaaaaaatagtattaaataataacatgagcaaatctcaaaaactgtgccatgccaaagaagccatcagacaaaagattgtacactctatgattccatttatttaaaattccagaacacataaaactgacctctaatgatagaaaggacatcaataattacctaaagtctgagctcaggggagcaagagagggcatgaggtagatttttcgagtgatgtggatgccctatctatctatattgggcaaaaccagtctgtacacttagtaaagttgatttgaaaatccttctaaacatatgtttggtgaaatggaacatagcatatataaaagaaggcagctgatgttagagaccagattataaatatttataaaaacctaaaaacaatttaggattaaaataaagctggagagagtttcatcatactttcagtgctatgaagacaaatcaccttggggtaaaaaaaactgggatgaattttttaaaaatttattctaacagaagatttaaaaagtgattatatagaaaaattaactgattatggtatatttttaaaaatctctttcaaaccaggcgctttttagggtgagcagttagtgcatttctttctaattataaaaggtggagaaagcagcacccaaattgaacctgactgactcatctttgaatggttctttgaaccatttctttttcttttttttaacatttaagttcacgggtacaaatgcaggtttgctacataggtaaacttgcgtcatgggggttgttgtacagattatttcatcacccaggtactaagcaaggaacccattagttattctacccgatcctctccttcctcccaccctccaccctctgaaaggccccagagtgtgttgttcccctctgtctgtccatgttgaaccacttcttttaaaatttagcacaaacccactttccagcttcattctgcctaacttcaagttagtccactgactgaattttctgaattacaacttgtgtgctattgtatacaaaggtctggtgtttgaaatgcttccagatatacaatgagcatatttggaagtctgtggccaacagtttttgttactttttagtctcagccatattaaagtgatcttaattcattctaggtaattaggtttaagtaccatagtcccaagaattcaaggctggcaaacaatggtttccaaaaaaagaaaataataattttccatgtcaaataatatctttaacatactttcagaaacataatctaacaatgaggcaaattctattactgtcagagttcctatgttttttttttttaaagtcattttgtttctcacagttttaacaacccatacaaatagataaattcataaagaaaatgtcacacatacataattggaacattattcagccttttaaaaaataagagaatcctcttatttgtgacaacatggatgtgcctgaaagacattatgctaagtgaaataagtcaggcacagaaagacactgcacaattcttatgtgagacacctgaaataggaaaaagtatagatatagaaattagaatagtagttaccagggaatgcagaaaagagagaaaaagagttgtcatctaaggggaggcagttacacaagatgaataagttccagaggtctgccatgagagggcctacagtcaacaataatatgtggtacatataaaatcttagaaagaatggatctcattttaaatgttaacaaatcaacaacagcaacaaaggaaaacatagaaagttttggaggtgatggatatgcccattacccagaatgtggtgatagcaacataaatgaatatgtatatttaaactcaccaaattgcattaattaactatgtgcagttttaaaagaaacaattgcatctccataaaagtgggaggaaacaccagtatggtaaagcatgaaaacaaaaatgtacaccaatagaaaagaatagagagcctagaaataaatccacaaacctagtcaatttatttttgataagcgtaccatgaatacatactaaggaaaggatagtcaatccaacatagtgctggaaaaaatgaacacgccaacagaatgaaactaggcccttattttacaccatacacaaaaaccaaatcaaaatagactaaacacttaacataagacctgaatctgtaaatctactaggagaaagcataggctcctaagctctaagtcccagatcaatttataggaaagtataaacttgaagaatatgctagcagcatattgcaatacttatctatatttttattttaatttcccaacaattgttgtaatacattgctcagaaaggttatgcaccttacccaaactaccaaagagagctgtgatttaaaaccagattaaacccccaaatccattttaagtaccatgctgtaatgcctcaaaaggagagctcaatctctccaagaggtactacataaacttggggaagagtgacagcataatttttaaaaacttcatttaccttcaggggacgcagagcgccacaaaattttgtccaccagctgttttcaatgaattctaaatgcctctctctcttcttaagtgttcgtaacctttcttcaaattgttttaaggcgcgtttatcccttgctggcaaaggtcgaccatctttgctctgcaaataacagaacaaaataaaagttttaccattaacatcttaataaagtacccagcagatttagcagatcaggcaacaaaaccttttcaggatggacactctttaggcaaatttacaaactaaaaaaaacctgacaactgcaatatgacaataaacataggataaccaaggtcagcataaaaatgtggatgtgtgtacatttatgcctaccttcctcttgatcccaatacatggtagagttatgtggagagagataaccatttgtaaaaacattccacaaaaagtatgtttgataagaagtgttaactactatgtactttgctcaatgattctccctcctctccaaactcactgtatcacttatttcaatatatttggctctgccccttccctctctttagtcaagtggttatgttacctgaactgatgcttctcagcccaattcaaatgctagcagaatgaagcaacacaagcacagatggcatacagaggtttttgtaacaattgctaagaactgatacttccttgttttccaagtactttggcaaatgagtcaagctttctttggccaacctatctgacagataatttccatctatttttacgcgacactttctgtaaccatgagcagtacctttctcatcatatctcatagatacactttcccactgaactctcctgctcctatcttcaattgggtacaaaaataaaacaactactaaatacagaaaaggtaaaatataaaattgtttttatcagcaggaacaagaaaaatatttgtataggattacatttttaaagtgtagatatattaggtatcagaatgtctttaatattcctattaaggtttaaataggttcctagcagatacacaacatattgctcttcccatgtatcctagtgcagcctcaatttgaaatcataactataatgcagagaaaacctatgtaacctttaataaagagatttacacagttacaacaatctctttacatatcggcatcactatgatcttctggaaccaatcatcctctcccacgacttatcttgttgcttgtcaaacttcatgcataagaatcacttggaaagtttgttaaatacatatatctaggccctatccccagaggatatgattttgtaggtcttgggtggagcctagaatttgaatttctaccaaatttccaggagatgcagatgctactagtccagagaccacacattacatactacagactatattccattcctctaagtacattgggtattatcactggatcccagaaaacgaaaactaagagggattttctgaagatcagagtaataaaatgaacactcccttctggaagataaatccaggtaacaatacttcaagtgtgtggtatgagaaggattcggcactttatatcttaaccataacaatttcccctaaaatttccattatcgtatcaaaaggatactacaaatgaggtaattttgtctcaatgctggcgttcactattttagaaaaaaaaatagtaaactgattaaaggatccacttgaaacaaacccaagttatctgcctacttggtgaatgcttcagtggaatgagggatgaatttccattctgcattgccaattgactaaacgaatataagaataattttgatcagagaaacaaatactaagatgtaaactcagcagtgaacatctacctcatttgaaagaaaaaatgtagttatacaggttaaaatgtagttaaagggaataacaaacccctggttaagaaaaaaagtaaaacatgaaagcttcccttcacactgtctgtctccaattaccatattaccattcccctttcctatggtttttactgttaagcagttaaatatccttcaacaaattttctatttacacacacacacacacgtacacatatacaaatgtatttacgatgtcttattatatgtgtaatttttcctgatcttctccctccttccaccctctgccctccagtgggccctagtatgcactgttcccctctatgtgtccatgtgttctcatcacttagcttccatttgtgagaacatgcagtattagattttctgttcatgtgttagtttgctaaggataatggcctccagctccctccatgtccctgcaagggacatgatctcattttttatggctacatactattccatggtgtatatgtaacacattttctttatgcagtctaccattgatgagcatttaggttgattccatgtctttgctattgtgaatagtgctgcagtgaacatttgtgtgcatgtgtctttatcgcagaatgctttatattcctctgggtatataccctctaataggattgctggggttggatggtagtcctacttttagttctttgtggaatcaccatactactttccacaatggttgaactaatttgcacttctaccaacagtgtttaagccttctcttttctcagcaaccttgctggcatctgttattttttgactttttaataacagccattctgactggtatgagatggtatctcattgtggtttttatttgcatttctctaatggtcagtgatgttgagcttttttcatatgattttttggccacatgtatgtctccttttgagaagtgtcttgagcacctttcttgtgcataaaactggtcttctctttttatatttatttttcataaatcttctgaataactctttgaggctgataatagtattatattcatttattaaatgagaaaaaaaggcctacagatgttatgtgcacaatcagtagagctagattttgaactgagatagtctgattttacatgacataattcttcaagctacatatagatttataaatatatctcattccttttcatcattgcacattacaagatggtatctagatttaacaacttattttgaacatgcagattatttcttttttaaatttttgttgagggccattaacaatgtgccataaacattcttacatacctgggtacaaacatatacatacaattcagcaggataatttcctagaggtaaactgttagattaaactttaattattaaataaatatttaattattaattaattttaaatattaaaatacatatgtatttatatgtacaggcacatgtcacaacattcaattttctttaaaaagttgtatattttatatactcacaaacagtctatctaatccccaaattctgataaaaatttgacacagatgaaaatttaaaagaggtccaaagaatttttaaaaaatatattgagttgttctcgacatatattattattttacagtttgtggctattgtgaatgggattattttgtattacatcttccaactaattaatgatttttatgtttacatctaggcactgtgataaactcttattagttctactagtttgtcagttgattattttagattatcatggtagatgatatttgccaacaaaaaagttattttcctttttccccctcctctccatgcttatatgtaaattctaaattatttcttatctgactcacattgccagatatatgctaaaagtaacaaggatactaacattactcctatatttgacgttaatgggaatgtttctattctttcactattaagtattatgctcattagaggcttcctttccatattttcttatctttattttgaaaagactttttaaaaaaatgtaactacaaattaacttttagcaaatactctgacatctactaagatgtttatatttcacatttaatctcaatatattaaactactttaatgtattttctgatgtatcatgtttgcatttctgagataaacctaatctgatgattatgaaatattctcttattatagcacaggttttgaattgctactttttgtttgtttgtttgtttttaaacagggtcttgctccatcatccagataggctggagtgcagcggcacgatcatggatcactgcagccgcaacttcctgggctcaagtgatcgtcccaactcagtctcccaagtagttgggactataggcatgccagtacacctagctaagtttttgtattttttttgtagagatggggttttgccatattgcccaagctggtaccaaaatcctaagctcaagcaatctgggactacaggtgtgagccaccagtacgtacctagccacttatattttatttgtattaaaatatttgcttctactttcataagaaagccggtatatggttttcttttttgtgtgctgttattgtctggtttatttatcagaatcatactagcttaggagaaaaatttagaggacttgctatttttttaccatgatctttgagtaagatttatctgttacttgaagacgacagaggaagaaaaactttttacagtatttttagaagtacatttaattggcaaggggttacatgtaatctttagcttattcaactagtaaataaaacttgaacataaatattatagtaaaatataatattataaacgacgatacctgagaactagtaagttcttgatcatacataagaaaaacttctgttttttaagtgttagaacaatgatagaaattctcaaattgctagtgtcctacattacacagaagacaaatttttaaaaatatagacatggttttgtaagggtactgtattagtccattcttatgctgctataaagaactactcgagactgggtactttataaaggaaagaggtttgattgactcacagttccgcagggctgcgaggcctcaggaaacttacaatcatagcagaagggtaagcaaacacgtccttcttcatgtggcggcaggaaggagaagtgccaaagggggaaagcctccttataaagccatcaaacctcatgagaactcactcactatcatgagaacaccatgagggtaactgcccccatgactcaattacctcccactgggtccctcccacaacacgggggattattggaactacaattcaagataagatttaagtgaggacacagtcaaactgtaccagatatgctgcaaaaaattcaaacaatgtaaaaagttatggggttgacaatgtctaagtcatatcagaaagcagctctaagacaaagtagttttatgcttcccaattacaccaaaacatcaactcacttttgatttaatcgtttgaatgtgttgttctacttcttcaatgtcttcagtgttttccaaacgttcataagcagcgcttctagtgccttttatcagatttaaaggtaacgcagacatgccataggcctaaaagaaaaacaattgaaatgttttagaaataatgtttcaaacatattatacacaattttaggttaaaaatgtcttttaaagtcataagagtcagcagttgtgaaagagtacagtcactgaaaacatggtatatgggagtgaacattatattgtctcataattctcccgtttattttgcattaaacagagtcaaatttataatactattcctcaaaggttaagttgcaaatttactgtaaatttactgtacaatactttatatcaaagtaataattacaaattcagactaatcgaaggttaagatactataaattagtaaaaaaatttaaaaaaatgattttctataaaaaacaattttctccaagtatatatagtaaacctttggtaaaataagtattttaatatatacatgttatttgattagcatatcaattatctacattataaagtttatttaaaagttctaaatatttataaccaatctttttgctaagtattttaaatattttccaagtaattttaacttattaatcagcattaagaataaacatgttattatatatactacccaatttcatattccagtcccaaatgacagctttttaatataatcattaataatacttaatggcatctgctacataaccattattcagaatcattactgaccatatttccttagcagaaacactgacaactatcacctcctggtggcagcaacaaactctgaagtggatactacattatgtacttaaatgtttttcactttccttctggcacactttaccccgtgccccctgttagatgggccatgagattgagttcaggacaatgaatgtgagcagaagtgataaatgccacgttttaggcatgaccccaaacaccaaaataccctgggtgatcctgaatgctttttctcatgctctctgctacctagctgtcaactccaagaatgacttaagatacctttagtgttaattttaattagtttaatattctaatattcttcactaaatctcttttatgcaatgattaaacattgcttaaaccacaattcaaatagcaaagcataaattctaacaaatcagctttttttttaattaagggagaagaacaaaaaacatgaataaaaattatcctgaaatcaactagttctatcatgtaatatcaactctacagtacgttgtatttagatacttacctagctgaaattattacccaatatccaaatccttgtatttccaaaggagaaacacttaaaaaaccttgcactttaaatattattaaaacataagttagtattctcattatttcccttttatcccaaaaaaggacggggtggaagaagattctgttactattagatgaaaatgtaatttggataccatacactttaagtatccctcatcttaaatggctgggactagaagtgttttggatttcagaattttttggacttttggtatatttggtatatttggtatattttggtatatttggtatattttttggacttttggtatatttggtatattgagcatccctaatctgaaaatccaacatctgaaatgctccaagagagatgaaacaagatggtggaatagaagcctacaccattcatcttcctcactggaaaaccacattttaatatctacacacagaaaagtactgtcacaagaaccaaaaatccagtaagcaatcacagtacctggttttaacttcatattactaaaagaggcattgaggaggtcaggagagacagtcttgaatcaccaatgccacccctccgccatcccccagcggcagccatgaggcaccatggaaagagaatcttttcgctttcaggagggacagcacagtggtgactaaggggactttacactgaactcagtgctgtcctatcaccgttgacaatagagccatactgggctcagctagtgcccatgcatagaaggaacatttgcaccaacaccagccagaggggaatcactcatcccagtggttggaactggagtttctcagcaagccttgccactgtgggcaaaatgctctggaatcctaggtaaactcaaaaggcagtctaggaaacaaggactgcaattcctaggcaactcctagtgctaggctgggcttacagtggactagggtggcatgtgacccagggagacaacagctaagggagtgcttgcaccattcctctcccaaccccatgaagtgcagctcacctcaacaaaggtgactctttcctttggcctgaggaaaggagagggaagagtaaagagaactttgttttgcgtcttggataccagcatggccacaacaggatactgtgccagagtcgtcaggcccccattccagggcctagctcacagatgacatttctagacacaccttggaccaaaagtggatctgctgccttgaagggtagtcaggattgattacctgctgactaaagagcccctggtccctcaataaccagcagtgttatctaccaagcacattgtgggccttggactctgggacatgctggcttcaggggtgatccagcacattcccagctatggtggctgtggtaaaagactccttctgtctgagaaaagtaaaggggactttgtcttgcacctcaggtaccagctcagccacagtaaggcagagcaacaagcagactcttgaggtccccaagtcaaggtctagactcttagaggacagcatttttagacatgccctgtccagaagggagcccattgccctgcaggctgagtctcaggcctggcagcattcaccacaagctgtcagaagagcccttgggctttaagtgaacattagcagtggcctggtggaaccccatggaacagtgtcgatggtggccacagggagagactcctctgcctgtggaaaggggagggaagagcaagtaggactttgtattgtggtggtgtgaatgtcagcttagccacagatcatcaggtaaactgctaaggtttttactccaattcctggctcccagacagcatctcagtagaaaccttacaggccagcaaagaacagcatgacatacttaaagtgctgaagatagaaaaattttaccctagaatagtatatccagtgaaaatatccttcaagtatgaaagataaagatcttcccagagaaacaaaagctaagagacttcattaacaccagacctgccctgcaagaaatggctaaagggagttcttcaatctgaaacaaaaggatattaatgagcaagaggaaatcatgtgaaggtacaaaattcactggaacagtaagcacacagaaaaacaaagaatagtataacactacaatggtggtgtgtaactagtcttgtcttaagtagaaaactaaatgatgaaccaatcaaaaaaaaaaaaaacttttcaagacacaggcagtacaatgagacgtaaagagaaacaacaaaaagtttaaaagcaggaggataaagttaaaatgtcacgcttctatttgttttctttttgtgtgtttgtatatgtagtcagtgttaagttgtcatcagtttaaaataatgggttataaaatagcatacgcaagccttgtggtaacctcaaattaaataacatacaacgaatacttaaaaacataaaggcaagacattaaagcataccaccagacaaaatcaccttcactaaaaggaagacaagaaagaaggaaagaagggaggatcgtaaaataaccagaatataaataacaaaatggcagaagtccttacgtatcagtaacaacactgaatgtaaatggactaaactctccaatcaaaagacatagactgattgaatggataagaaatccaagacccattgatctgttgcctacaagaaatacatttcacctacaaagacatacagactggaatggaaaaagatattccatgccaatggcaacaaaaaaagaacaaaagtaactatgtttatattggggaacatagatttcaaggcaaaaaactgtatgaaaagacaaagaagatcattatatagtgataagggggtcaattcagcaagaggatataacaattataaatgcacccaacactggagcacccagatatataaagcaaatattattagagttagagagacagaccccaatacattaacaatggagacttcaacaccccaatttcagtactggacagatctctcagacagaaaatcagcaaagaaacatcagacttaacctgcactacaaaataaatggacctaatagacatttaaagaacatttcatccagtgtctgtggaatacatattcttttccttagcacatggatcattcccaaggataaaccatatgttaggttataaaacaaatcttaacacattcacaaaaattgaaataatatcaagcatcttctctgaccacaatggaacaaagctacaaatcagtaacaaaaggaatttagagaactatacaaacacatggaaattaaacaatatgctcctaaatgaccagtgggtcaatgaagaaattaaaaaagaaattgaaagagttctggaaacaaatgataatggaaatacaacataccaaaacctacaggatacagcgaaagtagcagtaagagggaaaattacagctctaagtgcctaaatcaaaaaagaagaaaaacttcaaacaaatactgtaatgacgcattttaaagaaatgaaaaataaagaaaaaaccatacccaaaattaggagaaggaaagaaataaagatcagagcagaaataaatgaatttggaataaaacaataaaaaagatagatgaaacaaaaagttggttttttaaaaagaaaaaattgacaaacctttagccagactaagaaaaagacagaacccaaataaataaaataaaagatgaaaatggaaacattacaactgataccacagaaattcaaaggatcattagtggctactatgaacaactaattatatgccaacaaattggaaaatataaaagaaatggataaattcatagacacatacaacctaccaaacttgaaccatgaagaaatccaaatcctgaacagaccagtaataagtaacgagtaacaagatcaaaactgtaattaaaagcctcccaataaaggaaagcccaggacctactgctgatccactgccgaattctatcaaacatttaatgaagaactaatatcagtcctactcaaactgctccaaaatacggaggaggaggaaatagttctagtttcattctataagaccctgataccaaaaccaaagacacatttaaaaaaaaaaaaaaaaacactacaggccaatattcatgaatattcatacaaaaacccctaccatatattagcaaaccaaattcaacatcagaaagatcattcattatgaccaagtgggatttatccctgagatgcaagggatggttcatttgatttgtatttgttgaaccatcccttgcacctcagggataaatcccacttggtcataatgaatgatctttctaatcaatcgttgtaatacatcatatcaagagaatgaaggatgaaaaccacatgatcatttcaattgatgctgaaaaagcatttgataatgttcaacatcctttcaagataaaaaccctcaaaaaactgagtatagaaggaatatacctcaatgtaataaaagccatatatgtgaggtccacagctagtatcacattgaatggtgaaaaactgaaagcctttcttcttagttctggagcaagacaaggatgctcactttcaacactgctattcaacatgaaagtcctagctggggcaatcagacaagacaaagaaagaaagggcatataaactggaaaggaaaaagtcaaactacctttgtttgcaatgatataattttatatttggaaaaacttaaagactccaccaaaaaactattataactgacaagcaaattcagtaaagttgcaggatacaaaatcaacatacaaaaaatcagtagcatttctatatgccaacagtgaacaatcagaaaaataaatttaaaaaagtaagcccatttacaatagccccaaataaaattaaataactaggaattaacttaaccaaaaaagtgaaagatcactgcaatgaaaactataaaatactgatgaatgaggaagacaccaaaaaaatgaagaaatattccatgttcatggattggaagagtcaatattgttaaaatgtccatactactcaaagcaacctacagattcaatgcaatccctatcgaaatagcaatgacaatcttcacacacacacacacacacacacacacacacacacacaaaacacacacctaaagtgtatacagaatcccaaagacccagaataccaaagctatcctgagcaaaaagaacaaaactggaggaatcatattacctgactttaaattctattacagagctatagtaactaaaacagcatggtactggcataaaaacagacacacggaccaatggaacagaatagagaacccacaaacaaatctacacacctatggtaaactcattcttgacaaaggtgccaagaacatgcattgaggaaaagacggcttcttcaataaacagtgccagggaaactggatatccatatgtagaagaatgaatctagacccctatctcttgccacatacaaaaatcaaatcaaaatgaattgaagacctaagatcaaagacctcatactatgaaacgacttcaagaaaacattggagaaattctccaggacattggtctggataaagcttcttaagtaataccttagaagtacaggcaaccaaagcaaaaaatgacaaatgggattacatcaagctaaaaagcttctgcacagtaaagggaacagtcaacacaattaggagacaaggcacagaatgggagaaaatatttgcaaactaccatatgacaagtgattaataaccaaaatatataaggagctcaaacaactctacagaaaaaagcctaataaccatattaaaaagtgggccaaagattggtataaacatttcttaaaatagacatacaaatgacagacaaatgaaaaggtgctcaacatcactgatcatcggagaaatgcaaatcaaaactgagattatcatttcactctgattaaaagggcttttatctaaaagtcaggcaacaacaaatgctggtgaagatgtggagaaaagggaacccttgtacactgttggtgggaatgtaaattagtacaaccactacagagaatagtttggaggttcctcaaaaaactaaaaatagagctactatatgatctagcaatcccactatttggcacatactcaaaagaaaggagatccatatatcaaagagatatctgcactcccatgtttgttgcagcactgtttacaacagccaagatttggaaacaacctaagtgtccatcaacagatgaatggataaagaaaatgtggtacatatatacaatggagtactattcagccataagaagagtaagattctgtcatttgcaacagcatggatagaactggaggtcattatgctaagtgaaataaactaggcacagaaagacaaacatcacatgttctgacttatttgtaggatctaaaaatcaaaacaattgaactcgtggaaacagagaattgaaggatggttactagaggctgggaagggtagtgaggcagtgggaggcaggtaaggatggttactaggtacaaaaaaaaaaaaaaaatgagtaagacccagtatttgaaagcacaacaggtgaactatagtcaataataatttcgttgtacattttaaaataactggctgggcaaggtggcacatgcctgtaatcccaacactttgggaggctgaggcgagtggatcacttgaggttaggagtttgagaacagcctggtcaacatggtgaaatcccatctctactaaaaatgcaaaaaatgagccgggtgtggtggcaagcacctgttgtcccagctactcgggaggctgaggcaggagacggaatttcttgaacccgggtagtggaggttgcagggagttgagatcgcgccactgcactccagcctggtaacagagtgaaactctgtctcaaaagtaaataattaaattaaattaagtaactaaaagaatataattggactgtttgtaacacaaagtatataaatgcttgacagaagagataccgaatttgccatgatgtgattattatgcattgcatgcctataccaaaatatgtactccatctatacagctactacgtacccacgaaaattaaaaataatttttaaaagtgttccaaggaacatttcttttgagctcaaagtttcaaattttgaaagctttcagattttggattttcagattagggagggatactcaacctgtagagtaatttccctctaattacctcaatttttatcaaatgtatactttcaaaatgtatactttggtgaaatataaaaggaaaaatatataattgggtttaaaatgtatattgtaaagttgaaaagttacctactgggtacaacattcacaatttgggtgatggctacactaaaagcctagacttcaccacaatgcaatatatgcatgtcagaaaactgcacttgcaccctctaaatatattttttaaaattaaaagcatctcgtttatatttttaatattaaattatatatcctcaaaacattgaaaaatacaaagaataaagcctatgggaactaaagtacctgatagttcctttaacatttccttataggattttcctatccttattatcattttaacctatttaatttggttattctagtacttccatattctttaaacattattgataaaaagtaacagaataatttaagactctgattaatatatagtattatatgattatttaccaattctcattactcattgtattagtccgttctcacattgctataaagaactacctgagactgggtaatttataaagaaaagaggtttaattggctcacgattccaccaactgtacaggaagcatggttagggacacctcaggaaacttataattgtcgcagaaggcaagggggaagccagcacgttatatgttgctggagcaggaagaagagagtgaagtgggaggtgctacagatttttaaacacccagatctcgtgagaactctatcccaagacagtactacgaggatggtgctaaaccattagacactaccccgatgatccaatcacttcccaccaggccacaccgccgacactcgggatcacaattcaacatgagatttgggtagagacagacagccaaaccacatcattcatattattttcataatccaaaagaatgttgctttttacaacaaaatgccatggcaatattttgctaagcccagcttatatgcaggtatgtttccctgtcccctcaaccacctccaatctaggcctatttgtcctcaatgcttgttattctgtgttggatggattaggttccctgaatgcactaactgcagtactcgatactgtttcccaaggaaccttttgctctagtcagtattaacaacatggcccttatttacagtctactgtcaaacacaaggccttctgaattatcctaaactggtctgctggtctcaatttctacaaatccatcttctacactgtttctaaagtgatctcactctaatacccaagtcaatatatgtcattcctctaattaacatcctttaagattctacaggactaataaatgtatttttcaaagcattctggtatgagttcctaggaatctggaaaggtgccactagggccactacagaagataaggcagctagccatgcaggaatctgctgctactttaaccagagcaattctacttgttcccaacctctatatgtatatgaacatataaaattgttttaaaaagttgttttgctattttttttttatgaaaggtacaattattggttggtattgggaaaagactctaattaatgtaattctacatataaagcacttcatgacctgatccctaccaacttgttaactttatctcatgcttctgaattgttcatagttcttaaaacactacaattttatgctactttaggctttgtccaacatacacattttattccatgtagtgccctcatctagaatgcccaccttctcatcttatttcattaacaactgttaatgcccttcaggtctcggtttaattacaatacgtctgagaaaccttccctgacttgtaaatgtcccttgcttataactcaattataacgcataggtatattaacattattcatctgcacatttgttttatcactagatctgccaaacttggctgaacagatttctaggccagactaataacaactacagtagactatctggtatgtaatgactaagtcccaattctttttcctcctacctttgtttcaagaacaaacatttattattaaattaataaaataatttctccaagaagataataattgaccaataagcttttaggaagagacagctcttaattcacacaaagttatttccttaaatggaattgatatacttattagaagagctgaactgaatttctaaatagcttaatttaaaatattttataaaataaaaaagtttctggtaacaacttgcggtaacataagaccagaacaaaacactatttttaaatttttaattgtccgaagacaacgtagaagaaaggtgccatcgtttggttaccaagcttttagcttgtttttggactgcattttcaataattatcaggaaatttaactacaatatttagattatgataagcttgacatagaccttatataaaacattataacttttaaggtctttaaacaacaatcttttgaacttcacgaacttcacttcagactttttttttaatgtacaaaaaggctatccttttcagaaacacaaaacttttattacttactactgccctctagtgaatttccagaaaaaaaaatcagaaaactaaagagattgtatagtttaaaatgcttctattaataggttggccctaattgtctccaaatttattttgacttccaagaataaatcaccaactgtatttgaaaactaaaatgttttaaaataatatatacaaactacattcctaataacttcttttaccgctcagtttagaagggcacgttttctttacatatctctctcctttatctggaatgctggtttccaactctgcaggccttagattattgtaaagggtcaacactaaatactacctgtagacttaataaatgtcttccacatatttgtgaaatctattattcaaagatgtacatgttattatgattaatgaaacaacacaggtactcaagactttccttttaagtattcactgagtctaagacgtatatattttcttacatttaatatcagtgaaatttggatgcatctaaaaattgaaggcatcatataattgaaggctaggcagaagccatgacatagttgtcgctacatgcacattcacaaatttggtcacagcaagttacattacagtcacttcagttgaattacatgcattcttggtacaattattgagtttaattgccacttatgtcttaaaagataatatgatttgacattaaagcaaaaagttaatgtgtaagtcaggagaaagagaatgaagatgcatcggtagtaaagaaaatattcattagaataatgggcataattctgtattttcttaaaaagcaacagtcaagtgcttcataagcttaagaaaggaagatatccaaaagagaagcatttttctgcttaggtatatgcaaaaggattcccttctatatggcaagacaagaaacaacagcaaaacatcttaaatttacaggataggtgtgttggcagcttcgaagaaaatcccagagataagaatagaacacacaagaaaagctgcacatcaattctcttgatagcataaaagacaatacacttttttagcttctgtgtatgagcgaaaacatgtgaaacttgtctttctgagtccagcttatttcacctaacacagtgactacaactaatgactaaaagagtagaggccgttaagggtagggagtagggaggggagatgaagagaggcttgattaatgggtacaaaagtacagttaaatagacaaaatacaacctagtgttcaatagatcagtagggtgactacagtcaacaataatctattgtatatttccaaatagctagaagagaataattcagatattcctggcataaagataaatgtttaaggtgatggatattccaattaccctgatttgatcattacacattatatgaacacctcagactatcacatgtacctggaaaatgtgtatacctattatgtatcaataaaaataaaagacaatacagttggttcccatgtcacaatggttcaacttaggattttcatactttgtgatggtatgagaccattcttttttactttcagtacagtagtcaataaattacataagaaaatatttgatattttattgtaaaataggcttggtgttagataattttgtgcaactgtaagctaatgtaagtgttctgagcaagtttaagataagctaaactaagctattatgttcagataggctaaactaagctatgatattcagtagtttaggtgtattaaatgcattttcaaactgaaaatattttcaacttacgatggatttaacagaatgtaactccactgtaagtcaaaaaccatctgtgtcgtatagtaaaacatgaacatcaataaccaattcaaaaagtgatatagaattctcacactccaaatataaagttttaggaacgcctttcatttcatattttccttgttatgaatgcagacaaatccaacaaatctcactcactaaatataaaacaaagattataaatgattaagaaaaacttgtcagatttttccttatagtgacacataaagtaacggtgcaccttacaatcggtagcatatattcagtgaaatatgctatcacataggctgagaaatttgacttttaaagggaatttctttctctaaatattattgagaaccactgctgtgattcataaggtgttgtaacatgaactgaatgtttgttttcccctaaaattcgtatgttgaaatctaatccccagtgtgatatttgtaggtggagttttcaagagataactgagtcatgagggtgaatcccttataaataagattaatgcccttataagaagggtcacaatagagcttgcttcctctctctccctgctctttatcatatgagcatagaatgagaagacagccaactgcaaatcaaggaagagggccctcaccagacaccagacaccttgatgttgtacttcccagtctctagaaccatgagaaataaatgtttgttgtttgagccacccagtctatggtacatctgttatactgacctgaactaagacatggaggcaaaccaacatttgatgggtacaagaagaaaatattaaatgttttatttctatatttgaatctttatcactttaatgttctttaacctattagtttatattttacattaaatgtacaaagattagcataataatatgtaaatatgtatttataatcataaatatcctggtggacatatttaaagttttatggatagaggtatatagtaaacaatttagcagtcactgcttctataggcagttcactggtccatacgatacattttgctgaagacatcattattcaacatttccccacttggtggcaccaaaaaattagaatatctacatatatatccgtgcctgttaagttttacttttttaaatttagtaagtatcaattccctttcaatgtaagcttaaaataataggcaaactaatatgctgtttgacctccttctcctaaagctcactgtccaattatttggcattgattaatacagggtacagtagtcagaatcagtaaaatttaaataatcaactagtttcaaaaataaacaataatacataactaagaaattcacacttgactgacacataagataaaaaaatttctctagcctcaatacaaaaaaaaaattcagttacaaattccataacaaacatgatttttacatttcatattatatttagggtcaaagtactcaagtattaatttcccactctgggtactttaattaagattaaacctattctagtcctcatgcatattttctataccctctttcaaggtgccacaaggaaagtccagttctcaaccttttccaaggtaagttaggagaaaactttgtatcccaactacaagcaaatatgataattatactatttaactacctatctacaataaaaccacatatctataaattgttggttttcactgaatttttactaaaatttcggtaagtattattggctcatttttacagatggggaagcttgggatcaggtaatagattttaaacaaactcaacattcatgaccagagctcagctatacacaccatgatgcccctcttgaacagggtatcatctaccttcctcttcccctccctctatacaccacaggtattaaaactggccaaatcatggcttggcagcaaaacctgagctttgagtacttgtagtgctattcgaatgatattatctctctatccacactcccccaaccccaactaaccaccattcaattatgaatgcctttttgacttacctttgaataagaaacattctcactgatcatgatacaactgctttttgcatttggtttattttcactgagagaggaaagaggtgggaactatagtttgaaccatatgaaactgtgaatattcaactgtttaagctaatagtgactattaagtggccagtagattccaagacttggtggattatttaattaaatcctcactactttattacttaaatatcataccactataaagatgaagaaatttagatgggaaagtaggtcaggaggcccatggacttgagatccacatttcagcctctccacaccaattattataattttattgtttatgctgcttaaagaaaaccaataactgctaggaagttggatcttagtgggctgttacatcggaatctctcccttggccttaggccttaagtggcccctctctacctatttagcaactcttctatgtgttcctggttcccaccctcaatcccattataaggtcctctggttgttttatcaatatccttcagcccagccctctatacagtaaatcatcacataacgtcatcaatggattcttggaaactgggactttaagtgaaaggatgtataacaaaaccaatttttttttttttttgagacggagtcttgctcttgtctcccaggctggagtgaaatggcgcaatctcggctcactgcaacctctgcctgccgaattcaagcgattctcctgcctcagtctcccgagtacctgcgattacaggagcccaccactaagcccggctaatttttgtattttcagtagagatggggttttaccatgttagccaggctggtctcaaactcctgacctcaggtgacccgcccacctcggtctccgaaagggctgggattacaggcgtgagccattgtgcctggcaacaaaaccaattttactacagactaattgacgtaaacaaaagctaacttcctattgcatatttctggtcacaagaacatcaccaaacttctaaataaagattcaaagcacttctaatattaaatactgaaataaatgtaagctctacatacatttaggaaagattaataaaaacaaaatactcaacttttggtgaattagtgagtgacgatggttgtggtcatagtgggttaaattaaggaataaatgtttgcaaagtgaaaattataaagagctcctcctaccaccacacagttcaaaaacaaaaacaaagaaacaacagtgttgggctagctgaacgcttttgtattgcaattattgttatgcacttgtatgtagtatacttcatgaatttttattttacaataatttgcattcatttgctcattcattttccaagccacttattcttagttcagggtcacgggtggctggagcctatcccactagctcaggttgcaaggcaggaaccaacactggacaggatgccattccaactgcagggtgcactcacacatacctacactaactcctactggcacaatttcagacataccaattcacctaatacgcacatcttgggaatgtgggaggaaaccagagtacccagagaaaacccacgcagacatggaaacaacatgcaaactccacacagtggccctagccagaaactgttcttttttcacatcaacattataggaaaacaacataaaaaaaaaaaaaaagatgttatttgaggacctgctgtattctagaaaagtgaagttcttttaaggatagcttaaccaattcagtatgaatactatgtcagtttaattgatttaaataattttcaaagtttccatttaaatataaaatattagtttaaaatgtttctttccaataatatcattcctacaaagaagctctctttcaaatagttttagtaacatcttattttctccactcccactcgctaccctcatagcttatttaattcggagccaccagagtgatactgttaaaatgtttgtcagagcccatgccttttccatttaaaaacttccaggggcttcaaaactcaatcagtataaacttcaaaaccctaactgtggactataaagctcacatgacatggcctcttgctacctctcaatgaaacttttactactcccccttgtcaactgaattccagccacaatggctttgcctccttgctagtatctgaatatagcatgtatgtgcccacctcaggatcctcacacttactcttctgtcatggcttactttcacttcattcaggtctctgttcagatgttagaaactattcctgatctttacagtagtctcagcctctactactgtctatctacttatgctgccttatttttcctcatagtatctaccaattgaccactgggagacacatctccacgcatctttcatttctgcatattttgcaagccaggagctaattgaccccccctccgccgacccaccactttttttttctgtactatcttttcaaagatctttgtatagcaaatagtcttggtagatgcagaaaatatctttccctggagcaaaggacaggcatgcttaccatccattataaaagattcagcttccctaagctcagggttcctcttctacaatacactctattatgtgcaggtctcatctagttctctccccattgccctaagggaactgggactccgggaaccaacacacaaaaaagttgatcctatggctactgctattgctgtgagtagaagtcttacatcttcagttgtcatccacaaaactggcaggttacaagtagggtaaatatcctaggtccttcatagttcttgacattgacattacatactgaatttctctctatttttttctcctgacttatgtttcattgattgctatatcctcatttctctaaaggtttcaaagcacttttacaaatagtatcatttgaccttcaaaaatccctgtggaacattttctatttccatttaatagggaagacactgatccagaaaggttaaaggacaaacccaagattagcatagcagatcagtcacagaataatagcagttaaaatccaggtctaattcctaatttgttattaacttgtgactacttcttaaaagacaactactatgctgtacattctgtgagatagaaggataatcacccaatgatattagatgacaagttccttatgtggtatcacataaaaacacaaaaatttcaatgaataataaaactgagtacccaagtaagcacctgtaagatattgaaatgtatgtcttttggggttcttttattatacattatggcacgtgaatgatcatgtgacaaaactaaattctgctcttacgataatagccatttcctttatgtctaaaggaagacatcttaagaaaatacccaaaaatgtttcctttgtaaccagaattttcatctttgcaagaattaagagtgcttcaacataaacttcattaatctgaaaggttccagataatattaatgctgcttatacaactctcaagataggtaataaagaagcatttattactagctttttatctacaatgtgagcaaaagactcaaagagaagtctgtatacaacttggtcagtcatttataattcacaccttaccacttccaggaagactgaggggaaaaaagtctgggagtataagaacagatttcatataaaagagaagtatcaagttatataaaatatctgattttaaaagccctatatccccaagtagagtaaatctgcaaaaccagtaatagatatggtctatggttcagagttctaatatgcttataaatctattaatatgcttatattatatattatatgcttatattataaatctattaatatgcttataaatctataggcatatagatttataagcatatcaggtattataaatctattatatagatttataagcatagattattataacagtatataaccaccttcaaggttcataagttataaaatttctgattatgaaattgcacaaatacagctaaaatgatgatggctaagtagttaaaattttacccttaagtaaagaaaactgaagaaaaattgaaaaagaatcaaaatattataaaggaaaacagaataaagtttaataaattactaaggtaaaaaaattgttttataaggcaattttaactcaattatccccatttcacttactgtgtaagttatagctgccaacattccaatcaaggtcagagaactgatagaaaatgacaatgcagctaaaccatctgtgaagaaagaaaaactgttaaaaatgtacatatatactactcaaatccttatatttagcaaatcaacatagaaagctgagctgcttacacattttgaagaaataaaaaccaatatgtattaccgtattcttgaagtgctaactccaagtggagaaaagagtttctaaaggactctttaaaaattgatttgtaaaaaatctttctgactagctgagattttctttccttcacgtcttaaaattaagaggaaaattactggctaattattgggcccaaaaagagatcagcaaaatatcagatgctcaaaaggtgattaaaaagatcacatggcctttctcaatggcagaccctgagaaataacatttcataggaaagccactgaccttgactctttctcccttctcccctcagtcttgagacttccagtttctttgttcttaattttcaaattggttcttaatagataatcaaaaactaaaatcttaattaaagatttatttcactttttaacttgaaaggacaagcttgcctacttggcagaaaaataaaagcaaacacaacgagaaaataggtttaaaaatacacacacacacacacacacacacacacacaaaatactatgctaacgcattggatttaggaaattatctaaaggaaggtcaaagagtgaggggcaggaatgacactttcacataaatatatcaaattatgtaataaaatactatgcaaatttgaatattcttaggagcaacactttttccagttttaatacaggtcctattaggcctgtattgagcgagtttaaatgcaagtcctgtggaatcaaatacaaagttttgattaatttaatgtattgacattaatcttttatgagtactaataaaattataatgatctatcatcttaaaactcatgtctcagttttgtataacacataaagaaggcatattattaacaaattcacaatcacgcaaggcaaatttttaagccttaattttttaaaactactttttatcaaatcaaagacattttgatgctgttactttactgatcataccagaagtatcatgagaaggtgtttatacaactaggaggggtctgacatctggctgataattttaaggtactatcacttgtaaaatgtatctccaaaacagcgatgtaaaaatctgaaaaattatgtgtcttagaaatggtaaaatagacatgctgacatatttggccaatcgaaatgttaatattactaatagtcaaaatcatctgaaccaaataactcaaaattgatcattattaattattcccatttgggtaaaagatgaataaatgtgtgctgaagatacctgaagatgcattctctttatatattagggggtctatgatctggctgcatatatctttatgatataataaataaatcctattgtaaacaagttgtagtatagtcataaaatgcattactctgctgcaataaaaaggaactactaatacaaatgaatttcacaacattatttcatgaaagatgccaggtatacacaaaaaagaatcattaataaatggaatcagaattctacttacaatattcaaaaaaagtaaaactaatataactaatatatagtggcagaaattataacaatggtgcctctcatgggagatgatattaactgaatggaatactgcgaaaaaattgctggagtgatggatgtgttctacaccttgactgcaatcagttacaatgactatatacatgtatcataagatctacacattttactacatataaagcattttttttaaaaaaggttatataggccgggtgcagtggctcatgcctgtaatcccagcactttgggaggccaaggtgggcggatcacaaggtcaggagttcgagaccagcctggccaatatgttgaaactccatctctactaaaaatacaaaaattagctaagcgtggtggcgggtgcctgtagtcccagctactcaggaggctgaggcaagagaatcgcttgaacccggaaggcaggggttgcagtgagccacgatcatgccactgcactctagccggggtgacagagcaagactccgtctcaatcaatcaatcaatcaatcaataaaaaggtcatatacccttgatgcctgaaaaatgcaatgcaaggaggtgggatgagagacgaaaggactaaaaattaagaatagttgggtaactgttttggacttagacagctcatctagagtgataagtaacatgtattctagaatatggtgtttaacactgggagacaaaaaaaataaagactaaagagaatggaattacaaaaaacagaataatgctacctatctaatcaccaattcaagttatactaatactcaaagtataacttatgaaataatgtttagggtagaagagtagttactcaagatatctaaaggagttaactccaagaaaagaagccattaatttatcagcaatagaatcaaggtacataaatctgacaattcagtattagtagatgcgaggcctgctacccttattcttgctggtatcagcaagatattaatgaatcacaatttacaacatgagatcttaagtggaaagcaagaaaattaagaactcatacagcagactgcaagacttaatttaatcatcgtttagtattgtacctgggtaaaaagaaagaagtgctgattaaagaatgtacagtacctattagaatagtcaaaaaagcaatttttctgcatagtatttatagaattaagtacactaggtatctttgaaaataaggttactatgttcaaatgcacaaggaattttgagtaatatgatacacaatattttaatatcactttctaatgccagttattttttcaatgattaagcaattttcttaacctaatccgtgagccttttttttctgtaaaaacctaggtcacacagagtaagttaagaaaaacttctagaaaagcaatgccaaaatattttgatgaggtaaatttataataaaacatttaattcatataaaacctctaatttacattttatataaaagatgatttaatctcaaacaaaaacataaggttctctcttactaattaaaaataaaatctaatatatccagtacatttctttaacatattattttatattatcctaagtgaattaaaaatcacatagaaattataagagcctcactgctaaaatactttgaagattaaattttctttcaacatggtaattttataaagaagtcaagaaaatagctacgtaatagctagatggctaaaagcaagccttaagaatgcaacacttctaatttgtctagcattaggttcaaaatgacgagttagaaaaactgtggggttaagttcttttttttttttgagatggagtctcgctctgtcttgctcagtcccccaggctggaatgcaatggcgcaattcagctcactgcaacctccacctcccaggttcaaccgattctcctgcctcagcctcccgagcagctgggattacaggcgcctgccactgcacccagctaatttttgtatttttagcagagacggggtttggccatgttggccaggctggtctcaaactcctgacctcgtgatccaccccccacccctcggcctcccaaagtgctaggattacaggcatgagccaccacgcccagctggggttaaattcttaacaaaatacaaataaactgcttctcaaaagtccaaagtatcaggaaatataaactactatgttttttaaaaaaaacaatacttacgactacttccaagttcttcaaatagggacttcactttttcccactctgtagaatttttgttattgggaacattcaatggaacaaaggcactacaaaagagaaaataattgttttaatagctttaaagataaaaagttaaattaaatggtttgaaactcaaattatttttctccaaaacaataaataaataaaatctgtactatgcacagaggggagtgaaaagtttcttatctatgcatttacttccttgtaaatttaatagttgtattactgcattcagaaaaattagtttcctttgtaatcccgtatgttttttgcacttaaaatactttattatactttaataaagctggtaaaaaacaaaaaattaatatataatattttgagaatggaccacaggtttaaaacgatcaaaacaatccacaaaaaaggttaaggacatctgtattaaatcagtaaagcagaatgtaaacatatgcaattatttaagaaacaaaagaaatacattagaataaacagtaaatgtctcactgtggaatcgggagtgattattactttcttattagtatttttctattaatatatctttcaagattctatccaacagacacaatgaaagtagtttctatttgtttttcaacccacaggtgaaaaggaactgtagaaataatagagacagctagcatcctaggacctgctctatgatcttagactgggaaacgatagaataaataaatgtgcactttattatctagcccatatcaataacaagaagataatcaagagattaaggtaaagagctgggtatcccttaggttgtatatgtgtaggaacaaacaggagtaggaagtaactctaataccacgtccttcccaacctaattttaagtgtaagcaaagtgataagatttatcctctgttgtaaagaggaaatgaattagttcaataatatattaaggtacctgctctaataatgttttcatgtaaaacaaagtaattactctaaaattttctttttaattaaaaaaatccctatttcctgttgctactgataactcttatttaaaaaatgactgggcacagcatgtcagggggttacttaaatttctaactatctgcattgacttcagtttactatattcttcttaatcctagagacttatttctcaccacttttagaaaaaaaaaagtgcttacaggcatagagcaataaatgtagaaagtttattatttgttgccccaggtatgaaatcaaacaaatgaaagcagaggtgtggaatcaagaaataaaattataacatttttgtatattacacatccataacagaaatataaactaagcaagaaaaaactacccatatgatattcctttatttggacagtttgttctggatatcccaaaaagtatgctctgaacttgttagctgggaataaccaatctgtgagagtgggaaaacaaaaatttctatgttgtacaaaataccacccatcatactattaaaaaagaaatacgtattaggatatctaaaaatagcattcatctcatagggtttaatacgcaatattctaaaactcagtatgtcagttttaggtaatcaaagatattgtacagaaagagactaaaattaattaacccttgctcttgatgacacatgttcaactcctgagcagaattatctagcagttcaaatagagtaataccagagggaaacttatataatcaaaaaaactaaaaagactaagttaagtgacccacactactatcagaatgacttcaggaaaatactttgaaagcatccatcagagagttaaacatttgagcacatagtattttaggtataaacgaaagcacaaattcaaagcaggttcttaaattactttaccatcaggattttataatctaaaaatcagacctaaaatattttcacataaactaagaaaatatccataagtagaactcaaaatatggcaaaggcactaattaatcaacacagaccctggccttaattctgcaggacactgatgaaccaggctttcctctttcaatggagctgaggtaggggaagaagatccagagggcagagcagcacctgactggtataaaagcatgtcaaccttttaaccaccagaaggaataaaccactgttcattgaccaaatatcagccccatagacaaagatctataaagaaaaagaaatacctcccaacagatgaaaaggcaactgaagtccaataaagttataatatagatatatcagttctgaggaaagaaacagcagttaaaattatcaggtatactaaagcatttactaaagtatcaggtatactaaagtatactaaatgaaatggtgatgatattaaagtaaccgagagttagaatacaatgggatttgtgtggtagaaaggtgcacatacttttaaaatctcagcccttctaaaaaaaatgtatacagaacacctcagcttccaaaaacacaaagtactagattaagccatttatgcctattgttccattattggaatactaagcttgtgagagttatttatattttactactcaaggtcatcatcaaggtctgatttttcaccaaaaaaatttgcaacctctggcataaatgggttaaaatacaaactacagcctagtaagattatacttttccctcatgcccttgaaaataacaaaactaaaaaactgcttagtaaaaatatttcctacccaatctgattcactgaattaacttcacacacattatctcttcagaaacagacaaaggaaaagctaatgaatttcagtagatatgaaatggaaatgatgaattcagcataactgaaaataagatgttcacttcttacactccatcaccaagtcaattcatatttatcttccaaatagcttatgtttcttcctctctgttctctttgtaaccactgtagttccaatgctcacctgaacttatataatggctacttaactgatcttcctacctactatttacataccacttctccaacccaacacccaaaatcctcttgcaatacatccttcacagtgctgtaactctttttttttttttaagacggaatctcactctgttgccaggctggagtgcagtggcacaatctcagctcactgcaacctctgcctcccgggttcaagccgttctcctgcctcagcctccagagtagctaggattacaggcgcgcaccactatgcccagctaatttttgtatttttagtagaagtcaccatgttggccagcatggtctcgatctcttgacctcgtgatccacctccctcggcctcccaaagtgctgggattacaggcgggagccaccatgcccagcccacagtgctgtaactcttaaagcaaagtcatacatatttattttcatgcattcatttacacaaatatatacacatcttcactgtcttacaattaccgggtaggacaaaattaaaaatttcttttttttttttttttgagacggagtctcgctctgtcgcccaggtcggactgcggactgcagtggcgcaatctcggctcactgcaagctccgcttcccgggttcacgccattctcctgcctcagcctcccgagtagctgggactacaggcgcccgccaccgtgcccggctaattttttgtatttttagtagagacggggtttcaccttgttagccaggatggtctcgatctcctgacctcatgatccacccgcctcggcctcccaaagtgctgggattacaggcgtgagccaccgcgcccggccaaaaatttcttaaacatggcatgtaagacccagagtctacttacctggctaatgtcatatcctgtcacttgcccacaggaacacctgaaacatcatattacccttccttttttgaggggaggggaaatctaaattcacatcacactttttatgtcattcttcaaacactccatgctaacctcagcctcccagttaatatattttatagactgaattgtgttccctaaaaattcatatgttgctggctctctgctcccccattctacagaaagcctcatcttctcagcatcaccagacacattactgagacatcatggtgaaagtgaaggccagactaaatggatttggccatagtggtgcctggtcaccagagctccttttaactctggcaaagtgaatattgttgccatcactgacccttcagtgaccttcactacacggcctaaatgttccagcacgattccacccatggcaagttctagggcactgtcaaggctgagaactggaaacctgtcatcattggaaatcccatcaccctcttacagttgcaagatttcaccaaaattaaatggggtgatttgggcgctgattatgttgtggaatctaccagcatcttcactaccatgaagaaggctgaggttcacttaaagcagggaaccaaaaggatcctcgtctctgcccattctgctgatacccccatgtgatgggcatgaaccatgagaagtacaaaaatggcattaagatggtcagcaatgcctcctgcactatcaactgcttagccaccctggacaactgtggcatcatggagggactcatgaccacagttcatgccatcactggcactcagaagaccatggatggcccctctgggatactgtggtgtgacagctgtggggctctctagaacatcatccctgcctctgtgttgccgaagctgtgtgcaaggtcatccctgatctataggaagcttactggcataactttccatgttcccactgccaatgtgttggttgtggacctgatgtgccatctggagaaacttgccaaatatgatgacataaagaagatggtaaaacaggcattggagggtcccttcaaaggcattctggactacactgagcaacaggttgtctcctccaactttactagtgatactcattccttcacctttgatgctggggctggcactgccttcaacaaccactttttcaaactcattttctgatacgacaatgaatttggctacagcaacagggtggtggaactcatgttccacccggcttccaaggggtaagagcccctggatcaccagccccagcaagagcacaacagggagagagaggccctcagctgctggggagtccctgacgcactcagtcccttaccacactgagaatctcccctggacacagtttctgtgtcagaccccctgaagaaggagggacctagggagtaccacctttgtcatgtactatcaataaagtcccctgtactcaactctccaaaaaaaaaaaaaaacaaaatccatatgttgaagccctaacccccaatgtaatggtatttggatatacgtcatttagcaagggaattagtgttaaatgaagtcacaagggtggggccctaatcatcccatggcattggtgaggaagagacaccagagagtgctccttctctctcctccaccctctcactctccccctccccttctctctctgcaagcacaaaggaaaggccatgtgaagacagagcaagaaggtggccttctataagccaggaagagaactctcaccagaaaccaaatttgccagcaccttcaacgtagacttctaacctccagaaccatgagaaaataaatgactgttatttaagccacccagtctatgataccttgttatggcagccaaagcagatgaaaacattatacatgttactcatcttttttatttgtcaagtcagctgaccaattcccattccttcgaatctcaactcaaatattacttcctcttagatctcctgattctgcaatgcagagtaagaacctgctcctctaccatcaacatctggtatgtatctcctatcagagcacttaaacactgtaattaaaggtatgtatctgcatgcctccacaatgtaaacctagaggacagagaccatggtcctctacctttagccctaagatctagcacagtatccaacacataagtgtttcaaaaacgtatgagctacatgaattagttaaatctagatcacggctttgccataaaattatctagttttattagcaaaagcatatcacttaaaagaaactctgaatatgccaccttcaaaaatatttcaagaccttttgtcaatcagttaacctaaatgcacgcctcattcaaatatttacgtatgataatgagaagaacactgtcctagatggctgaaatgctaatagtctttaattcactattttcttattctcactgttgcaaagatttgtagttttattgatgattctcactcatgttctaaaataggagttggcaaactattggctgcctgtgtttataaataaagttttcctagaacacagtcatgttctttgtttatgtattgtctatgattacttctgagctacaagagagacacaaagaccatacagacaataaatctaaaatacttactatctatgctttaagaaaagtttgctgattcccgctccagataattcaggtttgcatacaagggacctcgatgttaacaagggaaattaacataagtagatttggctttctttaaaaagccaaaaaaatactttagaaatatactccagagctaaaatacatagaaaaaccactaaaaaaagtgcttacaaaagtactctttttcatgacacatcaaggcaggtaaaaagaactgaaaatatgacttgactataaaacacatgcatcctaagaactcctggaactacaaaaagttcaagaattttattcccattactcaacaattttattcccattacaagttacatgtaataagtaatttttttatttatggaaagttatttattgaaaattgtgagactaaattataaacagaaactttaaaaaatttattaactcctaatatatttcctaacataaaaaatgagactaatgacctatttttaacaaagataaatgtcttccattaacaaggataaattttagaagtacaaacaaataagcaaaatcttactgatattagtataaaaacaagaagaattaagaaagggaattcattgacaaagatttaaaagactgatagggtcaaatctgaaaagatgcacagacaagaattttcatcaaagtgttatttataatggggaaacattataaatgtctaagcagtcatcactagaagatcagttaaatatatttttgtatccttagaaggaaacgcaatatagtcaaaattgatggagctacacttactatcctgcagagatgcccacaatatgttaacaggcagattaccaagaattatataaaacataatcacatttgtgtaaaaagcatgtagaatgcatgcaagaagggaggtgaactctgcttgcattcaagcacataaaaatgtctagatgaaacaacatagacaaaactgttaaattgtggctattgttccttggagatttagagagtggattgttcttttttcttacatttttttctttcctagatttttctgaatgatccttttattttttttttcaaataattctatttccatttcatggtttaaaaaaaaaaaatcaagacttacccaactaaaagaagcagtgcacaaatcacaacaaatcccaaagtatacttgagtgccgttttaatttgctagatgccaaggagaaaaaagtataacatttagcaagccctttaaaatataaaatattcttgcaacactttaacagtaccttcacatcagatacatgcttacactcaatattgaaactaaggttgaaaaacaaccttaaaatttaaagaaaacaggtatactacatcttaagtatctttgcaaaacatgagattttttaaatcttttcaatagttaggcccttgtaaaaaccaatccacctaaagcatagttaattctccagtaggcatctttagtaaaattatcagaatatgtaataaaatattcccccagacagcaatcagaatctacaatgccccaacccaattcatcaaaatggtttataacaataataaacacaatatatacgtttgtgtttgagtatatacatgagtatatattaaatatatttgtatatatacatactcatatatacatatataagtatatatacacatatacatactcatatatacatatataagtatatatacacatatacatactcatatatacatatataagtatatatacacatatacatactcatatatacatatataagtatatatacacatatacatactcatatatacatatataagtatatatacacatatacatactcatatatacatatataagtatatatacacatatacatactcatatatacatatataagtatatatacacatatacataaatatatgtgcatatatacttacatacattaatatatatcttatacatatataacatatatcatgccaggcactgataagaacgtcacatatgttaactcatttaattctcataataactctaagataggttgttctcatctttagacataaggaagcttaagtccagagaagttaataatctgtcctaaggcacataggtcataagtgattaaataagtacttaagaccaggaacttgggaatttaaaaaccatgttttgcttggtgcttataatatactccaaaggctaagaaaagcaaataaagacaaagctggacattctgaatacgaataaaaaagttaataataatctcattttaaatcggtcagaaataacatttgtcctctcagactaacgaagtatctaaaaatcatcttttaaaatctgaattaatgtttcacatagttcttattcacaaagggggtaagatattctttaggaaaaaaactaaagaaaaggtaaagaagatcctaagatcaaccaaagggtagaagaatgtgcactttggaagaagtgaaagagaacgcatacatctcgtggagatcttatcaaatttgtaactagctaccttactttacataccttggtttttccaaatatagagtaaaatagtatctgcaaataacaattttgactctcttcataaatatttaaatacctaactttttttctaggagtcatttaaaatactgttaatttacttgctcctaatcttaatgcaaatgctcttgaagttttaagcatgattaagcatgatgctagcttttgacttaatacatttatttctgtatttaaatacaaatataaacaaggtataaaacaaaatcctataagtcaaaaagataagacatttagtcttattgtataactgttcccctaaattacagtgttcgattttgacatataccttttaacatatatttttttctttgacctattaattactatatattaatagatttcctgattttcagtcatccatgcaattgagagacaggcccaactcggttatataatatcaatatatttctaagatgctcctgaattatatttactattattttagttgtttataccaatacttaagtgataatggtcggcagttctgaacatggatgtgtgctgtatttgtcaggtttttaaaaagtcggtcctttttttttttttctgagatggagtctcgctcttgttgcccaggctggagcgcagtggagtgatctcggctcactgcaacctccgcctcgcgggttcaagcaattctcctgcctcagcctccggagtagctgggattacaggcccttgccgccatgcccagctaatttttgtacttttagtagagacaaggtttcgccatgttggccaggctggtctcttaactcctgacctcaggtgatccgcccgcctcggcctcccaaagtgctgggattacaggcgtgagccacagcgcctggccaaaaaaaaagtcagccttatcctggattagtaagaacaacctacaagtgctccttctttatgcttttgaacaggggccagcaaactacattcagtgtgccacatctgattcatcttctgttttactggatcataaaatgttcgctgtctctggatacttttaacactataatggcagacttgagtggctaagacagagaccatatagcccacaaatcctaaattatttactacctggccttctacagaaaaaattttgtatgcctgatctagaattgctttgtctaaaacaatagttacaagccacatgtggctagaaagcacttgaaatgtggctagcttgattgttgtgtaaaaaacaacccaaatttcaaagacttagtgtgaagaaaagaaacttaatatttcattaatagtttgactatatttgaaataatatttggaatatattatgctaaatacaatgtataattaaattaatttcaactgtttctttttattttaatttagctaacattgtatttctattagacaacactgctctagaaaaaattcagtcattcattctctgaaaaagcaggtaatattatttttctttcctaaactaaggcctctaaaataaagatacttacagtacatttactagtatcatcatcatccttttcttcataatagaagtagacaaaagggatccagaagaacacacagaacaatataacagaatataaagctgtggaaataaataataaaccgagctttactaaatacatatgtacttaatcatggttatctatctatatgtatatatattcacttaacaaattcactcccctatctgattccctcttctcataactctttctatatagtacatgatgcccaaatagccttttctgtcccatgtcccaagaaatcaacagtattatcagaataacaacccataattcaagttaactttacagcaatttctaacaatagtaataactgggtcaagaacaattgtggcagctgacatatgagctcttactctgtactaactacaatgctgagaacgtcctataaaccatcccatttaaatgaactttaacttttgtgttcattccaacttaaatttgagtacacttgacacaacatttgctattccagcaagttaaagaaacagctataaataatattctttgtgatataaataattttctcatctcaagtttaaaaaaatatgcagtattatataaccaatcttacacaaatcaaaatagagaaaaggtaaaaagaatagtagaacagtaaaattagactctctatttacccatcaatggaccacaggggttgcttccaaattttgcaatttgtgaataatgcagctatgaacatgcaaggacaaatagctcttcatgaccctgttttcaattcttagattatattcaaaattagattcaacattaactgataggaattactatttatctgctttttttaaaaaaaatgttagatttgacatacttttaaccagcagtcagtcaaaatatttatctaaattcaatatagagcttaagttaatccaaagatacagtacctttaacaataaaaacagaataaggaacatttgagacttaagcctaagaaacctgttttaaaatctgtatattcacattcatttgtttgtacatattcatgaaacataatagtaccagtataattatataaagcaattacagaatgataatcattgtattgctttataaaagaaagcagctgttaccatctcagacccattaggatggctactaacaaaaaacaataataatgacaagtgttgtcaaggatgtggaggaactggaaccctgtgtgctgctggtgggaatataaaatggtatagcagctgtggaaaacagtacgatgtttcctaaaaaaatgaaaaatggcattacatatgatccagcaattctacttccaggtgtatgcacacaagagttgaaaacagactctcgaagagttatttgtacacccatgttcctaactgcattgttcacagtaactaaaacatgaaagccacccaagtgtccactgatggatggatagagaggcaaaatgtggtatacaggagatcgagaccatcctggctaacacggtgaaaccccgtctctactaaaaatacaaaaaaattagctgggcgtggtcgtgggcacctgtattcccagctactcgggaggctgaggcaggagaatggcgtgaacctgggaggcagagcttgcagtgagccgagatcgcgccactgcactccagcctgggcgagagagagactccgtctcaaaaaaaaaaaaaaagttaggaaatgatatatggctatatgctacaacacagatgaacttagcataaccaggacattacgctaagtgaaataagccagtcacaaaaagacaaatacgatatgactctacttatatgaggtactgagagtagtcaaaagcaaggacacagaaagtaggacggtggttgtcagaaggagagaggaagggcagaatagagttactgttaataaggtatagttcaattttataagatggaaagtgttatggagatgaatggcaccaatggctgcatattatgaatatatttaataccactgaatagtacacttgaaatggttaagatggtaaaaaaaaaatacggaaaaaatgcatgttagtaatgtataataaaatctaaattacttattgtgttggaagaaatgactttaaagagttgtcttaacatttgctagcactatctcatttatctggaggacacttatgaaacagccctactacatgcaatacagataaaagaaactcaaatcaaataggaccctaaataatcaacagaggcgcagagttaatttatacttagcaatcacaaaatgtctgtcaacatactgaatttggcactatagacatttaatgaaatttatgcaggcttttaatattatgagcaactaatagtgacaataaatcttttagggcaatgaatattggtgtttctactacaaaccaaagaatagtgagttttaacatttctattgcaaatctaacagccaacagacataaacatttatctgcaaggaacttaaacaaatttacaagaaataaacaaccccatcaaaaagtgggcaaaggatatgaacacttctcaaaagaagacatttatgcagccaacaaacatatgaaaaaaagctcatcatcactggtcaataagaaatgcaaatcaaaaccacaatgagataccatctcacgccaattagaatggttattaagtcaggaaacaacaaatgctggagaggatgtggagaaagaggaatgcttttacactgttgatgggagtgtaaattagttcaaccattgtggaagacagtgtggcgattcctcaaggatttagaaccagaaataccatttgacccagcaatcccattactgagtatatacccaaaggatcataaatcattctactataaagacacatgcacacatatgtttactgcagcactctttacaatagcaaagacttggaactaacccaaatgcccatcaatgatagactggataaagaaaatgtggcacatatacaccatggaatactatgcagccataaaaaagaataagttcatgtcctttgcagggacgtggatgaagctggaagccatcattctcagcaaactaacacaggaaacagaaaaccaaacatctcatgttctcactcataagtgggagttgaacagtgagaacacatggacacagggaggggaacatcatacactggggcctgtcagggggttgggtcaaggccgggggagagcattaggacaaatacctaatgcatgcaggtcttaaaacctagatgatgagttgacaggtgcggcaaaccaccatggcacacgtatacctatgtaacaaacctgtacattctgcacatgtatcccagaacttaaaaaaaaaaaaaaaaaaattgttaacaggtattccaaagctttaaaaacttaaatacaaaatgccatttgtaaatcaccctaaataccatgccaatattaggattaacataatcaaataaaataatttgtgtaaactagaaaaaaaagtgaattagcacaacagacttgagtaggctgacagcctcacaacaaaaactggttgataaactgataggtggagtaagatttagcttcagcctgagtatgccactgtgtctgttacttggtgggcttggcctttagatagccaaacagcctaatgactattttataagcatttctggtgctcctaatcttgtgtgataaacaatcttttgaacacctaagttaccattatatttaattagcatagcaaagtataagacaaattcctgtacctcaataaaaagacaacttttttaaaaaatgggtgaagacttcaatacttcacattagaaaatatacacaatttctgggcatggtggctcacacctgtaatctccgcactttgggaagccgaggcaggcagatcacctgagttcaggagttccaggccagcctggccaacataatgagatcccgtctctactaaaaatacaaaaaaactagccaggcatggtggcaagcacccgtaatcccagctactcaggaggctgaggcaggagaattgcttaaacccaggaggcggaggttgcagtaagcccaattcgcgccactgcactgcagcctgggcaacagaacaggactcaatctcaaaaaaaaaaaaaagaaaaagaaaatatatacattggtcaacaagtacattttaaaagatgctcaacaccataagtcatcaggaaaatgcaaagtaaatctaaatggctaaaattaaactggcaataccaagtgttggcaagaatgcagaaacaactaacattatcatactttacttgtaggagtgaggtacaacactgtaaaaaactgtttagtagtttcttatcaagttaaacatatacctatcatgtgacccaacaattttcttcctctagcaataaagtataacaacttatgtaaaaggacctctgcccagagaagcttggttgatttgcagagtccagggcacttattggagacttgcaaaacaagtgcatttgcctaagtgaccagctttgattaccaaaactacagactccaaaaaggaaagcaagaattctccaaaaatcatgtttttgcacaatctaaactagccagtagtgcatggttccatatccagctgtacaaaaccacctttcaattagtaacatagagaacacaccaagggctaagttcctaggagttagtcaaaggtaagccacacaagcaggacctccctgaaaacatacaagcattcagcaatattaggtctgctgcattaactcttttacaataatgatgttgagagaaatattatatgcagtgatcaaaaactggaaatgatccaaatgatcaacaagtggatggataagcaaactgagtgatatattcacataaaagacgatcacacagcaataaaaaagaaacatgagaaacagatgaatctcatagaccttgtgttgactaaaacaagcccagacacaagactacctttctatgattgaacataaggaagtttgagaatggacaacactaatctgagaagtcaaaaaaaaatggggcagctattgacttaaaagatgtatggcaaccaaaattcccatgttgctggtaaaagtgcccacaaaagtttttagcaatcaacatctggggaaatgaagtggagaacagacacaattctcaacagactataatatccctctagtagtcaatgattcaaaataggtttaaaactgctctaaatatttgtttccctgatacaaccttctaagctatcttctaataatctgttctttctcagtgtcctttataaagatttcttcttttagtccataaatgttgaactgtaaagagagaattaaatgaacatttattttataacatttatcatatgatcagttctaatgtcaagttgagtttatatatctgtaaatgggggaaaaaatattgctgcctccactatcatgaaacaggaaaaactgcttttttaaaagttctacatcaaactcacagccattttcaaaggcaaattattcttgactctaaagttatgacactctcatatcctaacatctctataaaatatgcttttacttataaatgtttttgttaaaagattgctactagcaaataaaagataaacagatttttggtttagcagacccactaacatcaaagaacacattaagaaaaaatttttaagcctcatgtccatagaaattgagcgaaattaaactcatgaaacaagttggttttttaaaacaacttatcgagaactagcaaaaaacaagtgaatagagagccacttaaaggtcatggacaaaaactgtaccaaagaatacatagtaattcctaagatgtttaaacatatacgaagcaacaatctaccttttaaaagccacgtatcattaaattataactcacatgaaaattaacttggatacattagacttttaaattgttaaaaattttttaaacatatccttcccaactaccaatgaaaatagctaacatttacatcaaaacacaatgacaaagaaaagcagtcaatattgtgacagaataattagtcattacaaagctttttgttttagaggtcaaagtataaagatattctgggaattctaaaagccttctaaaattatctatttacccagctgaaaaactcctgagtcgagactgatagttgcatatctatacccatttcctttcagctggcactccctttcttgaccttcccccttcctactgcagcctacttgaaactgatacatgatggcttaaactctagcaccattttaaaatctgtggtgaccttaagatggaaatcatgtcctaaggatggagagtagagaaggaatgaacttagtactctcatgatgttatggcactgccataccagccctggatagcctatctccatacttactttaagtgagactgaaacactatatgactatttaaaccaggaacttctgaactgctaatagcagccacacacaattcctgaaacagaatttggtactagaaatgggcaaattcaaatatttattcctgagctattccaagcccttggtcatcttgtctgtgaagggtaggcataatagatctcaactaacttttgccactgaacatgataatatcatgaggtgccacagaaaatcccatgggttcaagatatacttctccttgcattaactgtgtagcagcaaccctacttcccctaatagggtcaatcactccatctgatatggtaactattcactggaattagatcaaagtggcctggtagaaatcataccttctaatggaagggaaccattatttcatcctacagtggaagtactcccagatgtctagtaagaattataaaccagtaagcaaggtaagaagcaaaagttttgtgagtaacaaaccactcaaaattactaataaatgaactactcaatactgaattaggaataatagtgtaaacttctatgctcacttctacttcttagttactggtaacaagtatatattttataggaggaagagaaacataagtgctcactggtccctggcattctctaaaatgtagacagacttttcaactcattttacaaggctagcagtcttaatactcacacctgacaagaataataagacaaagaaaaattacagaccagtctcacctgcaaattgattctttaaaagaatcccaattaagagagcagcaaatcaaatccaaaaatacatttaaaaaacaaaccaaaaaaaaaccaccaagatggccaatttaggtttatgctaggaatgcaaaattagtttaagtataatctagccatgtaatacctgatataccacttgaaagaataaaccaaaacaaacaaaaaagctttatatgatatcttatagatacttctgtatcttaatagatacagaaaaggtcccttttaaatgtattcatttaacaaatacctactgagtatgtttcaaccatcattctagggagcagtatacagctaaatcaaaacacagaagcctctcatgagacttaattctagtgaggaaaagacacaatatttaaaatcgtagtatgtactactcaaattatctttaaaaaatttcttaaatcaataagaacacaacccaactgaaagttacttgaagcagaaaactgaaaaagccaacaaattttttaaaaacatacaatttcatttacaaataagtgaaacatagactagtgaactctcatttcacactcaccagactagcaaaaactaaacatgtatgacaatatcaaagtttagaatatagagcaactagaaggcttatgttcttctaataagaattacattagtacaaacacttagcaaaatagcttgtcattatctaccatactgaagatgcatataacttatgatctatccgtttgactcctatgtatgtactctgcacatatacaacagaaaacatgtgcaagaatgttcattgcacaattttaacatcaaaaaactaaatgtccacactgattaatatgtggcatagtcatacacaatgaaattatactttcttcaataatctgtataaatgtctagaacatgaagatgaatgaaagcaagcaagccatttcatataaagttcagaaatgtaaaactaagtaagaatataacatgataaaactgaaaggcaaagcaagggattaacacaaactaaatttagagtatttctaagggagaaatagaagaaatggcatcaggaaaaacacaggagacttcaaaatgaccacctcaaacttcacacttaatatgatcaataaatagtctgctaagcataaaagcatatgtcaagtaaacatcaaagatgttgatatttgcaagactgctgtggtaggcagcttctaaagtggctcctgataaccctgcttctgtattcacgacctgtgtaatctcagcttgagtgtgggctggcactagtgacttactgctaaggaacagaatatgaacaaaaatattgggatgtcatttctgagattacgtgacaaaaagactggcttccatcttattgctgtatccttctctcactctgagacgccctggctgccatgttgtgagctgccctatagaaaagtccacgtaacaaagaactgatgttacaggccaagagagagataaaacccgaggcctgtctcaacccatgtgagagagcttacatgtcaactctctcccttgcggaatcttggaatgactacagtcccaccagacatcttccttgtagcccaacaagagaacctgaccgagcacacccaactaaggtgcatctggattcctcacccaaagaaactgtgaaataaggtttgctgttttaaactgctaaatgttgaggtaatttgttacatgacagtagataactagtacaactgctgacagtatagcaaagtgagtcagatgtgctgtgtaagttctaagaatatacaacttgagaataaaaatcatttacagggttgaacttagactttgtattctgaagaacagttgttttccccatggatatttttggttatttccccttctcaatggtatttattccaaggtttacactgcaatgccatttttttaacaaaaaaaaaattgttaaataaaatggtcagacaaaaggctaaataattcatgctataattcacaattgtatagcaacaaagaatcacattccaatgtataagccttagtccttcataactttttaacctcatttttttaatctatgaattagggataagattacaactctagaaaatcaaataataaaagtgcaaatcctctaagattttaagttatattaatagcaactatcctttactgactctccataatatacacagaactgtattataatcttcacttacattagctgattcgatacttttcccaacaactttgatacacaatttacatatcctgaaattcacaaattataactgtgtaattcaataatgtttggtaaatttataaagttctatagccatcactacaatccagttttagaacatttccattactccaaaaaaagttgttttgtgccagttcacaaataatccccaatcccctagcttgaggtaaccactgatctgctgtctttagagatttgccttttctggtcattttatatgcatagaattatataagatacagtcttctgcatctggcttccttcacttagcacaggggttgggattttttctctgttaacacataataaatattttcacgtttgcagtttatacatctctgttgcaaatactcatctgtgctgctgtagcaaagcagtcatagacaacacataaacaaatagacacagccaggtttacacaagccatgccataatttgccaacttgtaactcagattgctgaatatattaatatagtccattgtatgcgcatactgcattttatttaaacattcaccagttgttggacatttgaatactttccagtttgggactactataaaaactgctactatgaacatctttgcctagatattgcattcattcctgttgggtaaattcctaggagtggaactgctggaccatataggaaatttaactttttaaagaagttacaaatggctgggtgtggtggctcatgcctgtaatcacagccctttgtgtggccgagacaagaggataacttgaagccaggagttcaagaccagcctggacaacacagtagagaccctgtctctaccaaaaaacaaaaaaaaaaaaaggaagttacaaactgtttttccaaaacaactacaccatattacattcccaatagcagcattcaaagattctagtttctctatatacatggcagcacctgggtattgtctgtgtttcttattacagcctgttacagactgaatgttggtgtccccgtaaaatccatgtgttgaaaccctaactcccaatgtgatagtatttggaggtggggtctttggggggtaattaggattaaatgaagccacaaggtaggatcccatcatgggactggtgtccttagaagaagaggaagagagaccagagttcaatctctgtctctgccatgcaaggacgcagcaagaaggtggccatctacaagcaaggaaaagggtctccgccaggactgaagttgttgagaccttcaacttggacttcctagcttccagaattgtgagaaataaatgtttattgattaggtcacccagtatgtggtattttgttagagaagcccaaactgactataagacagattttggtactgagaagtgggctgctgtcctaacacatatctaaaaatatggaggtcgctttggaacatgccactggacaattttttttttaagtaatgttataaaatagcaaagaacttgggaactgtgttctagtgttttgtggaaggcaaagtttgccagtgatgaaactgaatatttagctaaggagattcctaagcaaagtgttgaagaagtggcttgattcctcctgactgcttagaataaaaagaaaaaagaaaaaaaaaaaaggaattgttaagcaaaatgagccagaacttgaagatctggaaaattctcagcctatccacattgcaaaaaaaaatggaaaagcttgttttgaagagaacactaagggtgtatttgataattagattagtgaagatatgaaccaagaagaacctaatcagccatcccagcagaaacactgccagtttgaactgaaggggaggaagatgggatgaaatgaaggaaggttgataggcttcttggatcctacaggaccagatcacaaacttgtttggctatgaaaatgtactactctacaagacataaaaagaatgtccccaaaggtgattaagagatcaaggctgcatcctcatttcaaagggggtgggaggggattgtctaggtttcaacatgtcagagaatagctgccttgaagccttgtgggtacaactcctacccatcagagccttgaggtttaacactgccccgcagaatggtagaggcaggaccatcaccacagtgggtcctgaaggcatagggtcaaaccaaagaagactgtttttgagctatcttataattctaatagtatctgcattgctaggttttttactttattgaaacgcttttttccttctgaattttcccttagaatgtctatcctatacctgtactgccattatattttaaaagcaaataacttatctggttttagaggttcacagtcagagaagaattatgactcaggataaattttacttgtggtcacacacatatctgatttagaaaatatttagacgagactttgtactttagagttgatgctgcaacaaacttaacactcttggggctgttaggatggaataaacgtattttgcataggaaatggacatggattctgggctgccaggagtggaatgttatgcagtaagtttgtccccccagaattcatatgttgaagccctaacgccaatgtgatagtacttggagatgaggcctttgggaggtaattaggttcagatgagggcatgatgttagggcccctgtgatggcattagtgtccttataagaagagaaagagaccagagtacatgcgctagatcgttacctcactctctctctctctctctctctatgccatgtgaggacactgcgagaaggcagctagctatctataagcatggaagaaggccttcattacaaaccaaatctgctggctccagaactatgagaaatacatgttcgttaagactcccactctatattttgttatagcagccttaactaataagacagcattctagttgatgtgctggtatatctcattgaaaacgtaatttacatttccctaatcattaatgatgttgaagatctttctatgggtttttaagccattcataaatcttccctgattaaatgcctgttcaaatttttgcttattttttaattgaatggttttattaatgattggtaagatacattttgaatataagccctttatgatttatacatgatttacaaatatgtttggcttgtctgtggtttataattatttttgttttaattgtgtcttttgaaagacaaagatttaatattgatgaagtataacttattaaggtttctcctatgaatcatgcttttggtgccatatctaagaactctttttctaacttaaggtcaccaagattgtattccttaatttcttttcttttttttttttttaatttgagatggagtcttgctgtgtgacccaggctggagtgcagtggtgagatcttggcttactgcaacctctgcctcctgggttcaagagattctcctgcctcagcctccccacatagctgagattacaggagcctgccaccacgcccagctaatttttgtatttttagtagagacagggtttcaccatgttggccaggctggtcttgaactcctgacctcaagtgatctgccagccagggcctccccaagtgctgggattacaggagtgagccattgtgcccccctcccttaatttcttctaaaagtattatacttttacagcttaggtctatgattgatttttgagtatggtgtaaggtaaggctcaaaaaaaatcattttttgcatataatagtccaactttcccagcaaaaatttttttaattgaatggaattaaactgaattggcacagctgttgaaaatcaattgaccatgaatataaaggtttatttttggactctgaattttattccattgctctatatgtctgaccatctgcaatactatatagtcttgtttactgagttttatattatgttttgagatctgaggatgtaattctctgatgtcatttttcttttccaaaatgttttttggctactgtaaatcctgttgacttccacgtaaattttaggattggcttgtcagtttttcaaaaatatttttaaaagtctgtgtgactttaatagaggctgcattcaacttataggtcagtttgagagaaaactgacataattgcatctttacagcattgtgttttcaaccccataatatggaattgtttatttaaatcttctttagtttctatcagcaatttttctgtagttttcagtgtagaaatcttatgcttttttgttaaatgtgaagtacttttttcaccctttttgatggtttctgattggaattgcttttctcagttcatctgaattgtctgtttctagttttcatatcaatcttatacttgtgattctgctaacattactcactggttgtatttgtccatatataggttccctgaaattttctacctatagaatcttatatcacctgtgaaagtaagacagtaataattcttcttttccagtttggatgtatttacttaagtaaatatttaaataactaaataataaaaattaatatttaagtaaatttattcatttaattatttatttatttatttagacttatcacactggctagaatcactagtacaatgttaaatagcagtgttgagagcagacatagttatcttgctcctaatctcagaagaaaagtattcagtctttcaccactaagtataatgtagctgtaggcttttcatagatgtcctttgtcagcttgggaagttctcctctgtaactattttgctgataatttttaatcaatgatcgatactggaattttttttgcatctattgagatgatcattcatttctgtcctatgtatgctaacatgtatgttaagtaaagtaatttctggatattaaagcaaccttacatttctgggatgaattcacttttgtcatactatgtaattctttttatatgacactggattcagtttcctaaaattttaagaattctgtgtctacattcatgagggatattagtccacagtttccctttcttgtgatgtcttaatatgattttggtatgaaggaaataatggcctcaagtgagttgggaagtgttccttcatcctctatttcctaaaaaggttgataaaggattggtataatttctatttataatacataaatagaaattggtataatttcttatttaaatatataattggtataattatttaaatacataatatgtgaaattcttcacatatttcttgtgtgaagaaatctaggtatggggttctctttgtgggaatattttaaataaataattcaacttctatgcttgctacagtgctatttcttcttaaatcagttatggtaattgattcaattggaaaattgtctaggaatttatccacttcatctaatttattggtataaagttactcaacattcctttgtaattcttttaatttctgcaaagttggtaatgccacttctttcattccttattttgataatttatatcctttttctctctctccctctttcccaatgccctaagtctggctaaagatttgctgatttcttttttttcaaagaacctactttggtttgaattttctttattgtttttctgttttctatttcattgatgtctgctctaacctttatttttcttctgcttgtttaaagttcagtttgctcttctttttctgttttcctaaggtagaagtttaggtagttgagaattcttttttaaaagagggatttaaagctgcaaattatcctctgagctctgcttgagctatatcccgtaaattttgatatgttacatttttattttcattctgttcaaaatattctccaatctaccttgtgatttcatcttgatccatgggttatttagaagtatgtggtttaaatgccaaatacttgtggattgccaagatttttttccattgctggtttctaatttaattacattatgattggaaaatgcactttgtatgatttttaatccttttaaatttactgataattattttataacctatcatatagtctatactgaagaatgttctccatgtgctttaagtcaattgtgttctgcatccattgggatacaattttctacatttttaagttcatcagtattgttgtttacatcttctcaaccttcactgattttctaactgttctatcagaaaacaattatttcctaaccagtaaagagttggttactcaaatttgcaactaatattggtgaattatctattttgcctatcaattctgcccattttgaatttgtgtattttaaagctctgttaataggtgcatacagaattataatttttctgtcattttaatgattaaccattttatcattatgaaatgtccgttgtcttaaagtctattttatttgatattaatatagtcatttcagctgtcagaattactatttgcatgacatcttttactaaccttttctttaaccatatactatttgtgtccctgaatctaaggtgtttctcttatagacaacacgttgacgaatcttcatttgttgatccactatgacaatctcatttgattgggggtatttagactacttacacataatataacaattattgatatggctgtaattacatttgccattttatactttattatgtcttttttgttgttccaggcttctcctttactaccttattttgtattaaaagttagtttctacattaccaattcctgacttattttatagatatttatagatacataaaataagtatatttttgagtcattttcttagtggttgctataggaattatactacataccttaatttatcacaatttaccttcaattaatattcacacaatacaggcaaaatatatattttttaaaaacttgctccaaaatagctctaatacttctttttctttgtgccattcccatcatatattttatgtctatatattataaaccctaaacccaacatttacagtgttataattattactttatacaatcttaaatcttttacaaagataagaaaaggagaaaaaatatagtgcctttatattaaacattaaccattataatttctgatttctttcttcctatgaatttggtttactgcctagtgtcatttccttttatccttaaagacttcctttagcattcttgtaagaaagggattcttgcaatgaattttctcaggttttatcttggaatgtcctattccaccttcatttttagtggattttagaggacacagaaatctttattttttttttcttttcattttagtgccctctggtgtccactatttcacattagaagttagtcactaatcataaagatgctgttatgtaattttttggctgcttttaaatttttgtctttggctttggcttttaataatttaacaatgatttgtccaggtctgtatctctgcttttcctacttgggcttcactgagcttcttagatgggtagattgctttttggccataatttcttcaaactttttttcctgccctcttctttctcttttcattctgagattcccatcacacatacataggtaaacttgatgctgacccacagatctctgtggctctactgatttctctttaatctttcctctctgatcttcagattagatcatctacctttgaaattcactgcttctttcttctgtcatgtcaaacctctggtaagaccctctagtaaatttttcacatcagttactatattcttcaatctcagaattttcattttgttatttttaaaatcatttctatctcctttttgaacatctctatttgtcacactttattttcattcttagcttactttgctgctttaaactgatttacaatagctgctttgaagtctttgtctgctaaatctaacatctagaaatactgtttccactatatgctgttttccttagcattgttcatgttttcctatttctttgcatattttataattttattgaaactggacatgttagacaatatgttgtagcaactctgtattacgctttttgctcctgaaggttgcctctttaattcctttgttcacttatttggcagggttaagtctataaaatctgttttccacaagtgtgcaactgctgatgtgtctattttttttaacgatttttttagtgttttttttttttaatttttatcccagctcaaaaaaatatatatttatttaaattactgtttttaagcctggcttcctagggattgctcctgtgtctatatagcttaataatcagacaataaccagaaataaactttgctcaaacaactcaagccaataagacttccagcccttccttgccaatgaacctgcatattggtaggagagtgtattaaaagttcaggccaattgcccctggcttttcctttctggtctcctacacacgtgtagagcctctagggcagccaggagtacatgactaggttgggccctctccagtctccaatacacatgtatgcagcttcagccagacatatgcttgtcccaattatgaccacaatcccatgctagtagaatcctgggtcctctccgctcacctgactccaagattgtcacttccataaacaatagcactagaagtgagcaccacccaactgagtgagtccccttctgatacagcagtacagctgtaggtcctccctggacccaccctgccctggcagatcttctgcaataaccaagctggaagttgggggtagggaaacataacagccctaggctaaaatacaagaaactaccactgtcccttagcagtttttaagtataaacacttctcagactgttgtatgtctttcattgattgctaaagaactgaagctgttgttttctgttcagttttgtccaacttcatatttgttttctggtgagagaatctgccaattttcaaacttggccatggctgaaatcccaccccactcactcaatcttaacaacacggaagtacacattattctctctcattaacaaagtaagaaattcaagtgagtttccctaaattacatagaaaataaaaaattcatgaatttcacaaatatttgagtacctactatgtgccaatatctgttctttgtgcttaaaacacatcaaggaccaaaagagataaagattcctgccctagcacagtataaattctagcaggaggatacaaacaataaacataactaaaactatataatgcatcagaatgtaattaaaggctgtaaagaaaaaaaatagactaggataaaatgagccagagattgaaggtaggcctcattcacaggtaacatgtaagcaaagatttaaaggctaaaggagttaaattagtcaagtaaataactggaagaaaagcattctaagcaaagggaacataaagcaaagggtctaaggtaggagtgaaactgaaatgttcaaggaacattaataacaacattaatataacagtgatggagagatgtactagttatctactaccatgtaagaggctactcaaaacttagtggtttaaaaaaacatttactgacagattctatgagtcaagaatatgagcacagtttagctgggtccccaagctcagaatttctcccaaggctgcaatcaagatgttagccaatgcagcagttatcccaaggcttgactggggaagaacctgcttccaggttcactcactgcgtttttggcaggattcagttcctcactagctgttggctggaggccgctatcagttccttgctatgtgggcctctccataaggcagtacacaaactggcagcttggttaatatgagcaagcaagagaaaaagccaaggagtatgagcaagacaaagtcactgtcttctacctaatctcagaagtgacatcccatcagcatcattttagccacattctctttggcagacgcaaatctctaggtccagcacacactcaaaaggagggaattacataagggcatgaatattaggaggtggacagcactgtgggccatcatgagagtttgcctagcacagcaaaatagtagatgagaacaaagaagtttgtggggtggggaagaatgtcagatcacataaggccctgcaggcttcagtaatgacttcgtcatttcctctgaattacatgggaagctacttcagggttttgagcagataaggaaaagacgtatcatatttttaaagaatcactctgactgctatattgtcagtaaaacaagggtggaaaagacagacttctgtgataaccccaaaagagacaatggtgtcttagacaggattatagctagaaaaaaaaaaggtagtgagaagtggtcagattctagataaattttgaaaatcaagcacaagggaattttctgccatatttgactcaaaatgtgaaaaagtaaagattcaaggatgactctaaggttttcagcctgagaaactctatccttcttgttgctatccacaagaaaaaaaacctactgtatgacagattaaaggtcagttgctttagaaatgttaaatttgagatgtctttgattttttggtagagttctgtaacggttggacataggattgtgaagttccagagaggtctgcacaaagattcgaaactgggaattgggcatataggtgatatttagaaggaagcaatggtataaaatcaccaaaggattaactgaaacagaacaggttcaaggattaacccgtgggacatacaaatattttaaaaggtcagaagaaagagaacgaaccaacaaaggaaactcaaaaggcacaaccaagaacataagaagaaaaaacaagaacatatgtctcaatctccaaaatctggagtgtgaaggaaggtttatgatattaatgtgacaaatcatcagttcatttagagacaaaaagtacaagtcacactagttataagtccaagagatcacttgctttcttagtatttccaactggaaacaaattcttacgctactaggtctctagagattatctagataatctcttgagcaaacttaacagaaaccacttagaaaacatcccctttaattaagaatactttcttttaaaaagggggaaaaggggcaggagacaggacagaactgtatcttatcaaacaagattttgtaaaaaggattttgaatcaaacaaatctaaaaattagtctcagtctttctatcttgtctggaaaagcactgaaatatattattagagatgttttcaaaacaatagtgtcaagaaaattgaaatttgatgagatactagtcagttctttcaatattaactttcctatatcattgcactaacagagaaaatttctcttgttctcttatctgatttgaataaacagcagtaaataacacctatttagcactaatcacatgtctcacactcctaaccttacgaagtaggtactactttatcaccatttcacaggtggagaaatcacaaagaagtcaacttcaaaggtctcatgtactcttctcaagttagattctaggagttgtaaaccctactatgatttgaatgtgtccctcaaagttcatgatcactacccaatatggtagttttgggaggtagggcctaatgggaggtatttgggtagcaagggtgactgctcatgtgtggattaatgtcactatcatctgagtgggttcattataaaaggatgtgtgtgcctccattgcccttctgccatgggatgacagcaggaaggcccttaccaaatgccagttccttcatcttgaacttcccagcctccagaactatgagccaataaatttctgttccttacaaattaccaagttttgagtattctactttaacagcacaaaacacactaagataaacctaagttcaaaatacataaaaaagtttccagatacaaattatcagcacctaatcaatagggaatgaagagaaacttccaaaaaactctcttaggtgctctaaaagtatggcatagaaactggaactgaaaagcttcccggtccatcttattctcccttagttccataacttaattcatctaaatatgtgtatactttgactcactcctatttttactacaaaattgttttaacagcaaaaaaaaattttattaaacacctaataaactgggatttttctatgaacatccatacaatggaaaacaatgcagtaaaaatcttttaaatgtacatatataatatcttcttaacagctgcatttgaaaagaccaaatattgtcaacaaccccatttttcatcaacactagcatggataaactacggtatgttaatatagtaataagaatcaacagagtactgttgcctgcatcaatatagatgtttcaaatataatgttacacactgaagaagccaaacacaaaacattatgaactatatgattcaatttacatctacacacaagatgatagcctgaaaactagtgtcaagagaagaaagtctatgtggatgatatggtttggctctgcgtccccacttaaatctcatcttgaattgtaataatccccatgtgtcatgggagggacccagtggaaagtaatggaatcatggggacgggtatttcccatgctgttctcatgacagtgattaagtctcacgagatctgatggttttacataaaggggagttcccctgcacatgctcttgcctgccaccatgttagatgtgactttgctcctcctcgccttccaccatgattatgaagcctccccagccatgtggaactgtgagcccattaaacctctttttctttataaattacccagtcttgggtatgtctttatcagcagtgggagaacaggctaataacatgaggaattgataggccagttacagaagaactgaacaaaaatagcctcaaataattcctgcttagggtttgggatagttttaattcatttacccccgcctttcattaatttcttttacatgaatttccttttacttaatgttttttctcacttcttacttttgcatgcatgcaggggttgtagaaatagggagaggccaaatataaagataaaaataaatttgaaataaaaacaaattagataaaaggctaaaacacagacaacataagggataaaaggactgcaaagcaggcttaaatatgaaattaaacagaactcagaagtcactgctaagcctgcatagcaggtctaaatacaaaattaaacaaaactcagaactcaaaactcacacgagggcagttttataaaagaaaagagtaggctgagtgtggtggcttatgcctgtaatcccaaccctttgagaggccaaggtgggagtactgcttgagcccaaggagttcaagtttacaatgagctatgatcacgccaccgcactcctgcccaaaatacagtgagatggaaggaaggaaggaaggaaggaaggaaggaaggaaggaagggagggagggagggagggagggagggagggagggagggagggagggaaggaaggaaaagatgaagaactaaataaaacattcaaaagaaataaaaggtacaaatccttaaagtttctggggcgggcataaccttcccagatgagggagtcacctgatcagagtccttaggtgtgcagggaataggatgaaaatgaacaactttaccctctcatacttcaacaagctccagaaaactgaatctgctttgtaagtagcttcagttaatgaggattattaataactaatcaacagctggggagtgctcacaaggagaagcagcaggcagcctgatttctgccagcttctcagaacaaaacaccccaaattccattaatataacagaagatccttaaaaatgtggtttccagaccctaggatttgcagagatcctctcagggtattcacaacatcaaaactgtttgcataatgatactaagatattatgtgcctttccactatgtttacagttaaactaatggtgcaaaaacaacagtggataaaactgctgcccctttacaggaatcaagatagtagactcaaattacactagaagtcattgtattcttcagggaggagggagatttgagccttttattcacaaaagtcccttttgaagcagtaaaaattctagtgtccacatttgcatatatatccttttaatattctgtgtgacaggaaatacacataaaccatgctgtacttgtgtctcacaacatctcaattttgtctgcgctctttgagttgtgagctacagtagccacttttttttcaaagaacatcatttttacttgaaagaacaactgacagataagcaatggttatccagacttgattattagacaggctttctcaaaaatgaacagtgagactatcactccaaaggaaataagtgacagtatttgtcaccaatgataaaactgaagctttcaagagaaaattagaatgttggaaaacttgaatctatctttgagttttacagcatctcaatatatacttttctgataagaataatggcaatattaacaaatgtggttttttcaatgtataatgatatgtgtcaacattcagaagacctatattattcactgaacaaatattttccaaatgaataaggcataatgtcaactgtcttatttggcatttgacaaatggacaaaagatccattcaaagtgcaaatgggccaatagatttcaatgtcatggagtatgaaaaagcagtgagactataaatttgaatcagtagtttaaaagtagttaacactcctaaacaatttcattgaggaagatgactaaaacttctttaggagttttaagagtttaaacctttttgatcagtttctcctctatggaaaactagcatctaaactagcacctaaactggtacctaagaaaacttgacacatacagaaaaaaccctgcattagtaactctatgaaggaaaatatgtatacagtttactcaaagttatcatgaattaggcatctaaacattaatcttaatattctagaaaagagattatcacatgatttgttaacagaaagctcttcttttgaaaacacacatggaacccgaacataaaagacaattaaagcataagtaggtcccatggagtcaatgcttagccgccttatccctcaaacctttatctcattgcacatgcacgagacatctttagaaaagccactgacttaggccactggtttctaaacttggctgtgctaaaatcagaatcagtaccattagctttttagtaatagattcacaggctgcctaacacaacaaagtaaattagaatctctcgggatacaatctaccattctgtattatttaaaatgtccccagtgggcaggtgcagtggctcacgtctgtaatcccagcactttgagacgggcagatcgcttgaggtcaggagttcgagactagtatgaccaacatggcaaaaccccatctctactaaaaaatacaaaaattaactgagcatggtggcgaacgcttgtaatcgcagctactcgggaggccgaggcaagagaatcacttgaacctgggaggcgaaggttgcagtgagccaaaattgtgccactgcactctagcctggacaacaaagggaggctccatctcaaaaaaattaaaaaaggggtccgggcacaatgagtggctcccatctgtaatcccagcactttgggaggctgaggcgggaggatcacctgaggtcaggagtttgagaccagcctggccaacatggtgaaactttgtctctactaaaaatacaaaaaattatccgggcgtgatgacatgtgcctataatcccagctactagggagggtgaggcaggagaactgcttgaacccaggaggtggaggttgcagtgagccgagactgcacttcagcctgcgcaacagagcaagactctgttgcaaaaaaaaaaaaaaaagaggccccagatgatttctgaagctgctcttgggagttcagtgctgctaatccttcttataagtaacatccccagtactatttatcaaaaggcagctcacttaacagtaagaagctacagctgaggaaataagaactactttgggctatgccatttactgacaaactgatcttcaacatctctccacatcaatatcttcatctgtgaaaggtagaaaatacaaaaaaaaaaagggggagagagggcattcatgaaaactagataagattttgaatgtaaaagtcttacacagtgcctagcaaggttagatcatgaaaatatgttgatatattaagagggataggaaggattagacaaacttagcctctgacagaagagatggataaaaactgtgttttctgtttgaactctgtatagtcctcaaaatccaggagaagacaaattagatgtttcctattagggcagttagatagtatctagcatttgaaaagaaacagctgagcttcaggatagtaactaccttcgaagctacggaatcctttcagggtcctagctgtaggtcacctctgggtcagagccaaaggcctattagccatagctgagatggagatgactaatattataccactaaccattcatattatccaattaaattttcttgttttgattccatggtcataaaacaaatttttcaattcataatctggctttttaaacaaatttttttcctagatcactgtctcaactatcctattcaaagcaattatatttctcactataaattaagttctataggaaatcaagccttaagtcccaagacatctactgtttgtaatgattaacttatcacacaggcatttaaaatgatactaagggcacattatccttgagtggattgaggacacaccatctttgggaggactaagaaaaatacttacaaaattcttttctgtgggcttaattctctccatggaacaaactgaaaaagcctgcatgaattaacattccagtttacaagtcttttgcgaacttaattacaaaggattagtccaatggcctctaggttcaacgataagatacagttcacagaccttgacttcactaacgtataaactggcttatctcaacatatgttctacagaatcactacactttagtgtcatacaggtgacagacctccccccctaaaactttgtgtagaagtatttatattctatttatactaaaaaggcaacattctacttaatatagctccatttcaaaacttttaataggtcaaaattgtattttattatatttaatatattcatcagaaataataaattatattttgaaatttcataaatactaaaatctacccgaaagaaataaaatttcatggggcctacagattttagattaggataaaggcaaaggagcaaagcagctgaattaaaattcaatggggcagggcacggtgcctcacgcctgtaatcccagcacttcggaaggccaggatgggcggatcactaggtcaggagttaaagaccagcctggccaacatggtgaaaccctgtctctgctaaaaatacaaaaattagctgggcgtgatggtgtgtgcctgtaatcccagctactcgggaggctgaggcaggagaatcgcttgaacccatgaggcggaggctgcagtgagccgagactgtgccactgcactccagcctgggcaacagggcgagactcagtctcaaaaaaaaaaaaaaaacaattcaatggaactcgaaaacatatcccatccatagaaacttttgtagatttttttcagtttcccatttaatgtcctactgaaatcttactcagaatctttattgctgaaaaaaatgacatccttctcctaactcaacaattacacttttttttataaaacacaagtttcatgtttattcaaagagaaaattctggaaacatttagcttttgtattattataaagcttttataatctaatactgagaatgatgtttgagggagggaaggaggaggagccaagcaaccataagtctgggattaaaatgactctgtggagagtaaagttgatagtacaaattccccagagactgcagtctactaatggcaatacttagaaaaaatttttagaaaattgaaatttaaaatcaaaaaaacaggagtgggaaattggtaatgataaaaggagaggtgagatttaaagtaacttgactgaactgctacaaagaagtgttacaaagtgaatctaaatgaagcaaagtaggttcaagaagtttcaggattttgaaaatgaatacatattatttattcctgttgtagaaaacagaaatctcatatgtggtttcaaaattaaaagtttatatgtagctttatattgtaggagttattaagaaattattgtaggcagatagagaggaaaacggtccttaggaagttttcatcttttaaagcatctccagaaaagtttaggcaacctttgatatgcaaatgcaagccattagaaactgggtccacccaaacctggcaataccagcactcttcttcttgcccttgccccacatgttcctggcgacatggccgtccccacatatccccacctgtgtagaagatcatggcaccctgtattggcatattaaaaggctaggtgggagggtcctttttttttttttttttttttttaacaggctatgtggatgacatgcctggtcaaaccaatcctgagccctatgcaaatcaaacactggcaccttcagcctcttcatatacctgactggtatccgtggcaggtggggttccctctcttggttttggagctcccctccctctgtctctgtacaggggagcttatttctttcttcccccttctttcttgcctactaaactccctgctccttaaaactactccatgtgtgtccatgtcatttttttctaattcgacccaagaggaagaacctggggttctccactcatcggagtcgtatcagtattttggttagcagtccaaatagggaaagaaactgaaagatacttactatagtaaccgtataatacagtgtcctcaatctgtctgctgacattagcattagcccagtcctaggataaaaggaaacaatagaaatattaatgaaacacccatttgcctaacaattaaaagtcaagttttaatacgactgaatatcacttccaaaatctatccacccacataaaaacaatctatgtcttcaataagtgagagacagacaatagacaaatttcagtatgtaaatgctgagataagacaacacagttctgggaaaacacagacaaaaggcacctaactcagactgaagatgaggaatggcttctcaaaaatgactaaactgagacctgaaaggagggagaatgatctcagggaaacagaaaatagtaggaaggaaagagggagtaaagaacatacacagaacgtttgaaaaaagcttcaagaagctaaatatagattaaattgagcttttggaaaggtaagagaaaccaggtggagagagggaagagaaggacacatatgtcaggggcttgtgagtcatgctgagtactttggactttgtcctaagggcaatggaaaatagtgatgaattttatgcagagagcaacaaacctgattagtacttcagaaagaacatatttgagcatattatacatttttttaaaaacctacaggaaaaatcagtctaatctcctttgcattcatcccacacaagggttgttcgaattactaagcttagaaaatataattcaaattaatcttttccaatagaaaaaaaatctataccctattctgtcagaactaaggtacaatgtcaagcctttttggcctatactctaaattctgtgcatgtgaaaaattaaacgtggagaatctaaaggacttatcactgctattaagtataaagcaaaatttagaatccaggtcagtgttttataaacacttaaagagctcaagtcagtgtcaacattctatgagtgctcttaaaaaagggcatcaatatttaattctcttaagataattaaggatttttcttttctcttttttttgcccataaacacctctagcaatgagtagctataaatttgctgataaatgcctaaaatataaaaaaagtagaaaatccaaacttacttctacaaaggcaaaaccttgatatccaaagcacaataaaaacaatatgttcccaatagtaataaggaatagtaacaaacccttaataggccaaatagaaacatttatgttaaccatataaaaaataaatcacaggatataacaaatttaataaatggaaagtcatctgttcccacatttaaagattgtaaataccaactgccatccaaattaatcttaaaattaatatatatcaccaatcaaaatcccattgtgctaggaggtagagtatattaacatattgattctaaaaatcatctgacaaaacaagctagggccagaaataaatttgaaaaagaccaacaagaaggaatttcccaattactatcctttactaataaaacgtgaaaatccactattatataacctttcacctacctattggcaaaatttaaaacaataacatccagtaatgccaaaatgtggagggaaagccatctgctacacagtaagatagtctaccatgtagacattctttattgaatcgatcctaaaaatattcacacaaattaggatggatattagtacatagatagtttattcattggacaatactacttgtccaacaaattacctcaggagctcttacaaagcgataagctagcccaaatgggcccttcctttcccacacagcaggagctgtaccaaattccatcactcattggactaagagacccaaagtctccaggtgttcagcaattgtcctagcattcagtgaactacttgtacctactcagctcatattctttggcacccaagtccaaggtgtttattctacctgcaagaccattcttaagaggccaggtgcggtggcttacatctgtaatcccagcactctagaaggctgaggcaggtggattgcttgaggtcaggagtttgaggccaggcattgtagtacacacctataatcccagcttcttggaaggatgaggaatgagaattgctttaacttgggaggcagaggttgcagcgagccaagatcatgccactacactctagcctgagcaacagagcaagactctgtctcaagaaacaaaaaaaaaaagagagagagagagaaaagactaggaggttatatgcctctactaaagcacctgcactgtgggagagtttctctctttgcctaatgtagttacaaaagaacctgagcacttgctgacccttgtcagggtaaattagaccctgtactaattaacatttattggttttgggccaagagtcctttacccaacaatattcggtgtagggtcgtttaaaatattttttaaaagaaaaatgaaactggagacaatctaaatgccagaatagaaatagtaaaatttactactgtacatgcataacatagaataacatgttgacattaaaaacaatgagacctatataaactagcatagataaatatctatgaagtacttttgagtaggaggaaacagaacaaatcacaaccaaaagttttaacacatgtaatctttgtctaaaaaatgtaatgaaagaaatacccaaacatattatagaaaaaatgaaaagaaaatgtaagtagcgcttaccacacagaatgggaaagcactggggagaattctgtgcaatgactgaaaattttttcatcaatgattcaagtatccaaatgaatatgtacataatcaaagcttcaactcctaagagctgtgcttctttagtgattacttctgtatcaaaacagaaatttaaaagtatttttgtgggttttgttctgtttttgagacagtgtctcactctgtcacccaggctgcagtgcagtggcatgatcatggctcactgcaacctagaccttcccaggctcaggtgatcctcccaccttcaggcttccaagtagctgggaccacaggtgcatgccaccatgcccagctaatttttgtattttttgtagagactgggtttcaccacgttgcccaggctggtcttgaactcctggactcaagtgatctgcctgcctcagcctctaggtttacaggtgtgagccaccatacctggactaaaaggattttgaagatgagcaaattaagaacaatgtatcaatgggccagagaataataacaactatcttttttttacttcttatatgttatacaaacttcccaccaatttccaagacagccccaggaggtagtaatgtctccactgagaatcacttaaaaattagtttaaaatcagacaaaatcccaatctcaaaaaaaaatattaaaaataaaaagtctgaaggttaacttgaagcaaaagaatcattgaaatttagcatcttttactctataaggatcttttgcctaaccagttcttgtggcaacaggagtattgctgttactattttaaagctacaaatatgtgtaagatatacaacatcactcaagtactgttagtgtatttggcttttacatactctcttgcctccaagatacttgatgtattgtcaagagagcttagtttgtaaaactttccttctaattttgggaaccactatgaccttgatatgttttataaactattgcctctcgaagtagaaactaaaagaaacttcagagtcatttaggacacaaaagaatgtgagacaatcaagaactaaataaagaatattaaagaagaatatttcagaagacaaggatatgaattccacagaacaagaatgtaattggtcgcatatgtaaattccattccccatttttcaagttgacttttgaaacctgctgcataacccaaaactccaaaatgattctcctcacttttacctgataacttcaccataaaaatggtggttctcattcaggagccattttgatccccatggggcatttgacaatgtccggagacatggtggacagagtcagtatactacaggaatctaggaggtaagaggtcaaggacgccactaaacacctacaattcacagggcaggcccccataacaaagaattatccaaggcaaaatgtccatgattgagaaatactgacttagaggtctctaaaataatttgcagccccaagacaggagctcactcaacttactattaaatctaaaacatatctccatttgtatccaaattctagaccttctttcctctgaaatacccacactcctattacacccaaccctttcactttcactcacccttctggaggaaactgcacctgcaataccttctctcccctcaaaaatttctctcactgtactgaattctaaagtatacaaattctagtaactattaaacacaaagagatacacaaacaccacaaataaaaacacctccattaacccacttctcactttcgtagagaacaaaaacttcctgaaaagttgtcagcattccttatcacttcttccttacttctctgtccatatctaacccactcaacctaaccaccctactgttctgctgaaattattcttcatggtcaccactgaccaaagccaccagtcacttctctaccccattcacttcacctctcaacaccactgaaaaaagctatcattctttcttcctgaaacacattattctgatttccataaagcctccctcttctgtttttcttatctctcaggttgcagattctccccttcagctgaccttctacacgatagagaactccagtcctcggtccagtgtcaaggcttctctgactactcagtcttcccagctgctagtcagtccataactgtagatatcatccatatgttgcttcccaaatacttctctccagccctaagctcttcacagagcttcaactccctacttaacacctccacctggatagatagtacagtacacactttaaaggtagcctgtccgaactataactcttttctctacaccccctcacttgcccatgcacatgccctcttattcctctaagtttccctatttctctaaggtatacaaaaacctaggcatcagtgctccaattttctttttctttcacctgtccccctatatctaatctatcagcagatcccagcagctctacctctaaaatacatgccaattttaatcatttttctctactagcaccactctagcccaagtcacctttatcttttaccttcattaacttcatattgcagttaggagaaaatctaaacttattaatatgacttaaaagtcatgaacagtctggctcctgccttattctggatctcagcttttaccaaagcaaaaccctcaacaatacatgtcagccaaataagccaagttcatcctggcctaaaggcctctatatttgctgctgcttctccctaaaggctctctccctctggctctttactagattggctcctcatccaggtatcatggcaagaaacctcagcagttttgccttcctatccccctctccaaaacactcataacctgactagactctcatatcaatctatttcctcatagaatttatcactataaagttaccttatcttatttgttgattattgatctggccttgcagactaagctccatgagaaaagcaacctcatttgccttaatgattaatctccagtacctacaattgtcaggcacatactatatatttagtaaatattaagtaaataaacatatttaaggttcaataaagagcacaaagttctaagatacagttcccaccatttgaaaataggaatgagggagcagtagagtttagcccagacatctaataacagtccataaagatattcataattagggaacaggagtaagatatgaacaaacaccaaaacattaaatgttttcatgacataccttaatattaactaatttttttatttttacatgttgtgtaaaagaaagaatatttattcatattagtgtcgatttctttttttttttactattggatcagtatatttcatgtatatccccatccaatgttactggccaactatcaaagactgttaaagacagcacttccagctgtactctaaaaggttctcttctgttatctaaaaagttaattactttagaaaagaagctagaaacaaattatctagctaaaattattaataatgccatatgctgaaagaaaggtcaacagaaacaactcaggcattataatatacccctgccataagaaggcagagaaagctagaagggtaactaaaacaaaaataaagaaactagcaatgactgcctgctcacagaaaagcctgggcaccttctgtttttaagaaaaatgttagcaatcattaatatgtagagtttccaaataattataccttagaagacaagtccataattagagagaggcttcaaaatatttgaggtggaagtagagaaagttagagaatgtatatattcatttaggaatttcaaatgcacactgtaaatattattatacattagcattcatcatggaaaacaatgtcaacttgtacattcatctttacaaacaaggttggaatagaccaaaaccacgttggcatcctttttactctgactacatttacaatcgtggcatgaagtttgaagaattaattcttaaatacttaaacttatctttcactaggcacctgaattcagtaataactttaggaaaaactactgtctagagtttatcaggaaaatgttttcaaaaattttttcagtactacttttgagagtcagcaaatagtccagtttcaaataaaaactcatgaatttcactaatcctcaccgagccgcccaaaatgagaagggaaaatacagacacacagaatgtttcaaggtatcaaaaaaactaccaagaaaaatctgatacattatctaagttaaaagcaaacagaactagagacaacttaataatgaaaagtaggaaaggccagtcacaggggctcatggctgtaatcccagcactttgggaggccaagacgggtggatcacctgagatcaggagttcaagaccagcctggccaacatggtgaaaccccatctctactaaaaatacaaaaaattggctgggcatggcggtgtgcatctgtaatcccagatactcaggaagctctggcagaagaatcgcttgaacccaggaggcggaggttgcagtgaaactccgtctcaaaaaaagaaaagtagaaaaaaacaagaaccaacaactgatgaataactaatatcctaataatgaaacaaagttttaaaaaagtagagggaaaagttttaacagatattttccccttctaaatattagtgtaacatttagatttaacaaatatagtgtgttaactacagccatattttttttcttttaagggcacatgtattaaaacaagcaccctcaatttttatagttaatatttttgcttctttagtggattcttaaaatcttgttcaaacaagtataatgcaatctcatagatttaaatatcgaaaacaaagaaacaaaacaaacctatttcctaggaagcgagcactaatttaagcatgtgctcaaaacaatacttaatctaatagaaagttcataatttcatgaaaatactttagaaatttttttattatattttaagttctagggtacatgtgcacaatgtgcaggtttgttacatatgtataaagatgaaatgttttcccacaaaatctaaataaatcaaacatgctcaattctaaactaaaaaaatctccgattcaaacaataattataccagggataattatatgacctctatacatcagaatacacacatatacatatatatcattatctatttaaacttaacagctttcagaaagaaaaatatcctagaaatttataattatgtactgtacatttggaagtatactacactgttttaaaataaaaagaatatccagaaattctgaaaatgtcaaaatctcttatccaagaaacaaagcgatatacagagccaaaagaaattaaacatttttatagaatttaattctaaaatgacacttatttatcagagaaaatgacctcataatgttacaatcaaccatttaattatctatgtctaacagtattaaaagtgtatttattcttgcccaataataaaaagcagagaaaacccaatgacaccagtaaaattagtcattttctctagaaataatgtttcaacccaaaatataaaatgtgaattaagtttatattttgaaaaaatgtagaatcactagtaggtatcctatttactaggctacctgaaaatatctcttacttgtttagaagccatcttcccaagaaacctcatgaacaaagctctctggaaccaaactgcagagcttcaaatcccagcttcagcacttacaggctatgttatttcacctctttgaaccttgatttttcagccacaaaaacacagatactactacttatctcacaggattgtttaagagaccaaaggaagttactaaatgtaaatcacttaaaatagagtctgacacatagcaaatatttaatagatgttatttactatctttataacattacaatgtttggcacacactaagtgctcaattaaaacttgctaaatggtgtacagaaaaaaaatgtggttttcacagcaatcagagtatatctaattttcatagtaatcagaataaatttaaacctaactacaaaaatattttcaaattatttaccccatttggaccagggatcgtggctcatgcctgcaatcccagcactttgggaggctgggcacgtggatcactcgaggccagaagtttaagaccagcctggccaacatggcaaaaccccatctctactaaaaatacaaaaagaactagccaggcatggtggctgcatgtctgtattcctagctacttgggaggctgagggacgagaatcgcttgaacccaggaggcggaggttacagtgaaccaagatcatgccactgtactccagcctgggcaacagagtgagcctctatctcaacaaaataaaaaatatatatataaaataaaataaaaaataaaataaaattatttacctaatttagcccaattcaggaagttattttgtaatcatgtattattaagataaatgaaaaactatttcattcaaatatttaagtactaaagctaaatactggggctacaacaacagagacagttcctgagtcacagaagcttaagctagtaagaaacttaaaagtaatttgcataatttaaaggaaactcagaaacctttagtccacacccttcatttttaaaatgaggaacctcaagtccagaaaagttaagtggtttggctaaaggtccacagctagacagttaagggtcaagactagaactcagatcttataattcccagcctaattcactacaccatactgactcaaagtactcaatatgaaacggagattaggatcctgatctgccactaacaaaagcccttctcaattatttacttattgcattaatgcaaatcaaataagcttcaagggagttatgagcagcaaaaaatatataacctattatgattacttaaagcatttgcagggcggctgaattaatagttcttatgtcagttgtaagtctgcttctggtctatcaggttagatgtcacattctcagcttctatgttgtatttccattctcattcattcccagatacaaaaataaaacacaatatgtatcggactgccaagtgtgccagaaatttgaaaggaaaaaaaatctgcaaagtaagattatatttaccttaaatgtaccattttgatttttcatgtaagaaaccaaaaatatatccactggtagaagtgctgatgtgataagtgcaattgctagagaaaaaattgctgttatggtggagacaacttcactttcccgccgactttggtatttacgaacatatatccagcagaatgccaaaatagcctgaaatagaacaaaaagagatgtttgttactacccagtgtattttctctgatttttgtatgtgtttgaaagtttctagcaggaaaccttatgtgaagtaaaggttattttagttgtgtaaggaaagcccactatcccttaaaaacttgtccaagatgtataattttcaaagcctacttcatgaatgcagtacatcacgtatgcatacacacacaatactattaataacagtgctcagctacatatttcctcattaaacacagtgcaaacgttaatggtttcacacatcacagttataactagctttgaatatttttttccctgtagatttttccaacctaaaagagatatgagtagaagctgttctattctaggcttattactgaagcattacaaaatataacttggatgaaaattaacttctgtcctgttctgacagttcaagaatagcattgagctaaagattaactgccagtaatcaccatgcaattatcacattatactataatttaaattttaaagagcattaaacaaagaaaagtcaatgctgaaaatggatacatgtgcacagcaaggagctttccagtgaaaaaagttcactcagaggtagaggttgacatctctagtcagccaagtactcttaatagttaccaatgccattctagtgactaacacagagcataggactttaatgattctctaacgttaggaggcatcggaatcacttggaggaactgttaaagcacagattgctaggccccatcctctgagtttcagattcaagaagtctggagtggagccagaaaatctgcatttgtaacagcttccccaggtgaggctactgctggtccagggctgtattttgagaacttctactctactcatagggagttgcagacagagactgtgttatttcagccttcactgtgagtcagaatcacctgggtaacttttaagtacccttataacttccctacattccccaatcaattctatcaacggagaataaggctcctccaggcatcagtactttaaatgcctgaggatttcaatctgagccaaacttgagaaccattgttctaaataagagctctggtagttttaaaagccttgttttgacctttcactttttcaacagcggttactttctttctgagcatcctacaattccagggcccaaatgaaactaataaaaccaccaaactagttttgcagcttccaaatccttctaccgcaagcaagatacaagaacaattccatcatctcagaaaattcctttgtccctttgtagttaactcctctctctgcccccagcccttgagacaggaataatgcatgatgttcacaagggctaaaaaattccagagagcagttttccatgactagaggctaagggctaataagaccctgaaaaaccagggtgtggaccaagctggttaagacccactggacccaacatggcaatggatttgacctaggtttcacctaggacctcattatatgctcattaacatgctcaatcacacacctaccagcaccatggcagttccaagaccactcatatttgatgtaaaaatgggtggcaccacaatttcaagaagtctctacttttttccaggaattttcatgaatatgtcccttggataaagaaacccataaaggtagaaactccaaacctcaccgtgtgtctctctcttaagaatgcccacacgagtgtgtacttttccctttaataaatctccacacttacactattttctgacttgccctttaatgtcttctcatgacagtgtcaagagcctgaaaaccagctggggttgagatcccaccagtgtttggggatctccctcagcccaccagtatcaccctgacaaccactatctgttttctgcccctatagtttctgccttttctagaatatcataatgccttcatatagtatgttgtcttttcagtctggctagtgtcatttggcacagtgcatttaaaacccatccaagttgctgcatgtcattgcttcatactgctggcctttcaactggtgacagaatagcaggaaagaattgactgagaagggagttaagactttggaacaaacaaacaaaaaggatctaggctcaaattcttgattttgggaaatttatttttcataaaatgtgactttgtattaatatttgaatgagcttgtttttaaaggaattcataaatatttttaacattccccaaattcattctgaagtctttgaaagctgagtctcatctttatatcctcagcagtacttgacacaaagtgttccaataaattttttattggatttcaagaatgaaagaaaacctgcattttgtaggtattactgcaaacaaaggattttgccaatatcaggcagacaagctaggaaacggcaaccaggcagaagagttaagccagagattcccaaactttttggtctcagaatccctttataatggttttaaaactgataaccttaaagagctttttgttcatgttatcaatcattactacaatataaaataaaaccaagtatcctcgtctataggaatacttctttcataacaagttataaggattaaatgagatataaagggtttaccatagtggctggccatagtaactgcttaacaaacagtagtagttattagataatttgataaaagaaacaaatatataactctgttaacaattataaagaaaagtttcaaatagtccccccagcttctcccaaaagattcaaaataaattggtctgaacactgagatttttaaaactccccaggtggttctgatgaaaggtcaagtttgcaaaccactggggcagaagaaggaatgagaagagatgaatcttcattaaactaatgagaatagatgacatactgtatgggatcttgttaaactgcagatctgattcagtaggactggggtcacatatttggtatttctaacaagttcccagatgatgcccacactttaaggaacaagaataaatttgctttacaaaaatggagagtctcctattgtaatggcaaatacaatttaaaggtggtgtgagccaaattacagaggacattgaagctagatagaacagtttagatttgatatagtaaagacagacatagttagattacaggcatgagataccaaatctaacaattccttatgtgtgaagaaactgaagtccattctttttgcccacgatcacaaaagtaggcaacattcatgtcctgaatctttttttttttttttttttttttgagacgaagtttccctctgttgcccaggcactatcagagcttgctgcaactgcctccacaaaccacctcctgggctcaagcaatcctcccacctcagccttctgagtagctggaacctcaggcatttgccacctcgcccggctaattttttgtatttttagtaggaatggggctttgccatgctgcccaggctggtctcaactcctgagctcaactgatccacctgcctcagcctcccaaagtgctgggattacaggtgtgagccaccacacctggcccatgtcctgaatatttagtagatgattggcagaagttctccaagtgtgaaatccctaggccctggtagtccccagaatcctttctggagattcagaagttgaaaactattctcataataaatactaagatgctatttgcctttttcactgtgctgacatttgcactcatggttcatagccacagtgggtaaaactactggtgcattagcgtgaatcaagacagtggcaccaaactgcaccagtaatcattgtattcttcaccacaagttcaaaaagggacaatttaaattaagactgtgcttcacaaagcagcataaattcattttattgaaattcaacccttgactctttttaatactttgtggggtaaaatatgaagcatgcgtacataaagtcctgctgcataccaagatgtgatggctatctccaggaaaagtttagagttaaaagctaaaccaaccactcttcaaggaacaccatttttacttgaaagaacaattgtcaaactggttattcagacttcgctttttggcagattttgtcaaatgaacaaagggaatctatcacttaaagaaaaactgacagtatttgataccaatgataattatgagtcaaactttcaaatgaaaattggattttgaaagacttacatccacaagtatgagcttgacaactcttcaatacttagaattttcagagacatttctgacaagatcagttgtaatttaatgaaatgtgatattttgatattgtgtaatgaaacgtatccatatttaaaagatgtgcataactcagtaaaccaacattttctaagtggccatggcatcatgttataaaaccatgcatgggtaaaagagcctttcaaagtgcaagatgggctaatggattttaatgtaacaatgaatgaaatgctcattgatagggtttcagattccaccttgcagctgacatgaatcttccacttgttgagctttggtgtagtgtcaaaaaacatccacaattatctgaaaaacgctcctctgtttctgactacctatcattgcagctgtattttctccatacacttcgactaaaataacataccccaaaagactgaatgtagaaggcaacaaaagaaaccagcctttcttctaataaaccaggatttaaagagatttgcagaaatttaaacaaaagtccttcttcctaatgcttttatccacgacaacattcaattctgattttatttgtccttgctgtaatattgccaacttaaatggcctctcttcttcatctatccaaactctaccacaattctcattttcttccaatattgttgtctattctcttaagtcctgctttatttatagtcacactttggctttcggtccataaaatacatgtttcaagaatttcagttttctcacttatcttcaggccctctttaaagccgtattttgtttggtttacatcctcttacaattcacaccacttctgtaccgtaaatgtttattaatttataactgccaagatagtctcacgtaactttcatacattacatgcttatttatttttttctaaacaaactaaatctgatggactggaaaagccagggggctctccaaatacaggactgggtggctgcagagaccacagtcaacctttagggtttcatttcctccaagagaggactaacatgttccagggtaaaggcagtgtttttatctgtgacagtgatggcagtaacaagaggatccttttcttaaattttcacaccattcttttcttttattttctttttttagtctctactgcaaaaatctactagaacatactacataggtaccagacaccaactggatctgacaattaaagtaaaaccaaacaagcctgatttccagaactggaggtttttgttttgcaatgcaaaaaggtcaaaatacgtgagaacagaaagtaactacagcctcggacgatgagaaaagagaagatttgagaaggtagagaagttatgaaaggaaataaattgaactcccaaataaaccaaagggttttaatatgaacagggaagtaatagccaggccactctgagacatttctatctacactttgctcactgaatatgcagaaataagatcgttggaaaagaaagcacctgaggtcagacaggtagtagtatatactccgatactggtaataaagagggctacagctccgccctccacaggtatctacaccaatcaaaaaaagattagaagagaatgtgacacctggaagtcagaacgagcaactcacgtcatcaaggcagaatcacacaatgggcacagaggttggagactcactagccccaagggtagggaaaatgagggaaaaaacatacagagaaggtgacaagtaaacaacgccagcgcctacttaacttgcaaagatccagcgctgccgccccacaccgtgtgacaatgttttacaggggacgaaaggccaccacatacttctcaaccccgagggtctcttccgcccccaaaccccaccggccccattgcccaagtcagcgatgacggcaagagcttccaaaaaggaccctgcaaccctagacgtcatcggtgaaatg

SEQ ID NO: 50 - DNA, 122599 bp, Homo sapiens; identical to SEQ ID NO: 49
  source 1..122599: mol_type = genomic DNA

SEQ ID NO: 51 - DNA, 123000 bp, Homo sapiens
  source 1..123000: mol_type = genomic DNA
ggcttaaacaacagaaatttattttctcacagatctggaagctggaacctcaagattaaagggttgacaacactggattctcctgaggcctctcctgttggcttgcagaccactgccttctcattgcatcctcacatggcctcttctttgtacatacacattctagatgtctctcccccttcttataagaacaccagtcatattggatttgggcttcacgcaatagcctcattttactttaattacttttaaaaggccctatctccacataaagtattattctatgaagtaccaggggacaagatttcaacatatgaattgtaaggggacacaattcagcctataacatagaaagtggagaagaagggacaaatggaaagataggaagtagaaattaacatgacatgattgtttgatgagtcagttatacagaagagatatggagatctacctgattctttgtttaggcaatcaagtgtctgcggtgccatttgtcaaaaaaatgaatgcagaagaaggcttagtttgcccccacaaaagtgaatacttcaattttcaaaatgttacagttgaagcagtaatttctagctaaaagataactcaaagttcagagcttaagaacaagtagtatagatagaagccaagggtatgtgagattgtccacaaagaaaatgtaatataaggccgagcgtggtggcttatgcctgtaatcccagcactttgggaggccactgtgggtggatcatgaggtcaggagttcaagaccagcctggccaagatggtgaaaccccatctctgctaaaaatacaaaaactagccaggcatggtggcacatgcctgtaatcccagctactcaggaggctgaggcaggagaattgcttgaatgcatgaaggggaggttgcagtgagctgagatcgtgccattgcactccagcctgggcgacaagagtgaaactccatcttaaaaaaaaagaaaaaagaaaatgtaaaataagaacagaagggaatgaaatcctggtgaataatgctaaagggtagttgcagaagcagaagccaaatacgaaagctgtgaaggtttatcaagagagatgaagaatcagaacagagaaaaatggcacaaaaattaagggagagaataattaacttagatatagttgttaattcctaaactttttttcagaaacttaatgatattttacctcaaggatcatgatatatacttttttatgagttctaatgtgcttatgttagtaaactagaatataattttttattatttctcactatccagaatgtgttcaaaataccctactgatgtcatacagctttcattacatcttttgcaaatttcaaatctttagaatgaaaaattatctctaaaaccaaaatatgatgccatatatcttaaattaatccataaactgatttttttttccaggattaattattcttgacaatacccctatttatattgaaatacacattttgaggtcagatgcaaaacaaaagctacctataacaatatgtatgccttaaatactgtagaggttgtaagttatctaatggactgatatttgaacaatataacacatcttggaacgccatgctcttagagcactaactagagtttgaaatcttttcatgaaatctacttgagtggtgctaaagattttatgcagaaaactgaaaacaatttgcatatgggagtaacattcatcagctatattgtaaatattatttggaggcaatcagagagagacactttaaaattccacatcactctggagaacctaaggcacagatacagatgatttattatgttttcaaaaagtgacaaaagggaatattaattctggaagatttttaatcaatttaacactattatacattagaggaaaaaattttgcacaaacattccctcacaaagccagtagtcttatatttacatagcatgattatggtaatttaaaatgttaatctatgatacaatgttacttcagaaaacatataataaaatatagttgtcttatagccatgctcccatttttgatgaaagctagttagcaaatcctaatgttagtttaatactttaaaaatgcataacagatattcagtcagcattataaaacctttaagacagaaggctgtcaagcagaatagacagagggctcatcatcacttatgtctgaatcttcatctactccttcaataaccgatttcttccctttacaacaggatacaattaatccaatcaaaaatacctgtaaatttaaataagccatgtgttatttttcaaatttaaaatcatctggaaagtaatgctttaaaattcaatgacagtactatgatacaaatggcctagtaagataaaaagagtttacacatttaactataatttataaaggaaggtcaaatcacgcgtgggatatctgcacttaccccaagaaaggcccagttaccaaaatagtaagcagcactgaagaaccagaacttgtgaaggaataggtatgtccgggtaacagtacactgatctgtgaaagcaaataaaagactatggtgagataggttctttcataaaattgatgattaatactttctctaaaagattattaaccaaagctaatgactaagatcatatggctagtaagtgtcagagatggtactgaaacttaggtctctctccaaagcccactctttcaatcaccttaatgtagtgttaaaaactgccaattaatatgacatattaaaaaaaaaatgaatgccaccaatgcaatccagatcttaagtataaaaaaatcatcttgactagtttgctttactggaaatagaagaatcatttttacttggagtgtcagacatatcataaaacaaaaaaaaagttttcctgatgaacatcaagaagaaagaacaaagtaatcagatgtggtcagtattaagttgcacttgtaggggcagaaaggtctaatacctttcctcacccattgtaagtttcacggtcaacactcctataacagaagacaggttaacaagagaaaagcataacaaatttatttagtcagttttacatgacacaggaggcttcagaaatgaagactcaagggaaaactgtgtattttcaagcttcgtcaatgaagaatggagagctaagagctaagaatagagagtaattggacaaaagtgtataaccaaatggtaacagactgagcggggaaagccagcaaggtctgtatgttcagattcttcctggtctttctacacagcatcccctccttcaaggtatagggcagaactccttttggaatgagggtcttatgacctactattagacaaggtaggtcatagaatttctttatggccagctcctacatagaaaggcaggggaaggttagaataatatttctaggtttatggctggctttggaaaagtggggttctaatttctatgacatggttgggggaagagaagttccagtttctatggtctgccttgggagagaaaggggaacagaagaaagaagggcaagggaaggttgaaaggatactttgcttctgggggtcttccaatatccttcagttcaaagtacttagcatgttacagtgtgtgctatcattttcttatccccaacacacttttctaagaaaccaattctcacggcagctcaagcttgagaggtttctttcagcttttatctttttatgactgctattgaatggatgactactacttctaaagaaataggaaaatcattatttactgatgtgattcctgtttgaactttagacggcattatagatgtaattaaaaataaatcatatatttttctccttcaaataaaatgtaactctcaaagagaaagtagcagactggttatttgatatttgtgtaaaccccatattagttttgtacaaatacattatttccattagttgcaaagtcatctacacatattcaagccattcagagaggcctgtggcaacacagtacagttgaccctcaagcaaaacaggttagagttgccaaccaccacacacaatcaaaaatccacatataacttttgacttctccaaaacgtaactactaaatagcctggtgttttctggaggccttactgataacacgaactatagattgacacatattttgtatgttatgtatattacatactatgatcttacaataaagtaagctaaagaaaagaaaatgttattaagaaaatcataaaaagtgaaaatatatttactattaagtggaagtagattatcataaaggtctttatcctcattgtctttacattgaattggctgatgggaaggggaaggatggggaagaggaggggttggtcttgctgtctcaagtggcagaggtggaagaggtgaaggaagtagaataggaggcaggagaggcaactgaaacttttattgaaaaaaaatctggcataagtgaacccatgcagttcaaacttgtgttgttcaagggtcaactacattatgtaattgagtgtaaaattatatatgctgcatctaatagaggatactaacctcacaaatttcagaaggcctacttcttttcagtctgttaattacaaaataaattataatttctacatatttttattcaaaatggacaatggcaaaaagatcctacatgcaattagaagaccaatctcatatcctattgttaatcaagaaaatacacctttagttctatttttctgagctctcttctcagcttcaataagtaagtgttcttttctctcaaaacataaaattgagctgagggctacatagtccagcttattacataagggatctaataacactttttttgttcctgtcacatggttttccaaaaatagcattaaagttatattttatcaacatataagacttgttacataaagcttcagatatgtgatgtaaagatttagataatctaaattttatctactctaaacccttccactgtacttcaacatttacttctgaattgctcaataccaaactgaacaaacctgtctctttctggttaaaacaaaaaaaaaaaaacaaaaacaaacaaacaaaaaaaatcacacagtttaataaagaagcaacttcttccttttaggagcaaggactaccaatctaattcctatctattgagcccccaaaagctcccttcagagtctttcttctctttatcaacagaaaagtctagaatgaatattcacagttttctaagaaaaccagaaagcctttaagcagcattagctggacatatttctgtctcctatagttaccatagatgagtacagctttacactaggtgctgggagttcagactcacagcagagactcctggatagaaaatttgtcatttacttcgtgctcccaccacattttattctcacttttattacagaacttacttcacagtgatatagctattcaatttgtcattttttttccagtagatatactgagtatcctaaaataccattggagtactcaaatccattcatattcaatgactgttgacgttaaaaggggatattttaaatttatattaattaaatagcccattttctaatttttaaaaattgaaatctgacaagattccaagggtataaaaatgagaaaattgaatatatcttgaaattaaagcataactaaaatgtccagcatggtgaacgaagagcccaggctccggactctgacagacttggaggtgaatagcatttggtcacttttttgccatgtgtacaggcaaatctgaactgtggagcctgtggacttataaaaaggggatatcaccatctttcctcacagaattgctataaagatcatatgacatatacatcaaaagccccaggcaaagtggcgcttaatattaattttcttcctttttcctctgcaaggtatagagaacaattgtgaagagctactcaaatggttgcaagtcttaagatttcagacacgcatgtccaacagtaggaaaataattggttagtcattaatatcatgactactctgtgcatgcccattatttttctgtctctacagttgaaacagacacaaatggatttggcaaaattcaaatttgtataatcagtatcagcatacactgctaaatatacctttaaataaccaatttgaatgtttcaaaaatgaagagcagggtaggcttggacctacccaaaaaatgcctgttcataattattttaaaaacaagaatggtatcattcatggtttaagtattactttagcttcattttacaagtataagcctgtgaaaaactcaactttctcaatactgctaatgctgtaaacttaaaaaataaaagttatttcactcatttccatacttatgatattttgggagtcagaacttgacaaaattagaaatttcagggccagaacagggctaacaaaacagaggctgagctggcagaagcaagataaatcaaatcattcttctccagacatctaataatccacttagtgacattttaaattggcttatactctctgactcttgcccaccaccaaaaccatatcttaaatatttttttgatcacattattttacatgtttacctttttaaaaggttgtggactttgacagaagccttttaaaataccataaaaatgtatcatcattctgcgttgttgttgaaaaatgatagaaggctaaaaatccacacacacaataagtaacagctctttatatgcatctttatacatatatatcattttatttctattaactgggatatacccatataaaaatttttgctaataagatgcatgcatatatttcctattcaagtgacaattccaccctgaataaatggaggggagtgccgttcttcaccatctgccatcttccagctgctcacctgaatcacagatatctaggagatatatagatttctttctataattatccaactaagaaaatcacaataaaggttctgaatttggttttaccttcaaagtaaatttaaactgttggatatttcatttaggaattgtgttctaaaatcagaagtattccagaaacttctgactgttgttcctcaaaagaaaatataattgaattaaagattaaacttccaattaaactaaagattagatgttaacaatgaacactaaacatgggggaggggggctcagataatttttttttctgatgagaaagtggccatacaaaaaagaattcaaagggccaaaaaggggcatctgaagcatatgaataaaatcaagacttttgaatcctgctactaccaccattccttcatctcttctcacatatcatcaaacagagaaataacaggaaatgcaagtacaccattttttttgtaatttaacagcagtctttaaggatttatctgataaattttatattatatatttcctgtttcctttgttatgtcacttttaatgtatcttgactgccactaagataactttggttaagtagaataaataataccttttattttaaatacatattttaaaaacatttaatgtttaagccacaactgagtcatcatgttaaaccttcacttgaaatcaatttataattaattactctatatttgcattttataaaacaaagccttattttacgtgtatatatatagaagacatttgagaacactcatgtaacatggagaataattttaaaacaagcaatttatttgactagtgaccaaaaaaacttagaagcctagactatttagaagccacttcatagctcttggctgcccatgactgtgccaattggttcctgattagggtcttgctactattgaatatttataatgaacatatatatcttaactgtatacaggctaaggagcttggattttattgtgatatgatttgaaattatttataaaatggttttaagaaagaataacaagagtggagtacagactagaagaggagattgaaagtagaaagaggtttaccaagttagaagactatacaactggaaaaaatgagctcagggatgggaagaaaaaagttgggatctgtgagatttttaggatttaaaatcctaatgttttatcgtcagatggaatacatacacgtaaaaagatttcggaaactaatgaaatacatccaaataaatgggaaggcagaaaaaatgaagatatataataaaaaccaaagttgtatatttatattaaaatttaacaagtggcatacagttaaatcaatgttttgttaaatctcactgggagatttaggtaaaggggaagagaactgatgaatgtcaaaactcacagaaattttgaaggacacagttttcttatactttaagaatacacaaactgtatcaggttaataaagatatttgccagatattttgcacttaagaataagtttcagagtaaccatttttaagaacaagtataatctgtgttgagctctggttatatttaaataagtttaaagcatttccaaggtgctaaaatatatatttgccttttaagaaagaatgctactaatttcattttattactaattggccatataacactcattaaaagggagtacaaggtaagtattagcatataaaatgtagaaatggtataatcacaatctgtataagtgaactctaaattactgagacttactatctgctggttgtaattgtccaaggatagtcagatataaagcaattgtcttctattactttaacttttgataaaataaaagtagtttaaacggatatactagaaaatattaaagacagaaaactgagatttagttgagtctgacactaatttactatgagacccttgaggtaattcatttagcttctaaatatcagtttctttgtaagtgacatacagatatgtgtggtatatggtgctagatcaaatttctgggaatttagagagaaatttgcatttgaaagaaaagaaaagactgatgttttcagagttagccaccttaagcaataatctgtgagtagctgagaagtttcacaaaattatttaggttggctttggtgtagatactggagaacttagaaagcatacagctaatcaactttactatactattttagttaaacttctatcaacacaaccgcaatgtcacctagaaaaagaacctcaacatcaggagactttctagatccccagcaacatccaagaaaaatgatgctctgatcaatactcaattttccagtctgcatcgcaatcttgattgacaatagacataatacatcaggctatctaagctagataccagccaataagatcactgaggccctctttctaacttcatgtttacctagacattgtatgactataaatttgattttccatgcaaattctttctctctggtaataattcactaaccttgatcatctagtttatttaatagttaaactttctagggtaaattaattagctgccatttgggtgacattagattcttgggctgttctctgttcagtcatatgaagctaaatatagatgctggagaccaaagtatggcacttcttagaaatagttcgatctcatcacctactattgtgctacacatcttatgggtttactataatcaaatcaaatgaggttatcaacacaaacttcttatttgtcaaataaaagattagaaatgtatagtatttaaccacaaaaaaaattttaacctgttgaaaacatagcttactggttcaagataacagacttagcacagtcatttgtttcttatccttctcaggacctcattactgttctagtataggaataaagccaggagcaatcctttatcagcaaagagaatggaagtagaaccatcagctgatgagaggttccaacaataatccagaagatggaaggccacatttaaaaggtctccagtaaaacagatggttttcctcccatttattttaaaatataatatgaggatcaagaagtcccagatgcatgcacagagttaccagcaatgacacttcccagttcctgatatttaaatacaaattggcataaatgtgaatggatcatcaaatatatgtagagaacaatcaacatgagggaaaaagaaaacaagataaacaactgcactaggataaccaaaattataattttacttaaaggaaactattaagaaaaatatttactatcttcaggtattaaagatattacatccataaaataaggacacttgaaaagaacaatcagaacaacaaaatactcaggaaaataacaatttatcatatgaaattaaaattcataatatggttgacaaagctgaatacataccaaagaacatagagtaaatggtaggcagaaaatatgaaaatgagataatacaaacaatcaattgaagatattcaataaataataaaaaagaattccccaaagagaaaatagaaaatagaaagaaaccatgaagtaccttcagaagaaaaaataaactggcattagatttcttaccagttaaaatgaaagtaggagataatataatgcctttaaagttgtaagaggaaatgacttctcatgcagaattctaagcacagccaaactatccattaattgtgaggacagaatacttttcagatatataagcacttttcagatatgtatttcatataaagaattttattttttaccctagtaaaactaagggcttgggagaattcaccaagaaagaagatatgatttacaatgcatcggaagtctaatggacagaaattgtagcattataatatataattatgatttgtaaagctgagcagcagaatcagaaaagaattaatccaaataaaaacaggaaatcagtaggttcccagaaggaagttttcaggtcaatacaatgggtttcatccaacagataaagtgagcaagaagctagaaaatattaggcatactaacatcttatgttactttaataatactatttaaaaagagaaaagacaaaggaacaaattttagaatgtggttcaattctacaaatgtttaagggagacaaagatatattttcttattctcaaggaacttacatttctataaaaagtagaatagagataagatatatgaagactatacattgagagagaataaggtaacgttataaaaagtataaatgctatgggaattcaaaggaaaaaagagagcacacacatgtttggagattgaaaaaagaaggttgagttagaaattaaccttgtaagaagatccggattctgactgatgaaaatgggaggggtagggcgaagattttttgtgatatttcaaaaacaaatcattgaaaagcaaaggtagataagaatctggccatgtccgaacatgtatgaaaaaaagctagagacttgtaagcgttaaatagtagtagtccttaaatcctagactgaatttatcagatgatgtgaggggagcacttacagtttttactagagaaatggcattatcagcatactttggaagagtggtttccacagtgtggttcccagaccagaaaattctagggtcccacctcagatccactaaatcaaaaactttgggtcaggcgtggtggctcatgcctgtaaccccagcactttgggaggctgaggcgggcagatcacctgaggtcaggagttcaggaccagcctgggcaacatggtgaaaccctgtctctactaaaaatacaaaaattagttgggcatggtggcacgtgcctgtaatcccagctactcaggaggctgaggcaggagaattgttggaacccgggaggcagaggctgcagtgagccgagatcacatcactgcactccagcctgggtgacaagcgaggctccgtctcaaaaacaaacaaacaaacaaaaacacacacacaactttgcaatctcggtttcacaaatcttccaagtgattttgatgcatgcgaaagtttgataacctttcttttactctaagttaaggtaaaatcactaaaaggtacagtaatttaagggagacatgatggaaaggggatgtaagggtcattatggcaaacaaaacaaaataaaacaagacaaaacaaaacaaaaaaactctgcagctcttagtaactgattaggtgtggagaagaagcgaataactactttgaagaatgtggtagtataagaaatacttaagtcagtatagtccaaagtctttatctaatagtttatactatcttccccaagagctattcattataaacattcttataaatacattaccaaaataaggcaaagttctttatattagttttacatgattaataattctcgtttagagttccccatacatagctaacaggttagcatctttattttttcttccttgaccttgaggtaacaccctaacctacataccacatcacagctacacacatgctttcatccataatgttcaataaccagctgcggtgctcagaacctaataggttacactattagttctctatgaaggaatatccagaacaaaacaaagtcaagtaggcccaaaggaaaaaagaaatgtataaccttaataggtacacatacattttaaagataattattatagatattatcaaaattagaatgtgaaatattaaacaaatactttctaattaaaacccttaaaaaacgggcatcacccctgactcccttctctctctgtctctctcaaactctctatcaagcaaatactattggctctaccttcaaaatatatccagatcctgaccactttttgccactgccactaccaccataagctctcccttggattattgcaaaacgcttctgtcaacctgcttttacccttggctcattatgatctgtatcacaggtaggcaaactatggcacgcagggcaaatcaagcctatcatttgtaagttttattgaaacatagctacagccatcccttaagtaatgtctatggcagttttcatgctgcaatggaagagctgagtggttatcatagactactgcatgacccacaaagcctgaaatatttactatctggctatttacagaaaaaagtttccaagccttggtctatatacaacacagtagtcagagtgatcctgtgagaacataagtcacatcatgccattcctctgttgacaatcttccagatacttttcatttgaaagtaaaagctgatgtccttaaaattatctgcttgctattcctctacctcctcaagcatactcctgctgtgtacttgctgttaacactatctacaatactcctctccagatactgtgtttgctcttcacttctttaaagtcatgtcaccttcccagtaagaattccctttctcctgtacctaaaatttcaaaccattcctccttctgaacaccagttaatctcctttggcactttatttttctccataatacttgtcacctgacatatttatttgtctgtccccttatattaagtaagctccatggggacagggatactagagtgttttgttcactgctgtatccctagcacctagaatagtacctagcacagagcagacatcaacaaatatttgttaaatgaaaaagcacaagaataatagataagtaaaattaaatgacctatgtaatactggaaattaagacatttataaatttatcttagaatttcacgactaacaggattgtgcttctccgtattactaaagaagatatgtcaatatattcgaaaggtgactgaaatgcaacacagtcattacttaatattgtattccacaaataaagagggtaactttctaaataaagctatcaaaattatcaaaattctagtagagttgatgacttatattaatcttataagctaaatctaactatccttaactttctcaccctcactaccaaattttcagaccataaaacaaaaggaccacgtagttttttttaaaggtctctgccccatgttcttccgtctaaagaaccagatgacctacattctcctgaagagggttatgttcttagttatatactttcagaaatctaaagcttaatatggggtaggaagtgtgaagtagatagtccatattcaaacctgctttttaaattaagacaggagcaatctagcaccatttcattttgcattatatttagggactaccattaggctcacagtaccacagaaggtattaacgaagatattaggagactgtcatcacaaagcatcaatgtcactttttatttcaccctttaagacttagtttctagtgaaattgcttgaccagcttcattttagtctgttaaaattggctgttcttaacatgaacattttaactttaattggataaatccaacatcaggtatcaactagtgtagtaattcttttaataacatcagttttaaacaaaagtaagcctctctggcaaaacacattctttatgtatttgtatttatttatttagctcacaggccaaagtttgaagggcagagattttttttttttttcacttaaatccattgttagtgacaatgtaagtgtttaaacagtattgctttaggaatctcagaagttcaagtagaaagacatattccatattctgggaaaagacggtacaaagactttaagaatttaattttttaaaagtttcagtaactaccttcagttaccttcagttaactacctacctactcatacttttcaacaaactgggaaaaaagtcttctctaaaatcagcatctacttggcagatgtatgtcatcattgtgtctctcattgtttcatccttaaaaatgtgtaatacttttaattgcagaggtaataaaagatatttatttaaaaaaaataaagtgattatctacttctttcctgaggcacacagactttcagattttgtttatgcacgaaagcatttaaaaatgaggtaatatatatactctttcacctactttcacggtgtttacttttctatgtcaaaacatacaaagttagatcattaccttgtatgtattgctatttaaagtatcttcattggtagataaatacccagttggttccttttgttttgctatttcttatgtaaacttggtgggatttggatactagttactaaaatgagataaaatatgaatctggtttcaagacttctataagggtaaactactttaggagacagaaaaggaataggacaactctccctatcccatgacttggggtgggggtagatgagaaaaataaatggaggcgagaaggaaagaagttcaatctaagaatggagatttcatagcttggtcagacatgcatgtccatacagataaactagcagacagttaaaaaataagaaaagaaagttaagattctgaattcttgatttcttccccatatattattcagcataactagcttatatactgtcaactctccaaacaacattaaaaaacctcactcatctagcaaagctaagtttagcagactgacttcagtgaggaagaacaagaagaggaaagacagagaaggatatttacaaggttttagggttgggtgggctggaccactttaatcagcatttttcaaggtgagaacctggttagaactgacaaaatagttttggattggtaagaatgatgaaatgggaagtcctgaagcaagtctttttgggaaatcagtcttgataaataagctattttagttgtttcaccatcaagagtgagattttcctaaagcaagcatacaactatgtttgcttgttctaagttttatttagcatagaggcatggaaatattcctgccccagaattgtttatcagagtaatattatattggtgccaactctccccattttatgggattaacaaatttttaaaatttattgatcagctttaaaaatgttttagactttattatgaattgttaaaattaaatctggtactctgcaatgatatgctggagtagacaggtaaatctgaaaaataacgagagagaaagcagtaaatttacaatagttcctcaatatccatgggggattggttccaggaatcaccctcccattcccaccctaagacaccaaaatccacggatactcaaagccccttatataggagaatagtattagcatacaatgtactgcgagggtttcattcactcattcattcattttttttttttttaaactagttcttgtcctctgccaatattttgagctgatcttattcctttccttcagttggctgggtcataatctgtgttgataattctaacacagatttttgcaagtctatttatactcattctcttggagagttctcatccagtctcacaactttacttcccatctatccctgactaatccagtatacattttttctccagaactccagatacaacttaattgtcactcaagatctccacttgatgtttaatgaacgactcaaacaaaaatgctcaaaactaaactctacattctccctcaatacataaatgtaaacaatagatagatggaataaagaatacaattactttgcaaaaagactcaagaggaattagccaacaagaaatctcctgaatgctgttcagtaagattccatatgaaatattagatttacaaacaacttttggtaataaattcatgcttttagttcatgtggcattcagtatgtgggatttttaaaggttatttttaaatataagataaaaaaaccccaaatcaatccatttatacttttttagttatgtaatacaattaaaggattaatgcttgaggtaatggataccacatttgccctgatgtgattatttattgcatgccgttatcaaaatatcttgtgtacctcataaatatatatacctagtatgtatctacaaaaatttaagaaaaaaattccaaaccaaaaccacattaagggattctcctcagttaaaaatttcttcacttaattctctacttcagtccatacaatcctactaaaactgcatttcctaacaatttaagatttgctagttgctaaatttctcttcaaagcatcaacactattgatctctaaacatgatactttattgcatattataatgccatagtattctttttatctctcctcttccaaactcttatgtctcctccaataacccaggtttagcctttctacctttgttttttcttcatattgtctatgactttcattcctttattgcttcaaacaaccatttccattatatttaaaaagcagcaacggcctctctctctctttttttttttaacaatttaaaggacagatgatgcaataatgtttcattttctcacactcaaacaaaacacaaaaatgttaaatgttgaaaaaaaaaaaactggaatccagacatttgcattaaaagtcctaagtcttatactatctgtgcaacttttatctcttggtaccctagtttctccatctgcaaaaatgattaaactagctagatgacctttctaaagttttttcttctttaacattctagttcatatttttaaaactgtttacaacttatgtggctctttatggcctttattcccatatctatgactctcatacaaaaaatgaggggattctttaacttacataatattttagacaaatggtttcagaaggataggtacttgagattctgtgaaaataagtcaatgtgctcacttgttacctaaagaaagaaagcttgggccgggcacgttggctcaagcctgtaatcccagcactttgggaggctgaggcaggcagatcacgaggtcaggagatggagatcatcctggctaacacggtgaaaccctgtctctactaaaaatacaaaaaattagctgggcgtggtggcgggtgcctgtagtcccagctactcaggaggctgaggcaggagaatggcatgaacccgggaggcgaaggttgcagtgagccaagatcgcgccactgcactccagactgggcgacagtgtgagactccgtctcaaaaaaaaaaaaaaaaaaaaagaaagaaagcttggtaaacaaattttatttatagagactgtattttgaatcacctcttgatgatggccttttttactccagaacttaaagttcaattactttttaatgtaagatatcaatacacattttacttattctttcttacattattatttacaataattctcattttccccctttgtacttcctatttatataattataagcctgctttagcttttaattttgtctgctcatttgtttataattcatgtagtttggtacataggtttccattttagcatttgctaagttgtcttaatcatctgccctagtaatatggtatcctcaagctaaatcctaaccctattggtcatgtgattattttttaaggtgcgctctctctctctctcgctctctctctctacatatatacagtaagcaaatatgcttaatcagaataaaaccacaaaaatcaactttgatttatagagatcattccatttctagtcactttaatgtccaaataagacaacacaagtttacaataacaaagataaaataattaagcagggcagcagaaataaaaatttaggttaatgaatttttataaatgatcatttggaaacatattatcttgcttcacccctaactgtagtctccaaatattcaatagtgttgccaccattcattgctatgataacataccaaatatatttatgtccttatgcctggttaatacaggtttttttctctgcttgaaatatccatatgttattttctctttattcatttagatttaacttactcttttgggtccacagaaaggttatactgccccccagggcagaataaatcaccatctccttttgctttaccacagcattttgattacaatttcattacagcttgccatttattttttctcttattataattatttattttcctatccaagtccattaggctacatgctttttgaaggtaagtgctgaacatgtgttttctctggtactttctctttcccaaaatcaaacccagtactgacaatgtcttctatttttgtccattaaggtatattggtctttcatcttcctattttgactcaaatatttatagtttccaaatgtacatggtcttttaaataattatttgttttacatattgtatttacatttacacataaattgtctacatgtaaaggtccccttggaataatagcagtaaaatttaaaacttgattcctaatttgctcagttgactcactttgaacataaactatgcattacctgtcaggatgaattaagtaatattgtcgttttaagagaacttcataaaaatagtaagataggcattctttttaggattactgctaaattattctattctttaatggattattttaaacacaaagtacttaaattatttttagacaaatgactcatttgaaacctaatcattttaaacacaactaggattccagcaatattttctatgttgaataaatgtcagatcgcctcatatataaacaatattaattttaaaagtctaaaatatgtttaatattgataagacagcaacatatggatttttagaaattgctgctttaatatctctccagggagattaacttttctcagaaagaattttaattttaacactgaaaattaaaatttttgtttttaaatctataaatcattctctaaaattctgttacttgcaatggatacattgcaaaggtgccatcaaatgccttatgagttatttattatagtatcatttagtcaaatgttgtcatgaaatatgttgtaaagaatagtgtatactgctatacaagtccctcaccatccctcatcctaagggtagggatggggtggcatccctacccttatgtgtctaatccaatgtcctaatctggttatctttctctaccattattattcacttaaaaaaactaccctgccaccccaaatttagttatactatttctaccttcctcttctaagtatgtactggcaaatttaacatttagagatgtgctatagaacaaaacaaagttgggaaagataaacccataaaactaaagggtatgtttttgtattgcaaaataacatttcaaagaatgagtcaactaaaatgtttaagaaaaaatattcagtagttcaaagggaatcatttttaactactataaattagactgtaaaagaaaaatactgaatctgattcataaaaaagttacagtcaagtgtattatttgattaagtcttattgacctacaatataaaaaattcactcagtccagtaatatcagggcattttaaaggccccgttatcagttcaacataattttgaaactacaatttgtttttgttttacagctaatgtttcaatactattgtaacaatttgaacaacagaatctattttagaccttcaaggtcattgacttcttagttaaaaacaaattacaaaccaattaaacactaatttttcaatctgttttcatccagctaaatatgcaactcaaagcacttcaactatcaaccctacttgtgatgtacgtatacatttcaaagtaaaaaatcttgaactaacatcattaactggaaaattctgttctatttatttatactaacaacattttactattatttcttcagacaaaataaagttatccccatcagatgtttatccatctcatctcttgattttaatcctttctctcagttttagtctcttcccttatttccttacaaatcctggactctgtggtcactgtttattttctaaccttcaaattgtcctttgctttccatccttaaatccccaattctccttcagttcttcaatccattccttcccccaaacaacctaagaactgatggagaaaaattatacaagttgtgtagacttgttcaataaaaatataaaattggtaatttcacctctgtccctcgacatatttacctatcattaacttaccttcagttagatcctttcctaatccccttcataggctatcaaaagcttttgctactttcatcaactgtctaccccacagcccgcttaattctcagtatatgtcctgagctcatcctttatagccagttgagataattatacagatatgccacttcttgcctaccctcagatgtaacttgttactatctgaggccatatccttgcttccttctttgcaatgtacagaaggaaatatccctcattctatctaaagcattctgtcctggatattaataccatattgcgcagaattggatgatactggtctatcattcatcctttctgacatttttcttcaatctttcctgctccactagttccatcccattatccctgaagtctctcctaactaaaagaaaaaaaaaaagttcttgactccgcacatcttcttcatggaattaatttttatctctaacattaaattttttctcttttttcagccttcttctccataccttccttatcagcttgcccttaaataatgattatcctgggttccagtgtccattctcttctcactctctaccctctgagtttctcacatatacaggaactcatatgtacccctgagggattggttccaggactctgttggaaaccaaaatccacgaatgctcaagtcccttacataaaatgatgtacttatacacatcatcccacatcttttaaattatctctagattacttataacacctaatacaatgtaaatgctatgcaaatagttgttgtattgctttttgtgttttttttaaattgtttctttgttatcttttatttttcccaaattatttctgacccaaagttggctgaatccatggatctggaacccattaatatggagggctaactgtatacccaactgcttatgagacctccacctgaacatttttgagacatctcaagtcaactaatcatttttttttacaatttttctaaccttagtacttttttttttttttttccctgagacagagtcttgccctgtcgcctgggtcagagtgcagtggcacgatctcagctcactgcaacttccacctcccaggttcaaatgattctcctgcctcagcctcccaagtagctgggattacaggggtgccccaccaccctcaactagtttttgtatttttagtagagacaaagtttcgccatgttggccaggctggtctcaaactcctgacctaaggtgatccgcctgcctcggcctcccagtgtattttttatctcagctggtaacaccaaaattaatcaaagtactcagtaactagagtgtcatgctagaatcttctgtttctctcaccattgctctacaaccaatcagaaattctttcaatttacttcttaaattgctttatttcacaccctcatgaccactgtttagttcaggctttcaactctcttggattattttagatagctctccctcccctaagtgatttccatagtctggtctcaatttctcaaatccattatctatataactgctataattaacttactaaaaataaatcagatcataacttctactttcttacttcaaacacttcattacctctttagtcactttctaaagccttttatgatatgactcatgactctgccttcctccctccaacccctaaacaaaaccaatgtttcaaactctcttgaacacacgcctgtgcaatttaaggtaattgtttgtacactttattcttctgcctagaacagccttcccttgatgtgcataccagataaccttaaaatgtagctctgctatctctttcctgaaacgtttcttttttgactactactccacagtgatccccacaaggcagagttaattgcgtcttcctctggcctatccctgtaccttatacttgttcctaatactctattacattacatagttgaccctgctataaaaaaactcagaatttgtgtttttcataatggtattcatgaatgattcacgcagaaatacactatatttgacacattactttaccataaaataaaagcatgttgaaggcaagattagaaaacacttttacaaattttgaaagaataaatcaggaatccttaatcagaaatccttaataagaatactataacattcaaagaaaaaaaaatcacctaaacaactcacatagaaaaaaaaaaaagatactctaaaaatacacagaggttaagagcacagaatttttgtcagagtacacatataataattaacacaatgccttgaaaacaactgtatgtttttaaagttaactgctactataactaacactattattattaaattaaataaccagacatggatgaattaaaaattgttctaggtcataagtacttttggtcttggtactaagaactgtagattccaccaaactcctttatgtttttaaggaaaaaaaatcacttaagagtgatttcttattatactagtaaatgtgataaataaataaaataaataaaaaattacttcctaagtaattttaatggttctttctctaatgcaaatcctttcatcaacaagaaattctactgaagagatttaccaacctctacttgctaaaagtttccttcttaccacgtagtaaaacaaatgcatcaaatgattaacacagcaaaatgccaggaaattcttttcctaaaaagttgtaagttctaaaacaagctgtttttaccttcaggagcatctgcatcacatctctttggcacagaaagggttgaattgcctttatgattatcagaagttatattagtctgaaagataaaaatacagttaaaatataaaaaccgcattaataaatacatttggatttaaaaagtaatcactatgaactgtatactctgtatactaactacatctatctaacattccaaaatgtaaattttgtgcaacattgctcttagaagaaaaataattatggtaaattaaacattaaggctttttgcaataatcctttaggtcctgtgttgaacaacatggcttcttcccagaacaaacaaattccatttttaatacaaagtatagcatctgaaaggaatgctattttcagactgtggaacatgcaaagaatatcttttgtccaagcaaaagcataatcttccttcattccttcacagaaggatgtttaataagcatgacctagtgaggtaggtgaaggggatgaggcaagaagagaataaaaaggtataagaagtgagaaatatggttcaggtggttttccaggatgctgtttcccaaactcaggtcattcatgtacctccatcatgatcagtgctttatctgtttcacctacattataactaaatatttttcaatgaaatagccttttaacactcaccaatattatggatggtactgattgagggttgataggttcgttagatttttctttctaattgcatgttaaagtaaagaaagaatgaaggaagaacaggataaaaaagaaatgatctgggcacactgatttaatcatgaaagactccactaaagcaatgcttgatcaggccctgaaacataaatatggtttgaacagttaagaagtagagcaaaaggtatttttaaaaacggaaaaaaactaaacaaagtttgaatcagatatggtcagaatattttgaatcgtcagaaaatccaaacttactgttctattaaaactaaaagccacagttcgcttttgagagatcaccaccaccaataaatcagcatatgaggatacccatcatgttaaaagaatgtatagttatctacatataaaatttttataaagcctcttctaggggattcatagtgccaatgaacggacatgctgtgctcaccaaaatgttctttgggagccatattattaaaattcgttaaaacgttattttagaggaagtattttgagttttaataaagtactaaggtaaagctcagtagcttagcaccatgggacccatttaagaaactactgtaatgaaattctgtgtgctgtttcaaaaaaacaacagtatgaaacaaatataaatatgctaaaaatagaaataaaaaaccagttttagcaatattaaatataatctgatgagctaatatcttatgctaaccatcacaattaaaatttcattttaaatatcactatctttaaaatatcaaaataatcaagtttcaaatatttcacttacctctattaagtaattttggcttccatacataacatattggggagcaagactataaatcatgtagctagtgtgaaggacaataagcagaagtatcatgcagagaaaaaggagtgcttggggcctggttctacctcttctgattttatataactggaaagaaaagagtgacaaaatttcagcaatatatttcatttataaagcattaaatccttttcttgtgttatgggaaatgatttacacagttcaatcaaccattatttttcttccaaagtaaatactaaaagttcttaatcatcccaaataattttaagattattcacatggtctatttccagagaaatcttctaaacttattgtgtaacagcatctgttagaagttcatggagctaactgtgaactacctctagttctatctaaagattagaagtatgaatttaaactacaagtatcagtaatatactatggttttatataattttttataatactgcataagaatagacaatgtcatgtgtttataaacatctatttctatgaaatactcgtgacctccttatactttgctataaaaattagtttatgaaaaactctgataatcttactaaagagcttttcacatttatctatactaaagggaaatgaaaacacatggtaactgaaatataaggaaccaggtaacttgcttcatttcaatagcatagcaaatgcttttattttagcaacttaggtatcacctccctgttttattactagattgtagtacaccacaattgtactattgtagtacagactccagttctagatgggatgacaataagatcattcataaatttacatttcccaggttctttcacagccagtagtggccatgtgataaaatattaaacatgaaaaggaaagcagaagtctgttagggatttctgtaaaagtcttgttttattgatataattgtttacccctttctcctaactacctttttcttcacagaatatgaacaggataaaaggaactgcagcagccatactacaatcatgacagagatactcaaagaattacagagatattggatctgactttttgagctactgaagcaatactagattctttttttccatagcaagaaatcttttattagttcaagccactatttaactgagttctcttttacccacagctggaagtagtgtctacctgatacagcttcattttaaaattgttaatttatctcaaaataagcatttgaagaaaataaccaatgatatggtaatctttactaatagggagggctatcttttgagcttcagtgtatctattatattcgaatgtgtttctactaagaaataatataacttttggaccagggtttctcaaccatggaactattgacattttaggctaggtaagtctgccctatgcactacaggatttttaatagaatctctggcccctacccactacatgccactagcattccccaattataacaactaaaaatatctctagatattgccaaatgtttccggggggcaaaatcacccccatttaagaaccactgctctagataaaaagtacttttatgtcaacatgaagtgaaaaggctagtatttctctcacttgtggtataaagatacagctactatattctaaatctaagataatttgtaattatggagatcacacacaaaatgatgagaaaaaaataatactgtaatatatacttactctaatccaaaagaaccatatgccaatatttcgaattcctgccattgaagtaaaaataaagtacataataataattgttataagaatataatcaagagggaaaacctgaaaaaaaaagatgaaattaaatttaacatataaactataagcactctaacagtcatataaaataagctaaaaacttcattattctcatccggcaaatgtttacagtatcaaccttgatttagattaggctactgtgcttaaaaaaaaatcctcaaaaaactaacaagtaccaaactattaccaaaatttttaataccattatcttaagaaaaatactaaagcaaattaaactaaaattgcatttatctatgagataaaagacttgattaaatattaataccaaaaataatttggagaaggtcacctcatgttatataatatatcccaagtcaaattatgtataacataaaagtccaggaatatatcaatatgatatttaaagcaacatgtcagtgtgtaaattacaggcaaataaaaagtaaaactagaaaataatataagcatatgtcaaactattcataggtttttagcataataattttatgtgcaacaggatgtcagaatgtttgctagactctagcattttatactctagcagctacagtataaaatgattgatattttacttactgtttgtagtaaaggcaaaagcatattcagtggattactcaggttagctccaaaaattatgaaaccagaatctattccagctgaatgaagagctttatctaaactaaaaaaaattacaaagaatgaaatttatgttatactatcaaattttcagcaaatttagaaaaaatataatttaagcatgcaaatacacctgagtcaaagaaaacaatggataacaaattaaacctcacttaaatatctcacagctattgttcaattgatggagaataaagaaacactctattattggacgttttagccattctttgagttaatgctatagaacacttcaagtaaaaaagctacttaagatgaacagcctacactaatggcattcagcaacaaaatgtatattatcatagaatttgtataagtgctttagaaaatgtgtctactgtacttactttgacaagaagagagaaattacaaacagcaatgcaactaagatgaaaaatattccccagacgatctaaaagcaaaaatatattcattaaaatatagttctaaaagttgatattaaaagcacaaaatcattatattcaatatgagttgctagaatatgacaatgatctaacaaaaacaatctaagatacattttaacttagtatacaattccaggcatttatacctgaattttcattatgagactatttgattgagaacatgtacataaaagagacaaagcatttgaaaagtcttcactaataagtaaacaaatgaaactctttgttagaccaaatacaaagtctttattctattacactgaaatgagactgaaaagtacattatgactaacacacagacacacacacacacacacaccccaaaaccatgaaatgcaggttatattaccctgttagttaaaatagaaaatttagaacattttcccatagaagtaataatatatataaatgatatatatagtggttaaattatattacaatccataaaagcctatacaagtgatactattcctgaaacagagtactaacaacactgaaaaaattgtcaggtaaaacaatgtttctgtggaaaaaatgtcctaagcactgtaagtagtggaacatatttctcccaattgtatgaactttatattaaagatggtagaaaaagaggaagaaaaatattataactgagtctctaatgaaaagtttcagaatataaaagagttgaaatctatgttagcaaaaacctaagctctttttccccgaaatcttccccaagttgcggggacaactgggctaaagagttgtcaagaccagatccaaaaagaagagtcccagtaagcacagttaagtgtgttgggctcctcctttaactggaattgatataaatagatcaatgaatgttatgaaatcatgaatggtagggagattttttcatcttatttcacaggactgtggaagtaaattttagaatcctgagagaataaaagaagtaacacatgaaactacctagcctgaaaagatgatttttggaagtaattttggacctgtgctctggggaattcttcagttatggctgggtgcctttggggctcactgggaaggagagagttgacgagaggggtccaagaaggctatagtcatctcttgaaaagagagtgatattgcatgtactatttttcatgctaggattccgcaagagaattcattatttaaaaagggtttcattgcaaaagattttgaagtgactcctttatagtaacaactgctcattagtagagggtataaaggagttatacttttttttctactggattcaggcatctatatttggtactgtggtgaactgaaaagcaacacagacttatacttaggattctcaagtgaaaaacattccttcctaatagctgttaacaaaaaatagtttgtagcagtataactatgaaatgccaattagtagtaggagaacatgatatagaaacagcatttgaagttaagattccctctctttggtatccattttggcaaaaaaaaaaaaaaatttaaaattaaaaaaaaaaccctcttagctatcttccaaatctgtagagatgactgacccagagttagactgcttaatcagtgacttaacagaacacagaacaaatgtaaaaaatacaaatattttataaagaccaagaaaactatacatacttaaatactagaacttaaattagtagttacaaaatcatgtcagtgatgaccacattgggttgacctaaaagctacatattatactctagctataatgccaattttgaaataaaaattaaactatagaggtaacatcaataaaaatggaataagacatatgcaaaaacaatacaaagaattccactatacacttcactcatattctccaaattttaacatgttaccttatcattctcttttgaacaagtcttaattattatatatcaatttctcttgaacgaggtctttcataaccttgacattttgtagagtccagggaagttaatttgtagaatgtctctcaatttggattgcctattttctcatgattatatttagattatgcttttttccagaaatgacacagacagagaagtgttgagtccttctcaatacatcatatcaagtggcacagtcatgtctatttgccccattactgatgagcttaacttaaatcatgtagtaaggtggtttcagtcaggtttctccattgtacaattattatttccccctctgtaattaatatgttttgtggtgagatactttcagaatatgcaaaatcttgttctcaccaaacttttaatttcaagttttgtatccactgatgcctcttcccagaaacaatacgtttttttctgtggtatttgtcaaatgctggttttctaattgcttctatatttatttgttggaattctactgtagggaagaggtttcccttccccatcatttactaatgtatttacttatgtcaatatagacttatattttattcaattagttatcatctgttattatcattattttgatacctaaatggtcccagatttaggcaataggagcccctacaaactggttccttttattatacgcccactattctcttaaacacttcttactttctggcatcagatgttccaagcttattaagtgctttcccagccacagtcctagaatcagacatttctccaagcagccctggttccttttaatgaagttaggtagtggtctgtctattaattaaaacatatgcatatgcagaaatcattactttattagtactaaattaggactctattttcaatccatgggtggttgaatctgcaaatgcagaatctgcagatatagagggactgttgtaattcatctgtttttcttctccctacctcactgctttctgcttttatcttattttcttctgtgtgattccttttgttcttctgctagcttttttgggattggacatttgttttttttttttccacttttactggtaagtgtgtttcaggctattaatttctcttttttttaaatttattaaaatactgagttttatttcacatgcatatttttgtctccccaccatttccatgtctgaccaccactactactatgtcctatcataacattccatacatacttaagaccaagcaaagggtggagttccgtctttaaaaactaaacaggcattttggacaacacattattggcaatggagcctggacaacatttatcaaacatggtagggaaagttcccactctgcattataaaaaggacagccagatatcaactgctacagaaatgaagtaagacagaaaaattttaacaaattgtttaaactattttcttaaagagacttcctcaactgccagagatcttgaatagcctcctggtcagtcatccggaagcaattcttcatataattgatgaacttggcttccactttgggaagagaaccacctttttctatacttgcttgcatttttgctttaatgtcttctacagaactaggtccttttggtgttttaggagatttttcctgttttttgaaggattcttacccgtttgatcttggtattgatgatggttttgagtcttttccattctgatttggcttttgtgcatttttggctggagtatctcatatagatttcttcactggtgatttttcttcagtttccttattatcaaaatcatcattatcaccatcttcatcattatcatcatcatcatcatcttcatcagtagcaagttttacttttttctgtggaaccttgctaccacctccagggacagaccactttccagatatacttaagagtttcacatcctcctcctcttcatctactgactgcatcttcctccactgctactaaatgttgttcactaatatgcactggccctgaaccacacttcaaccgtaagaccactggtggtgttatttcaaagcccctaaggaaaattgttggctgtacagacattttcaaagttgccagtgttactttaattggactgcctttgtaatacactgcctctgcttcaacgatgtgtaattcatcttttccatcagcccctaaactgaccgttcttaaagataactagtgctcattttcatcattatccaccttaaagtgataatctttgtcagcctgtagttcacaaccaaatagatagttccagggcctccgggggtttatgtccatgtccatcaaatcttccatcaggtggcagcacacacttaggtgggagagaaggcagatggagataaacaaccacagctcaagagaacagccgcacaggacagaatcacatcagggactgatctctattttaaaggtatcccacagactctaatatgtttcaattatcattaacttttagaaattctgtaatttatttcccctttcttttcactcaaaagttgctgaatataaggttaattttcaagtgaaaagtatgttaatctattgattttgttacaatttctagttttaacgcactgcaatcagagaaaaattgtttgtaatatatctactgtttgaaacttcctgatactttcttcaggatacaattaataatacgatcaacttttgtgttccctgtacatttggagaaaaggttattttctattatctagatgtaaagtttaaaagttgtaagttataccttactgattattaggtcttctatattcttactctatttcatccacttgaaatgttttaccctgagaatgctgttattctcctattactattatatttcaatctctaccttctggaatctcccatagtttttgctttcataaaggtggctgctgtgctaactggtacatagataaccacagttattatatcttcattctaaattgtggcttttcatatttaaaagtgtgtaaattttctactgctgccaatgacacaccaccacaaacttagtggcctgaaacagcatctacttattatctcagtttctgtgggtcagctgtctgtgcacagtgcagctcagtggattctctgctcgaggtctcacaggcccaaaaccaagagtagggctatgttcccttctggagactctgggaaagaaatactttcatgctctttcagattgttggctggcattcagttccttaaggttgtagagttggagttttcctttctttgttagctatcatttgggaacatctctccgtttcttaaggctgcttgcattccttgtcacatttccccctccatcttcaaaccagtcatggcaagtcaggtcattctcgcactttgaatatctttgatgtaccctttatcacttctctctgactctaatccagaaagttctctgcttttaaaggttcatgttattagactgagcccacctgaataacccaggataatctttatatcttaaggtttataaccttaattacatctgtaaggttcctttgccacttaatgtcacaggtttcctggatgagggcatcattaggtgaagaaaaaggcactgtatctaccataaaatgtgtccttctttgttacaattggtgtattttggcttgaattctattttgtctaataggatcattgtttccttattgtttccatttgtctagtatgtctttaaacaccgtttatttttagtccttttgaactactgttttaggtgtgtctcttttaaatagcatacattggatctatcttctttctgaagaaaatacaaattttcttctaatggtgagttaggtgtattcacatttgttgatattatggacatatttagtctcaataatatcttactgttagataattttgtgtatgttatatttcctgtgttctttactccaggtacctagaataggcaaactgatggagagcaaaagagaaatcactagggaatggagaattaccgtttaataaatacattgtttccatttgaaaaagatcagaaaatgaatagtgatgatggttgcacaacattgtgaatgtacttactgctattgaatatacacctaaaaatattccaaatcatagactgaggcatatatattttaccacaataaaaaaatctaaaaaatatatgcaatataattacaaacataaatttataattttgtgtataagcataagaagtatatatagtaaaatctcaagttacatttaaaacctaatgatctagaagttacccaggccaattagctgtataagctcaaagtatactcttctgtcagggaagagtttattcaagtatttaatgaacatcagactgtaggcttagaaatgtgttcaatattatatataaaggctgttttaaagagctattaacttattctaattaggtgcttatttttataattgtcttcagcacaaaactaatctcccttcatttccatggtaggatttaagaacttcaaaaatcctacatatagaactataacagcagcagctgcaattttctgagctgtttacatcaaaaggaactgcactgcatacattatttcatttaattcccacaacaaaataaagtaagtatataattccattttaagaatgagaaaagtgaggttcaaaaagcttaagtaagaagttacagagttggtgaggagcagagcaaggactcaaacccaggattaggtgaccacaaagcctatgcttctgaaataagttatgtatatgctagggaaatgcatggcaatcacaagatcaacaggcatcttcatgggaacaaaaaaaaaaatcctctactaattttaaaaattgtaactttttttacatttgcaaaaatttaaatttaattcatttcataataagacaaacatgaattatagtagagaataaaaggtaacactggcacaaaattttgagatagaacataacttctaagaaatttaatgtcaggaacttctcaaaggtcttaaattaccttcagtatacacagagagagctgtatagaagggcaagtggacctagatccactttcttcctctagtttgacttgaatgttaatgtttaagaaacactaaatgagctgggcgtagtggctcaagcctgtaatcccagcactttgggaggctgaggcaggcagatcgcctgaggtcaggagttccagaccagcctgaccaacatggagaaaccccgtctctactaaaaatacaaaattagccaggcgtggtggcacatgtctgtaatcccagctacttaggaggctgaggcaggagaatcgcttgaacctgggaggcggagcttgcggtgagccgagattgcgccattggactccagcctgggcaacaagagcaaaactccatctcaaaaaaaaaaaaagaaaagaaacattaattgaaaatttggcttcctatttctgaattacaccaattgtagacaaacacagagataaatgaacagcaaccttcatatctcatttaaggaaaaaaagcagtgtttatctcctcataatacacattaaaccctcaattacataacgatcagtttgtacccctagagattccttcaggcatgcctattaccctattcctaacttaggatcagacatggaaagatgggtaaaaatttagatcaatattcagaaatgacacatttactaacaaaaagaataactgtactggaggtttcagccagtgaaattagaaaagtaaaaaataaaagcaattacaaatcttataaggaagaagtaaaactgtcttttagcagctgatatgatcatgtataaaagaaaacctcctaaggaagctacaatgaaggtactagaactaataatttaaccaggttgcaggatataagagtaagatacaaagacaaatttctacatactaacaacaaatattaaaaactgaaattaaacaacataatttgcaagactataaaaaatacttagaggtaaatttatcaagatatttttaagacctctactttgaacactacaaaacattcctgagagaaatttaagatgtaaataaatagatatcatgttcatggatagaatatatcaattctcccccaaatttatctataagagtgaaagtaatcccaatagatatcctagtggatgttttgtggaattataaattgattcttaaatttatatgaaaatgcaaaggatttggcaaagccaaaatgattttgaaaaaggaaaataaaactgaataatttatactacctaacttcatggcagattataaagctctattaaccaagtattagcataaagacatatatagatcaatgagtagaatggagattccagaaatagacccacacttacactacaatcaatttatttgacaaaacttccaaggaaagccaatgagcaaaggatagtcttgaaaaaaaaattatgctggaacaattggatatccacatagaaaataaaatgaaccttaacccttaagtcataccatagcacaaaagtaacttaaatggggtcatgatcccaagcataagatgtaaatctacaaaatttctagaagaaaatgtttcttaccttaggatagacaaacatttctgaggacacaaaaatatgaaccaaaaatagacatataaattaatattcatcaaaatttaagaaacatctgaattacagttaagaaaccaaaaacataaagaaaacttgccacgaactaggagacgatacaatacatatatgtgacaaagtgctagatccagactatataatgaacgcttgtatctcactcataatagaaaaccctaatttagaaaatggccaagagatttaaacacacattttacagaaaatagccaataagcatacaaaaagatgctaaatatcatttagtcaccaatgaaatgcaaagcaaaactgtgagatgctactgcatattcataagaataactcttacagacactacataagagttgacaagaatgtgaaacaatgggcaatctcttattgctgtgggaatgcaaaacggttgtaacccttttggaaaacaacttcggcagtttcttataaacatattaaacgttagatccaaaaattctactcaagtatttatccaaaagaaatgaatgaaagcacatctacacaaaggtttgtacaaaagtgttcatattagcattattcattatagtctcaaaccagaaacaacccaaatttccaccaacaagggtgagtgaataaacaaattgtgatacagacacacactgtaataccaccgaacaataaaactgaataaaccactgggcaaaaaaatagtattaaataataacatgagcaaatctcaaaaactgtgccatgccaaagaagccatcagacaaaagattgtacactctatgattccatttatttaaaattccagaacacataaaactgacctctaatgatagaaaggacatcaataattacctaaagtctgagctcaggggagcaagagagggcatgaggtagatttttcgagtgatgtggatgccctatctatctatattgggcaaaaccagtctgtacacttagtaaagttgatttgaaaatccttctaaacatatgtttggtgaaatggaacatagcatatataaaagaaggcagctgatgttagagaccagattataaatatttataaaaacctaaaaacaatttaggattaaaataaagctggagagagtttcatcatactttcagtgctatgaagacaaatcaccttggggtaaaaaaaactgggatgaattttttaaaaatttattctaacagaagatttaaaaagtgattatatagaaaaattaactgattatggtatatttttaaaaatctctttcaaaccaggcgctttttagggtgagcagttagtgcatttctttctaattataaaaggtggagaaagcagcacccaaattgaacctgactgactcatctttgaatggttctttgaaccatttctttttcttttttttaacatttaagttcacgggtacaaatgcaggtttgctacataggtaaacttgcgtcatgggggttgttgtacagattatttcatcacccaggtactaagcaaggaacccattagttattctacccgatcctctccttcctcccaccctccaccctctgaaaggccccagagtgtgttgttcccctctgtctgtccatgttgaaccacttcttttaaaatttagcacaaacccactttccagcttcattctgcctaacttcaagttagtccactgactgaattttctgaattacaacttgtgtgctattgtatacaaaggtctggtgtttgaaatgcttccagatatacaatgagcatatttggaagtctgtggccaacagtttttgttactttttagtctcagccatattaaagtgatcttaattcattctaggtaattaggtttaagtaccatagtcccaagaattcaaggctggcaaacaatggtttccaaaaaaagaaaataataattttccatgtcaaataatatctttaacatactttcagaaacataatctaacaatgaggcaaattctattactgtcagagttcctatgttttttttttttaaagtcattttgtttctcacagttttaacaacccatacaaatagataaattcataaagaaaatgtcacacatacataattggaacattattcagccttttaaaaaataagagaatcctcttatttgtgacaacatggatgtgcctgaaagacattatgctaagtgaaataagtcaggcacagaaagacactgcacaattcttatgtgagacacctgaaataggaaaaagtatagatatagaaattagaatagtagttaccagggaatgcagaaaagagagaaaaagagttgtcatctaaggggaggcagttacacaagatgaataagttccagaggtctgccatgagagggcctacagtcaacaataatatgtggtacatataaaatcttagaaagaatggatctcattttaaatgttaacaaatcaacaacagcaacaaaggaaaacatagaaagttttggaggtgatggatatgcccattacccagaatgtggtgatagcaacataaatgaatatgtatatttaaactcaccaaattgcattaattaactatgtgcagttttaaaagaaacaattgcatctccataaaagtgggaggaaacaccagtatggtaaagcatgaaaacaaaaatgtacaccaatagaaaagaatagagagcctagaaataaatccacaaacctagtcaatttatttttgataagcgtaccatgaatacatactaaggaaaggatagtcaatccaacatagtgctggaaaaaatgaacacgccaacagaatgaaactaggcccttattttacaccatacacaaaaaccaaatcaaaatagactaaacacttaacataagacctgaatctgtaaatctactaggagaaagcataggctcctaagctctaagtcccagatcaatttataggaaagtataaacttgaagaatatgctagcagcatattgcaatacttatctatatttttattttaatttcccaacaattgttgtaatacattgctcagaaaggttatgcaccttacccaaactaccaaagagagctgtgatttaaaaccagattaaacccccaaatccattttaagtaccatgctgtaatgcctcaaaaggagagctcaatctctccaagaggtactacataaacttggggaagagtgacagcataatttttaaaaacttcatttaccttcaggggacgcagagcgccacaaaattttgtccaccagctgttttcaatgaattctaaatgcctctctctcttcttaagtgttcgtaacctttcttcaaattgttttaaggcgcgtttatcccttgctggcaaaggtcgaccatctttgctctgcaaataacagaacaaaataaaagttttaccattaacatcttaataaagtacccagcagatttagcagatcaggcaacaaaaccttttcaggatggacactctttaggcaaatttacaaactaaaaaaaacctgacaactgcaatatgacaataaacataggataaccaaggtcagcataaaaatgtggatgtgtgtacatttatgcctaccttcctcttgatcccaatacatggtagagttatgtggagagagataaccatttgtaaaaacattccacaaaaagtatgtttgataagaagtgttaactactatgtactttgctcaatgattctccctcctctccaaactcactgtatcacttatttcaatatatttggctctgccccttccctctctttagtcaagtggttatgttacctgaactgatgcttctcagcccaattcaaatgctagcagaatgaagcaacacaagcacagatggcatacagaggtttttgtaacaattgctaagaactgatacttccttgttttccaagtactttggcaaatgagtcaagctttctttggccaacctatctgacagataatttccatctatttttacgcgacactttctgtaaccatgagcagtacctttctcatcatatctcatagatacactttcccactgaactctcctgctcctatcttcaattgggtacaaaaataaaacaactactaaatacagaaaaggtaaaatataaaattgtttttatcagcaggaacaagaaaaatatttgtataggattacatttttaaagtgtagatatattaggtatcagaatgtctttaatattcctattaaggtttaaataggttcctagcagatacacaacatattgctcttcccatgtatcctagtgcagcctcaatttgaaatcataactataatgcagagaaaacctatgtaacctttaataaagagatttacacagttacaacaatctctttacatatcggcatcactatgatcttctggaaccaatcatcctctcccacgacttatcttgttgcttgtcaaacttcatgcataagaatcacttggaaagtttgttaaatacatatatctaggccctatccccagaggatatgattttgtaggtcttgggtggagcctagaatttgaatttctaccaaatttccaggagatgcagatgctactagtccagagaccacacattacatactacagactatattccattcctctaagtacattgggtattatcactggatcccagaaaacgaaaactaagagggattttctgaagatcagagtaataaaatgaacactcccttctggaagataaatccaggtaacaatacttcaagtgtgtggtatgagaaggattcggcactttatatcttaaccataacaatttcccctaaaatttccattatcgtatcaaaaggatactacaaatgaggtaattttgtctcaatgctggcgttcactattttagaaaaaaaaatagtaaactgattaaaggatccacttgaaacaaacccaagttatctgcctacttggtgaatgcttcagtggaatgagggatgaatttccattctgcattgccaattgactaaacgaatataagaataattttgatcagagaaacaaatactaagatgtaaactcagcagtgaacatctacctcatttgaaagaaaaaatgtagttatacaggttaaaatgtagttaaagggaataacaaacccctggttaagaaaaaaagtaaaacatgaaagcttcccttcacactgtctgtctccaattaccatattaccattcccctttcctatggtttttactgttaagcagttaaatatccttcaacaaattttctatttacacacacacacacacgtacacatatacaaatgtatttacgatgtcttattatatgtgtaatttttcctgatcttctccctccttccaccctctgccctccagtgggccctagtatgcactgttcccctctatgtgtccatgtgttctcatcacttagcttccatttgtgagaacatgcagtattagattttctgttcatgtgttagtttgctaaggataatggcctccagctccctccatgtccctgcaagggacatgatctcattttttatggctacatactattccatggtgtatatgtaacacattttctttatgcagtctaccattgatgagcatttaggttgattccatgtctttgctattgtgaatagtgctgcagtgaacatttgtgtgcatgtgtctttatcgcagaatgctttatattcctctgggtatataccctctaataggattgctggggttggatggtagtcctacttttagttctttgtggaatcaccatactactttccacaatggttgaactaatttgcacttctaccaacagtgtttaagccttctcttttctcagcaaccttgctggcatctgttattttttgactttttaataacagccattctgactggtatgagatggtatctcattgtggtttttatttgcatttctctaatggtcagtgatgttgagcttttttcatatgattttttggccacatgtatgtctccttttgagaagtgtcttgagcacctttcttgtgcataaaactggtcttctctttttatatttatttttcataaatcttctgaataactctttgaggctgataatagtattatattcatttattaaatgagaaaaaaaggcctacagatgttatgtgcacaatcagtagagctagattttgaactgagatagtctgattttacatgacataattcttcaagctacatatagatttataaatatatctcattccttttcatcattgcacattacaagatggtatctagatttaacaacttattttgaacatgcagattatttcttttttaaatttttgttgagggccattaacaatgtgccataaacattcttacatacctgggtacaaacatatacatacaattcagcaggataatttcctagaggtaaactgttagattaaactttaattattaaataaatatttaattattaattaattttaaatattaaaatacatatgtatttatatgtacaggcacatgtcacaacattcaattttctttaaaaagttgtatattttatatactcacaaacagtctatctaatccccaaattctgataaaaatttgacacagatgaaaatttaaaagaggtccaaagaatttttaaaaaatatattgagttgttctcgacatatattattattttacagtttgtggctattgtgaatgggattattttgtattacatcttccaactaattaatgatttttatgtttacatctaggcactgtgataaactcttattagttctactagtttgtcagttgattattttagattatcatggtagatgatatttgccaacaaaaaagttattttcctttttccccctcctctccatgcttatatgtaaattctaaattatttcttatctgactcacattgccagatatatgctaaaagtaacaaggatactaacattactcctatatttgacgttaatgggaatgtttctattctttcactattaagtattatgctcattagaggcttcctttccatattttcttatctttattttgaaaagactttttaaaaaaatgtaactacaaattaacttttagcaaatactctgacatctactaagatgtttatatttcacatttaatctcaatatattaaactactttaatgtattttctgatgtatcatgtttgcatttctgagataaacctaatctgatgattatgaaatattctcttattatagcacaggttttgaattgctactttttgtttgtttgtttgtttttaaacagggtcttgctccatcatccagataggctggagtgcagcggcacgatcatggatcactgcagccgcaacttcctgggctcaagtgatcgtcccaactcagtctcccaagtagttgggactataggcatgccagtacacctagctaagtttttgtattttttttgtagagatggggttttgccatattgcccaagctggtaccaaaatcctaagctcaagcaatctgggactacaggtgtgagccaccagtacgtacctagccacttatattttatttgtattaaaatatttgcttctactttcataagaaagccggtatatggttttcttttttgtgtgctgttattgtctggtttatttatcagaatcatactagcttaggagaaaaatttagaggacttgctatttttttaccatgatctttgagtaagatttatctgttacttgaagacgacagaggaagaaaaactttttacagtatttttagaagtacatttaattggcaaggggttacatgtaatctttagcttattcaactagtaaataaaacttgaacataaatattatagtaaaatataatattataaacgacgatacctgagaactagtaagttcttgatcatacataagaaaaacttctgttttttaagtgttagaacaatgatagaaattctcaaattgctagtgtcctacattacacagaagacaaatttttaaaaatatagacatggttttgtaagggtactgtattagtccattcttatgctgctataaagaactactcgagactgggtactttataaaggaaagaggtttgattgactcacagttccgcagggctgcgaggcctcaggaaacttacaatcatagcagaagggtaagcaaacacgtccttcttcatgtggcggcaggaaggagaagtgccaaagggggaaagcctccttataaagccatcaaacctcatgagaactcactcactatcatgagaacaccatgagggtaactgcccccatgactcaattacctcccactgggtccctcccacaacacgggggattattggaactacaattcaagataagatttaagtgaggacacagtcaaactgtaccagatatgctgcaaaaaattcaaacaatgtaaaaagttatggggttgacaatgtctaagtcatatcagaaagcagctctaagacaaagtagttttatgcttcccaattacaccaaaacatcaactcacttttgatttaatcgtttgaatgtgttgttctacttcttcaatgtcttcagtgttttccaaacgttcataagcagcgcttctagtgccttttatcagatttaaaggtaacgcagacatgccataggcctaaaagaaaaacaattgaaatgttttagaaataatgtttcaaacatattatacacaattttaggttaaaaatgtcttttaaagtcataagagtcagcagttgtgaaagagtacagtcactgaaaacatggtatatgggagtgaacattatattgtctcataattctcccgtttattttgcattaaacagagtcaaatttataatactattcctcaaaggttaagttgcaaatttactgtaaatttactgtacaatactttatatcaaagtaataattacaaattcagactaatcgaaggttaagatactataaattagtaaaaaaatttaaaaaaatgattttctataaaaaacaattttctccaagtatatatagtaaacctttggtaaaataagtattttaatatatacatgttatttgattagcatatcaattatctacattataaagtttatttaaaagttctaaatatttataaccaatctttttgctaagtattttaaatattttccaagtaattttaacttattaatcagcattaagaataaacatgttattatatatactacccaatttcatattccagtcccaaatgacagctttttaatataatcattaataatacttaatggcatctgctacataaccattattcagaatcattactgaccatatttccttagcagaaacactgacaactatcacctcctggtggcagcaacaaactctgaagtggatactacattatgtacttaaatgtttttcactttccttctggcacactttaccccgtgccccctgttagatgggccatgagattgagttcaggacaatgaatgtgagcagaagtgataaatgccacgttttaggcatgaccccaaacaccaaaataccctgggtgatcctgaatgctttttctcatgctctctgctacctagctgtcaactccaagaatgacttaagatacctttagtgttaattttaattagtttaatattctaatattcttcactaaatctcttttatgcaatgattaaacattgcttaaaccacaattcaaatagcaaagcataaattctaacaaatcagctttttttttaattaagggagaagaacaaaaaacatgaataaaaattatcctgaaatcaactagttctatcatgtaatatcaactctacagtacgttgtatttagatacttacctagctgaaattattacccaatatccaaatccttgtatttccaaaggagaaacacttaaaaaaccttgcactttaaatattattaaaacataagttagtattctcattatttcccttttatcccaaaaaaggacggggtggaagaagattctgttactattagatgaaaatgtaatttggataccatacactttaagtatccctcatcttaaatggctgggactagaagtgttttggatttcagaattttttggacttttggtatatttggtatatttggtatattttggtatatttggtatattttttggacttttggtatatttggtatattgagcatccctaatctgaaaatccaacatctgaaatgctccaagagagatgaaacaagatggtggaatagaagcctacaccattcatcttcctcactggaaaaccacattttaatatctacacacagaaaagtactgtcacaagaaccaaaaatccagtaagcaatcacagtacctggttttaacttcatattactaaaagaggcattgaggaggtcaggagagacagtcttgaatcaccaatgccacccctccgccatcccccagcggcagccatgaggcaccatggaaagagaatcttttcgctttcaggagggacagcacagtggtgactaaggggactttacactgaactcagtgctgtcctatcaccgttgacaatagagccatactgggctcagctagtgcccatgcatagaaggaacatttgcaccaacaccagccagaggggaatcactcatcccagtggttggaactggagtttctcagcaagccttgccactgtgggcaaaatgctctggaatcctaggtaaactcaaaaggcagtctaggaaacaaggactgcaattcctaggcaactcctagtgctaggctgggcttacagtggactagggtggcatgtgacccagggagacaacagctaagggagtgcttgcaccattcctctcccaaccccatgaagtgcagctcacctcaacaaaggtgactctttcctttggcctgaggaaaggagagggaagagtaaagagaactttgttttgcgtcttggataccagcatggccacaacaggatactgtgccagagtcgtcaggcccccattccagggcctagctcacagatgacatttctagacacaccttggaccaaaagtggatctgctgccttgaagggtagtcaggattgattacctgctgactaaagagcccctggtccctcaataaccagcagtgttatctaccaagcacattgtgggccttggactctgggacatgctggcttcaggggtgatccagcacattcccagctatggtggctgtggtaaaagactccttctgtctgagaaaagtaaaggggactttgtcttgcacctcaggtaccagctcagccacagtaaggcagagcaacaagcagactcttgaggtccccaagtcaaggtctagactcttagaggacagcatttttagacatgccctgtccagaagggagcccattgccctgcaggctgagtctcaggcctggcagcattcaccacaagctgtcagaagagcccttgggctttaagtgaacattagcagtggcctggtggaaccccatggaacagtgtcgatggtggccacagggagagactcctctgcctgtggaaaggggagggaagagcaagtaggactttgtattgtggtggtgtgaatgtcagcttagccacagatcatcaggtaaactgctaaggtttttactccaattcctggctcccagacagcatctcagtagaaaccttacaggccagcaaagaacagcatgacatacttaaagtgctgaagatagaaaaattttaccctagaatagtatatccagtgaaaatatccttcaagtatgaaagataaagatcttcccagagaaacaaaagctaagagacttcattaacaccagacctgccctgcaagaaatggctaaagggagttcttcaatctgaaacaaaaggatattaatgagcaagaggaaatcatgtgaaggtacaaaattcactggaacagtaagcacacagaaaaacaaagaatagtataacactacaatggtggtgtgtaactagtcttgtcttaagtagaaaactaaatgatgaaccaatcaaaaaaaaaaaaaacttttcaagacacaggcagtacaatgagacgtaaagagaaacaacaaaaagtttaaaagcaggaggataaagttaaaatgtcacgcttctatttgttttctttttgtgtgtttgtatatgtagtcagtgttaagttgtcatcagtttaaaataatgggttataaaatagcatacgcaagccttgtggtaacctcaaattaaataacatacaacgaatacttaaaaacataaaggcaagacattaaagcataccaccagacaaaatcaccttcactaaaaggaagacaagaaagaaggaaagaagggaggatcgtaaaataaccagaatataaataacaaaatggcagaagtccttacgtatcagtaacaacactgaatgtaaatggactaaactctccaatcaaaagacatagactgattgaatggataagaaatccaagacccattgatctgttgcctacaagaaatacatttcacctacaaagacatacagactggaatggaaaaagatattccatgccaatggcaacaaaaaaagaacaaaagtaactatgtttatattggggaacatagatttcaaggcaaaaaactgtatgaaaagacaaagaagatcattatatagtgataagggggtcaattcagcaagaggatataacaattataaatgcacccaacactggagcacccagatatataaagcaaatattattagagttagagagacagaccccaatacattaacaatggagacttcaacaccccaatttcagtactggacagatctctcagacagaaaatcagcaaagaaacatcagacttaacctgcactacaaaataaatggacctaatagacatttaaagaacatttcatccagtgtctgtggaatacatattcttttccttagcacatggatcattcccaaggataaaccatatgttaggttataaaacaaatcttaacacattcacaaaaattgaaataatatcaagcatcttctctgaccacaatggaacaaagctacaaatcagtaacaaaaggaatttagagaactatacaaacacatggaaattaaacaatatgctcctaaatgaccagtgggtcaatgaagaaattaaaaaagaaattgaaagagttctggaaacaaatgataatggaaatacaacataccaaaacctacaggatacagcgaaagtagcagtaagagggaaaattacagctctaagtgcctaaatcaaaaaagaagaaaaacttcaaacaaatactgtaatgacgcattttaaagaaatgaaaaataaagaaaaaaccatacccaaaattaggagaaggaaagaaataaagatcagagcagaaataaatgaatttggaataaaacaataaaaaagatagatgaaacaaaaagttggttttttaaaaagaaaaaattgacaaacctttagccagactaagaaaaagacagaacccaaataaataaaataaaagatgaaaatggaaacattacaactgataccacagaaattcaaaggatcattagtggctactatgaacaactaattatatgccaacaaattggaaaatataaaagaaatggataaattcatagacacatacaacctaccaaacttgaaccatgaagaaatccaaatcctgaacagaccagtaataagtaacgagtaacaagatcaaaactgtaattaaaagcctcccaataaaggaaagcccaggacctactgctgatccactgccgaattctatcaaacatttaatgaagaactaatatcagtcctactcaaactgctccaaaatacggaggaggaggaaatagttctagtttcattctataagaccctgataccaaaaccaaagacacatttaaaaaaaaaaaaaaaaacactacaggccaatattcatgaatattcatacaaaaacccctaccatatattagcaaaccaaattcaacatcagaaagatcattcattatgaccaagtgggatttatccctgagatgcaagggatggttcatttgatttgtatttgttgaaccatcccttgcacctcagggataaatcccacttggtcataatgaatgatctttctaatcaatcgttgtaatacatcatatcaagagaatgaaggatgaaaaccacatgatcatttcaattgatgctgaaaaagcatttgataatgttcaacatcctttcaagataaaaaccctcaaaaaactgagtatagaaggaatatacctcaatgtaataaaagccatatatgtgaggtccacagctagtatcacattgaatggtgaaaaactgaaagcctttcttcttagttctggagcaagacaaggatgctcactttcaacactgctattcaacatgaaagtcctagctggggcaatcagacaagacaaagaaagaaagggcatataaactggaaaggaaaaagtcaaactacctttgtttgcaatgatataattttatatttggaaaaacttaaagactccaccaaaaaactattataactgacaagcaaattcagtaaagttgcaggatacaaaatcaacatacaaaaaatcagtagcatttctatatgccaacagtgaacaatcagaaaaataaatttaaaaaagtaagcccatttacaatagccccaaataaaattaaataactaggaattaacttaaccaaaaaagtgaaagatcactgcaatgaaaactataaaatactgatgaatgaggaagacaccaaaaaaatgaagaaatattccatgttcatggattggaagagtcaatattgttaaaatgtccatactactcaaagcaacctacagattcaatgcaatccctatcgaaatagcaatgacaatcttcacacacacacacacacacacacacacacacacacacaaaacacacacctaaagtgtatacagaatcccaaagacccagaataccaaagctatcctgagcaaaaagaacaaaactggaggaatcatattacctgactttaaattctattacagagctatagtaactaaaacagcatggtactggcataaaaacagacacacggaccaatggaacagaatagagaacccacaaacaaatctacacacctatggtaaactcattcttgacaaaggtgccaagaacatgcattgaggaaaagacggcttcttcaataaacagtgccagggaaactggatatccatatgtagaagaatgaatctagacccctatctcttgccacatacaaaaatcaaatcaaaatgaattgaagacctaagatcaaagacctcatactatgaaacgacttcaagaaaacattggagaaattctccaggacattggtctggataaagcttcttaagtaataccttagaagtacaggcaaccaaagcaaaaaatgacaaatgggattacatcaagctaaaaagcttctgcacagtaaagggaacagtcaacacaattaggagacaaggcacagaatgggagaaaatatttgcaaactaccatatgacaagtgattaataaccaaaatatataaggagctcaaacaactctacagaaaaaagcctaataaccatattaaaaagtgggccaaagattggtataaacatttcttaaaatagacatacaaatgacagacaaatgaaaaggtgctcaacatcactgatcatcggagaaatgcaaatcaaaactgagattatcatttcactctgattaaaagggcttttatctaaaagtcaggcaacaacaaatgctggtgaagatgtggagaaaagggaacccttgtacactgttggtgggaatgtaaattagtacaaccactacagagaatagtttggaggttcctcaaaaaactaaaaatagagctactatatgatctagcaatcccactatttggcacatactcaaaagaaaggagatccatatatcaaagagatatctgcactcccatgtttgttgcagcactgtttacaacagccaagatttggaaacaacctaagtgtccatcaacagatgaatggataaagaaaatgtggtacatatatacaatggagtactattcagccataagaagagtaagattctgtcatttgcaacagcatggatagaactggaggtcattatgctaagtgaaataaactaggcacagaaagacaaacatcacatgttctgacttatttgtaggatctaaaaatcaaaacaattgaactcgtggaaacagagaattgaaggatggttactagaggctgggaagggtagtgaggcagtgggaggcaggtaaggatggttactaggtacaaaaaaaaaaaaaaaatgagtaagacccagtatttgaaagcacaacaggtgaactatagtcaataataatttcgttgtacattttaaaataactggctgggcaaggtggcacatgcctgtaatcccaacactttgggaggctgaggcgagtggatcacttgaggttaggagtttgagaacagcctggtcaacatggtgaaatcccatctctactaaaaatgcaaaaaatgagccgggtgtggtggcaagcacctgttgtcccagctactcgggaggctgaggcaggagacggaatttcttgaacccgggtagtggaggttgcagggagttgagatcgcgccactgcactccagcctggtaacagagtgaaactctgtctcaaaagtaaataattaaattaaattaagtaactaaaagaatataattggactgtttgtaacacaaagtatataaatgcttgacagaagagataccgaatttgccatgatgtgattattatgcattgcatgcctataccaaaatatgtactccatctatacagctactacgtacccacgaaaattaaaaataatttttaaaagtgttccaaggaacatttcttttgagctcaaagtttcaaattttgaaagctttcagattttggattttcagattagggagggatactcaacctgtagagtaatttccctctaattacctcaatttttatcaaatgtatactttcaaaatgtatactttggtgaaatataaaaggaaaaatatataattgggtttaaaatgtatattgtaaagttgaaaagttacctactgggtacaacattcacaatttgggtgatggctacactaaaagcctagacttcaccacaatgcaatatatgcatgtcagaaaactgcacttgcaccctctaaatatattttttaaaattaaaagcatctcgtttatatttttaatattaaattatatatcctcaaaacattgaaaaatacaaagaataaagcctatgggaactaaagtacctgatagttcctttaacatttccttataggattttcctatccttattatcattttaacctatttaatttggttattctagtacttccatattctttaaacattattgataaaaagtaacagaataatttaagactctgattaatatatagtattatatgattatttaccaattctcattactcattgtattagtccgttctcacattgctataaagaactacctgagactgggtaatttataaagaaaagaggtttaattggctcacgattccaccaactgtacaggaagcatggttagggacacctcaggaaacttataattgtcgcagaaggcaagggggaagccagcacgttatatgttgctggagcaggaagaagagagtgaagtgggaggtgctacagatttttaaacacccagatctcgtgagaactctatcccaagacagtactacgaggatggtgctaaaccattagacactaccccgatgatccaatcacttcccaccaggccacaccgccgacactcgggatcacaattcaacatgagatttgggtagagacagacagccaaaccacatcattcatattattttcataatccaaaagaatgttgctttttacaacaaaatgccatggcaatattttgctaagcccagcttatatgcaggtatgtttccctgtcccctcaaccacctccaatctaggcctatttgtcctcaatgcttgttattctgtgttggatggattaggttccctgaatgcactaactgcagtactcgatactgtttcccaaggaaccttttgctctagtcagtattaacaacatggcccttatttacagtctactgtcaaacacaaggccttctgaattatcctaaactggtctgctggtctcaatttctacaaatccatcttctacactgtttctaaagtgatctcactctaatacccaagtcaatatatgtcattcctctaattaacatcctttaagattctacaggactaataaatgtatttttcaaagcattctggtatgagttcctaggaatctggaaaggtgccactagggccactacagaagataaggcagctagccatgcaggaatctgctgctactttaaccagagcaattctacttgttcccaacctctatatgtatatgaacatataaaattgttttaaaaagttgttttgctattttttttttatgaaaggtacaattattggttggtattgggaaaagactctaattaatgtaattctacatataaagcacttcatgacctgatccctaccaacttgttaactttatctcatgcttctgaattgttcatagttcttaaaacactacaattttatgctactttaggctttgtccaacatacacattttattccatgtagtgccctcatctagaatgcccaccttctcatcttatttcattaacaactgttaatgcccttcaggtctcggtttaattacaatacgtctgagaaaccttccctgacttgtaaatgtcccttgcttataactcaattataacgcataggtatattaacattattcatctgcacatttgttttatcactagatctgccaaacttggctgaacagatttctaggccagactaataacaactacagtagactatctggtatgtaatgactaagtcccaattctttttcctcctacctttgtttcaagaacaaacatttattattaaattaataaaataatttctccaagaagataataattgaccaataagcttttaggaagagacagctcttaattcacacaaagttatttccttaaatggaattgatatacttattagaagagctgaactgaatttctaaatagcttaatttaaaatattttataaaataaaaaagtttctggtaacaacttgcggtaacataagaccagaacaaaacactatttttaaatttttaattgtccgaagacaacgtagaagaaaggtgccatcgtttggttaccaagcttttagcttgtttttggactgcattttcaataattatcaggaaatttaactacaatatttagattatgataagcttgacatagaccttatataaaacattataacttttaaggtctttaaacaacaatcttttgaacttcacgaacttcacttcagactttttttttaatgtacaaaaaggctatccttttcagaaacacaaaacttttattacttactactgccctctagtgaatttccagaaaaaaaaatcagaaaactaaagagattgtatagtttaaaatgcttctattaataggttggccctaattgtctccaaatttattttgacttccaagaataaatcaccaactgtatttgaaaactaaaatgttttaaaataatatatacaaactacattcctaataacttcttttaccgctcagtttagaagggcacgttttctttacatatctctctcctttatctggaatgctggtttccaactctgcaggccttagattattgtaaagggtcaacactaaatactacctgtagacttaataaatgtcttccacatatttgtgaaatctattattcaaagatgtacatgttattatgattaatgaaacaacacaggtactcaagactttccttttaagtattcactgagtctaagacgtatatattttcttacatttaatatcagtgaaatttggatgcatctaaaaattgaaggcatcatataattgaaggctaggcagaagccatgacatagttgtcgctacatgcacattcacaaatttggtcacagcaagttacattacagtcacttcagttgaattacatgcattcttggtacaattattgagtttaattgccacttatgtcttaaaagataatatgatttgacattaaagcaaaaagttaatgtgtaagtcaggagaaagagaatgaagatgcatcggtagtaaagaaaatattcattagaataatgggcataattctgtattttcttaaaaagcaacagtcaagtgcttcataagcttaagaaaggaagatatccaaaagagaagcatttttctgcttaggtatatgcaaaaggattcccttctatatggcaagacaagaaacaacagcaaaacatcttaaatttacaggataggtgtgttggcagcttcgaagaaaatcccagagataagaatagaacacacaagaaaagctgcacatcaattctcttgatagcataaaagacaatacacttttttagcttctgtgtatgagcgaaaacatgtgaaacttgtctttctgagtccagcttatttcacctaacacagtgactacaactaatgactaaaagagtagaggccgttaagggtagggagtagggaggggagatgaagagaggcttgattaatgggtacaaaagtacagttaaatagacaaaatacaacctagtgttcaatagatcagtagggtgactacagtcaacaataatctattgtatatttccaaatagctagaagagaataattcagatattcctggcataaagataaatgtttaaggtgatggatattccaattaccctgatttgatcattacacattatatgaacacctcagactatcacatgtacctggaaaatgtgtatacctattatgtatcaataaaaataaaagacaatacagttggttcccatgtcacaatggttcaacttaggattttcatactttgtgatggtatgagaccattcttttttactttcagtacagtagtcaataaattacataagaaaatatttgatattttattgtaaaataggcttggtgttagataattttgtgcaactgtaagctaatgtaagtgttctgagcaagtttaagataagctaaactaagctattatgttcagataggctaaactaagctatgatattcagtagtttaggtgtattaaatgcattttcaaactgaaaatattttcaacttacgatggatttaacagaatgtaactccactgtaagtcaaaaaccatctgtgtcgtatagtaaaacatgaacatcaataaccaattcaaaaagtgatatagaattctcacactccaaatataaagttttaggaacgcctttcatttcatattttccttgttatgaatgcagacaaatccaacaaatctcactcactaaatataaaacaaagattataaatgattaagaaaaacttgtcagatttttccttatagtgacacataaagtaacggtgcaccttacaatcggtagcatatattcagtgaaatatgctatcacataggctgagaaatttgacttttaaagggaatttctttctctaaatattattgagaaccactgctgtgattcataaggtgttgtaacatgaactgaatgtttgttttcccctaaaattcgtatgttgaaatctaatccccagtgtgatatttgtaggtggagttttcaagagataactgagtcatgagggtgaatcccttataaataagattaatgcccttataagaagggtcacaatagagcttgcttcctctctctccctgctctttatcatatgagcatagaatgagaagacagccaactgcaaatcaaggaagagggccctcaccagacaccagacaccttgatgttgtacttcccagtctctagaaccatgagaaataaatgtttgttgtttgagccacccagtctatggtacatctgttatactgacctgaactaagacatggaggcaaaccaacatttgatgggtacaagaagaaaatattaaatgttttatttctatatttgaatctttatcactttaatgttctttaacctattagtttatattttacattaaatgtacaaagattagcataataatatgtaaatatgtatttataatcataaatatcctggtggacatatttaaagttttatggatagaggtatatagtaaacaatttagcagtcactgcttctataggcagttcactggtccatacgatacattttgctgaagacatcattattcaacatttccccacttggtggcaccaaaaaattagaatatctacatatatatccgtgcctgttaagttttacttttttaaatttagtaagtatcaattccctttcaatgtaagcttaaaataataggcaaactaatatgctgtttgacctccttctcctaaagctcactgtccaattatttggcattgattaatacagggtacagtagtcagaatcagtaaaatttaaataatcaactagtttcaaaaataaacaataatacataactaagaaattcacacttgactgacacataagataaaaaaatttctctagcctcaatacaaaaaaaaaattcagttacaaattccataacaaacatgatttttacatttcatattatatttagggtcaaagtactcaagtattaatttcccactctgggtactttaattaagattaaacctattctagtcctcatgcatattttctataccctctttcaaggtgccacaaggaaagtccagttctcaaccttttccaaggtaagttaggagaaaactttgtatcccaactacaagcaaatatgataattatactatttaactacctatctacaataaaaccacatatctataaattgttggttttcactgaatttttactaaaatttcggtaagtattattggctcatttttacagatggggaagcttgggatcaggtaatagattttaaacaaactcaacattcatgaccagagctcagctatacacaccatgatgcccctcttgaacagggtatcatctaccttcctcttcccctccctctatacaccacaggtattaaaactggccaaatcatggcttggcagcaaaacctgagctttgagtacttgtagtgctattcgaatgatattatctctctatccacactcccccaaccccaactaaccaccattcaattatgaatgcctttttgacttacctttgaataagaaacattctcactgatcatgatacaactgctttttgcatttggtttattttcactgagagaggaaagaggtgggaactatagtttgaaccatatgaaactgtgaatattcaactgtttaagctaatagtgactattaagtggccagtagattccaagacttggtggattatttaattaaatcctcactactttattacttaaatatcataccactataaagatgaagaaatttagatgggaaagtaggtcaggaggcccatggacttgagatccacatttcagcctctccacaccaattattataattttattgtttatgctgcttaaagaaaaccaataactgctaggaagttggatcttagtgggctgttacatcggaatctctcccttggccttaggccttaagtggcccctctctacctatttagcaactcttctatgtgttcctggttcccaccctcaatcccattataaggtcctctggttgttttatcaatatccttcagcccagccctctatacagtaaatcatcacataacgtcatcaatggattcttggaaactgggactttaagtgaaaggatgtataacaaaaccaatttttttttttttttgagacggagtcttgctcttgtctcccaggctggagtgaaatggcgcaatctcggctcactgcaacctctgcctgccgaattcaagcgattctcctgcctcagtctcccgagtacctgcgattacaggagcccaccactaagcccggctaatttttgtattttcagtagagatggggttttaccatgttagccaggctggtctcaaactcctgacctcaggtgacccgcccacctcggtctccgaaagggctgggattacaggcgtgagccattgtgcctggcaacaaaaccaattttactacagactaattgacgtaaacaaaagctaacttcctattgcatatttctggtcacaagaacatcaccaaacttctaaataaagattcaaagcacttctaatattaaatactgaaataaatgtaagctctacatacatttaggaaagattaataaaaacaaaatactcaacttttggtgaattagtgagtgacgatggttgtggtcatagtgggttaaattaaggaataaatgtttgcaaagtgaaaattataaagagctcctcctaccaccacacagttcaaaaacaaaaacaaagaaacaacagtgttgggctagctgaacgcttttgtattgcaattattgttatgcacttgtatgtagtatacttcatgaatttttattttacaataatttgcattcatttgctcattcattttccaagccacttattcttagttcagggtcacgggtggctggagcctatcccactagctcaggttgcaaggcaggaaccaacactggacaggatgccattccaactgcagggtgcactcacacatacctacactaactcctactggcacaatttcagacataccaattcacctaatacgcacatcttgggaatgtgggaggaaaccagagtacccagagaaaacccacgcagacatggaaacaacatgcaaactccacacagtggccctagccagaaactgttcttttttcacatcaacattataggaaaacaacataaaaaaaaaaaaaaagatgttatttgaggacctgctgtattctagaaaagtgaagttcttttaaggatagcttaaccaattcagtatgaatactatgtcagtttaattgatttaaataattttcaaagtttccatttaaatataaaatattagtttaaaatgtttctttccaataatatcattcctacaaagaagctctctttcaaatagttttagtaacatcttattttctccactcccactcgctaccctcatagcttatttaattcggagccaccagagtgatactgttaaaatgtttgtcagagcccatgccttttccatttaaaaacttccaggggcttcaaaactcaatcagtataaacttcaaaaccctaactgtggactataaagctcacatgacatggcctcttgctacctctcaatgaaacttttactactcccccttgtcaactgaattccagccacaatggctttgcctccttgctagtatctgaatatagcatgtatgtgcccacctcaggatcctcacacttactcttctgtcatggcttactttcacttcattcaggtctctgttcagatgttagaaactattcctgatctttacagtagtctcagcctctactactgtctatctacttatgctgccttatttttcctcatagtatctaccaattgaccactgggagacacatctccacgcatctttcatttctgcatattttgcaagccaggagctaattgaccccccctccgccgacccaccactttttttttctgtactatcttttcaaagatctttgtatagcaaatagtcttggtagatgcagaaaatatctttccctggagcaaaggacaggcatgcttaccatccattataaaagattcagcttccctaagctcagggttcctcttctacaatacactctattatgtgcaggtctcatctagttctctccccattgccctaagggaactgggactccgggaaccaacacacaaaaaagttgatcctatggctactgctattgctgtgagtagaagtcttacatcttcagttgtcatccacaaaactggcaggttacaagtagggtaaatatcctaggtccttcatagttcttgacattgacattacatactgaatttctctctatttttttctcctgacttatgtttcattgattgctatatcctcatttctctaaaggtttcaaagcacttttacaaatagtatcatttgaccttcaaaaatccctgtggaacattttctatttccatttaatagggaagacactgatccagaaaggttaaaggacaaacccaagattagcatagcagatcagtcacagaataatagcagttaaaatccaggtctaattcctaatttgttattaacttgtgactacttcttaaaagacaactactatgctgtacattctgtgagatagaaggataatcacccaatgatattagatgacaagttccttatgtggtatcacataaaaacacaaaaatttcaatgaataataaaactgagtacccaagtaagcacctgtaagatattgaaatgtatgtcttttggggttcttttattatacattatggcacgtgaatgatcatgtgacaaaactaaattctgctcttacgataatagccatttcctttatgtctaaaggaagacatcttaagaaaatacccaaaaatgtttcctttgtaaccagaattttcatctttgcaagaattaagagtgcttcaacataaacttcattaatctgaaaggttccagataatattaatgctgcttatacaactctcaagataggtaataaagaagcatttattactagctttttatctacaatgtgagcaaaagactcaaagagaagtctgtatacaacttggtcagtcatttataattcacaccttaccacttccaggaagactgaggggaaaaaagtctgggagtataagaacagatttcatataaaagagaagtatcaagttatataaaatatctgattttaaaagccctatatccccaagtagagtaaatctgcaaaaccagtaatagatatggtctatggttcagagttctaatatgcttataaatctattaatatgcttatattatatattatatgcttatattataaatctattaatatgcttataaatctataggcatatagatttataagcatatcaggtattataaatctattatatagatttataagcatagattattataacagtatataaccaccttcaaggttcataagttataaaatttctgattatgaaattgcacaaatacagctaaaatgatgatggctaagtagttaaaattttacccttaagtaaagaaaactgaagaaaaattgaaaaagaatcaaaatattataaaggaaaacagaataaagtttaataaattactaaggtaaaaaaattgttttataaggcaattttaactcaattatccccatttcacttactgtgtaagttatagctgccaacattccaatcaaggtcagagaactgatagaaaatgacaatgcagctaaaccatctgtgaagaaagaaaaactgttaaaaatgtacatatatactactcaaatccttatatttagcaaatcaacatagaaagctgagctgcttacacattttgaagaaataaaaaccaatatgtattaccgtattcttgaagtgctaactccaagtggagaaaagagtttctaaaggactctttaaaaattgatttgtaaaaaatctttctgactagctgagattttctttccttcacgtcttaaaattaagaggaaaattactggctaattattgggcccaaaaagagatcagcaaaatatcagatgctcaaaaggtgattaaaaagatcacatggcctttctcaatggcagaccctgagaaataacatttcataggaaagccactgaccttgactctttctcccttctcccctcagtcttgagacttccagtttctttgttcttaattttcaaattggttcttaatagataatcaaaaactaaaatcttaattaaagatttatttcactttttaacttgaaaggacaagcttgcctacttggcagaaaaataaaagcaaacacaacgagaaaataggtttaaaaatacacacacacacacacacacacacacacacaaaatactatgctaacgcattggatttaggaaattatctaaaggaaggtcaaagagtgaggggcaggaatgacactttcacataaatatatcaaattatgtaataaaatactatgcaaatttgaatattcttaggagcaacactttttccagttttaatacaggtcctattaggcctgtattgagcgagtttaaatgcaagtcctgtggaatcaaatacaaagttttgattaatttaatgtattgacattaatcttttatgagtactaataaaattataatgatctatcatcttaaaactcatgtctcagttttgtataacacataaagaaggcatattattaacaaattcacaatcacgcaaggcaaatttttaagccttaattttttaaaactactttttatcaaatcaaagacattttgatgctgttactttactgatcataccagaagtatcatgagaaggtgtttatacaactaggaggggtctgacatctggctgataattttaaggtactatcacttgtaaaatgtatctccaaaacagcgatgtaaaaatctgaaaaattatgtgtcttagaaatggtaaaatagacatgctgacatatttggccaatcgaaatgttaatattactaatagtcaaaatcatctgaaccaaataactcaaaattgatcattattaattattcccatttgggtaaaagatgaataaatgtgtgctgaagatacctgaagatgcattctctttatatattagggggtctatgatctggctgcatatatctttatgatataataaataaatcctattgtaaacaagttgtagtatagtcataaaatgcattactctgctgcaataaaaaggaactactaatacaaatgaatttcacaacattatttcatgaaagatgccaggtatacacaaaaaagaatcattaataaatggaatcagaattctacttacaatattcaaaaaaagtaaaactaatataactaatatatagtggcagaaattataacaatggtgcctctcatgggagatgatattaactgaatggaatactgcgaaaaaattgctggagtgatggatgtgttctacaccttgactgcaatcagttacaatgactatatacatgtatcataagatctacacattttactacatataaagcattttttttaaaaaaggttatataggccgggtgcagtggctcatgcctgtaatcccagcactttgggaggccaaggtgggcggatcacaaggtcaggagttcgagaccagcctggccaatatgttgaaactccatctctactaaaaatacaaaaattagctaagcgtggtggcgggtgcctgtagtcccagctactcaggaggctgaggcaagagaatcgcttgaacccggaaggcaggggttgcagtgagccacgatcatgccactgcactctagccggggtgacagagcaagactccgtctcaatcaatcaatcaatcaatcaataaaaaggtcatatacccttgatgcctgaaaaatgcaatgcaaggaggtgggatgagagacgaaaggactaaaaattaagaatagttgggtaactgttttggacttagacagctcatctagagtgataagtaacatgtattctagaatatggtgtttaacactgggagacaaaaaaaataaagactaaagagaatggaattacaaaaaacagaataatgctacctatctaatcaccaattcaagttatactaatactcaaagtataacttatgaaataatgtttagggtagaagagtagttactcaagatatctaaaggagttaactccaagaaaagaagccattaatttatcagcaatagaatcaaggtacataaatctgacaattcagtattagtagatgcgaggcctgctacccttattcttgctggtatcagcaagatattaatgaatcacaatttacaacatgagatcttaagtggaaagcaagaaaattaagaactcatacagcagactgcaagacttaatttaatcatcgtttagtattgtacctgggtaaaaagaaagaagtgctgattaaagaatgtacagtacctattagaatagtcaaaaaagcaatttttctgcatagtatttatagaattaagtacactaggtatctttgaaaataaggttactatgttcaaatgcacaaggaattttgagtaatatgatacacaatattttaatatcactttctaatgccagttattttttcaatgattaagcaattttcttaacctaatccgtgagccttttttttctgtaaaaacctaggtcacacagagtaagttaagaaaaacttctagaaaagcaatgccaaaatattttgatgaggtaaatttataataaaacatttaattcatataaaacctctaatttacattttatataaaagatgatttaatctcaaacaaaaacataaggttctctcttactaattaaaaataaaatctaatatatccagtacatttctttaacatattattttatattatcctaagtgaattaaaaatcacatagaaattataagagcctcactgctaaaatactttgaagattaaattttctttcaacatggtaattttataaagaagtcaagaaaatagctacgtaatagctagatggctaaaagcaagccttaagaatgcaacacttctaatttgtctagcattaggttcaaaatgacgagttagaaaaactgtggggttaagttcttttttttttttgagatggagtctcgctctgtcttgctcagtcccccaggctggaatgcaatggcgcaattcagctcactgcaacctccacctcccaggttcaaccgattctcctgcctcagcctcccgagcagctgggattacaggcgcctgccactgcacccagctaatttttgtatttttagcagagacggggtttggccatgttggccaggctggtctcaaactcctgacctcgtgatccaccccccacccctcggcctcccaaagtgctaggattacaggcatgagccaccacgcccagctggggttaaattcttaacaaaatacaaataaactgcttctcaaaagtccaaagtatcaggaaatataaactactatgttttttaaaaaaaacaatacttacgactacttccaagttcttcaaatagggacttcactttttcccactctgtagaatttttgttattgggaacattcaatggaacaaaggcactacaaaagagaaaataattgttttaatagctttaaagataaaaagttaaattaaatggtttgaaactcaaattatttttctccaaaacaataaataaataaaatctgtactatgcacagaggggagtgaaaagtttcttatctatgcatttacttccttgtaaatttaatagttgtattactgcattcagaaaaattagtttcctttgtaatcccgtatgttttttgcacttaaaatactttattatactttaataaagctggtaaaaaacaaaaaattaatatataatattttgagaatggaccacaggtttaaaacgatcaaaacaatccacaaaaaaggttaaggacatctgtattaaatcagtaaagcagaatgtaaacatatgcaattatttaagaaacaaaagaaatacattagaataaacagtaaatgtctcactgtggaatcgggagtgattattactttcttattagtatttttctattaatatatctttcaagattctatccaacagacacaatgaaagtagtttctatttgtttttcaacccacaggtgaaaaggaactgtagaaataatagagacagctagcatcctaggacctgctctatgatcttagactgggaaacgatagaataaataaatgtgcactttattatctagcccatatcaataacaagaagataatcaagagattaaggtaaagagctgggtatcccttaggttgtatatgtgtaggaacaaacaggagtaggaagtaactctaataccacgtccttcccaacctaattttaagtgtaagcaaagtgataagatttatcctctgttgtaaagaggaaatgaattagttcaataatatattaaggtacctgctctaataatgttttcatgtaaaacaaagtaattactctaaaattttctttttaattaaaaaaatccctatttcctgttgctactgataactcttatttaaaaaatgactgggcacagcatgtcagggggttacttaaatttctaactatctgcattgacttcagtttactatattcttcttaatcctagagacttatttctcaccacttttagaaaaaaaaaagtgcttacaggcatagagcaataaatgtagaaagtttattatttgttgccccaggtatgaaatcaaacaaatgaaagcagaggtgtggaatcaagaaataaaattataacatttttgtatattacacatccataacagaaatataaactaagcaagaaaaaactacccatatgatattcctttatttggacagtttgttctggatatcccaaaaagtatgctctgaacttgttagctgggaataaccaatctgtgagagtgggaaaacaaaaatttctatgttgtacaaaataccacccatcatactattaaaaaagaaatacgtattaggatatctaaaaatagcattcatctcatagggtttaatacgcaatattctaaaactcagtatgtcagttttaggtaatcaaagatattgtacagaaagagactaaaattaattaacccttgctcttgatgacacatgttcaactcctgagcagaattatctagcagttcaaatagagtaataccagagggaaacttatataatcaaaaaaactaaaaagactaagttaagtgacccacactactatcagaatgacttcaggaaaatactttgaaagcatccatcagagagttaaacatttgagcacatagtattttaggtataaacgaaagcacaaattcaaagcaggttcttaaattactttaccatcaggattttataatctaaaaatcagacctaaaatattttcacataaactaagaaaatatccataagtagaactcaaaatatggcaaaggcactaattaatcaacacagaccctggccttaattctgcaggacactgatgaaccaggctttcctctttcaatggagctgaggtaggggaagaagatccagagggcagagcagcacctgactggtataaaagcatgtcaaccttttaaccaccagaaggaataaaccactgttcattgaccaaatatcagccccatagacaaagatctataaagaaaaagaaatacctcccaacagatgaaaaggcaactgaagtccaataaagttataatatagatatatcagttctgaggaaagaaacagcagttaaaattatcaggtatactaaagcatttactaaagtatcaggtatactaaagtatactaaatgaaatggtgatgatattaaagtaaccgagagttagaatacaatgggatttgtgtggtagaaaggtgcacatacttttaaaatctcagcccttctaaaaaaaatgtatacagaacacctcagcttccaaaaacacaaagtactagattaagccatttatgcctattgttccattattggaatactaagcttgtgagagttatttatattttactactcaaggtcatcatcaaggtctgatttttcaccaaaaaaatttgcaacctctggcataaatgggttaaaatacaaactacagcctagtaagattatacttttccctcatgcccttgaaaataacaaaactaaaaaactgcttagtaaaaatatttcctacccaatctgattcactgaattaacttcacacacattatctcttcagaaacagacaaaggaaaagctaatgaatttcagtagatatgaaatggaaatgatgaattcagcataactgaaaataagatgttcacttcttacactccatcaccaagtcaattcatatttatcttccaaatagcttatgtttcttcctctctgttctctttgtaaccactgtagttccaatgctcacctgaacttatataatggctacttaactgatcttcctacctactatttacataccacttctccaacccaacacccaaaatcctcttgcaatacatccttcacagtgctgtaactctttttttttttttaagacggaatctcactctgttgccaggctggagtgcagtggcacaatctcagctcactgcaacctctgcctcccgggttcaagccgttctcctgcctcagcctccagagtagctaggattacaggcgcgcaccactatgcccagctaatttttgtatttttagtagaagtcaccatgttggccagcatggtctcgatctcttgacctcgtgatccacctccctcggcctcccaaagtgctgggattacaggcgggagccaccatgcccagcccacagtgctgtaactcttaaagcaaagtcatacatatttattttcatgcattcatttacacaaatatatacacatcttcactgtcttacaattaccgggtaggacaaaattaaaaatttcttttttttttttttttgagacggagtctcgctctgtcgcccaggtcggactgcggactgcagtggcgcaatctcggctcactgcaagctccgcttcccgggttcacgccattctcctgcctcagcctcccgagtagctgggactacaggcgcccgccaccgtgcccggctaattttttgtatttttagtagagacggggtttcaccttgttagccaggatggtctcgatctcctgacctcatgatccacccgcctcggcctcccaaagtgctgggattacaggcgtgagccaccgcgcccggccaaaaatttcttaaacatggcatgtaagacccagagtctacttacctggctaatgtcatatcctgtcacttgcccacaggaacacctgaaacatcatattacccttccttttttgaggggaggggaaatctaaattcacatcacactttttatgtcattcttcaaacactccatgctaacctcagcctcccagttaatatattttatagactgaattgtgttccctaaaaattcatatgttgctggctctctgctcccccattctacagaaagcctcatcttctcagcatcaccagacacattactgagacatcatggtgaaagtgaaggccagactaaatggatttggccatagtggtgcctggtcaccagagctccttttaactctggcaaagtgaatattgttgccatcactgacccttcagtgaccttcactacacggcctaaatgttccagcacgattccacccatggcaagttctagggcactgtcaaggctgagaactggaaacctgtcatcattggaaatcccatcaccctcttacagttgcaagatttcaccaaaattaaatggggtgatttgggcgctgattatgttgtggaatctaccagcatcttcactaccatgaagaaggctgaggttcacttaaagcagggaaccaaaaggatcctcgtctctgcccattctgctgatacccccatgtgatgggcatgaaccatgagaagtacaaaaatggcattaagatggtcagcaatgcctcctgcactatcaactgcttagccaccctggacaactgtggcatcatggagggactcatgaccacagttcatgccatcactggcactcagaagaccatggatggcccctctgggatactgtggtgtgacagctgtggggctctctagaacatcatccctgcctctgtgttgccgaagctgtgtgcaaggtcatccctgatctataggaagcttactggcataactttccatgttcccactgccaatgtgttggttgtggacctgatgtgccatctggagaaacttgccaaatatgatgacataaagaagatggtaaaacaggcattggagggtcccttcaaaggcattctggactacactgagcaacaggttgtctcctccaactttactagtgatactcattccttcacctttgatgctggggctggcactgccttcaacaaccactttttcaaactcattttctgatacgacaatgaatttggctacagcaacagggtggtggaactcatgttccacccggcttccaaggggtaagagcccctggatcaccagccccagcaagagcacaacagggagagagaggccctcagctgctggggagtccctgacgcactcagtcccttaccacactgagaatctcccctggacacagtttctgtgtcagaccccctgaagaaggagggacctagggagtaccacctttgtcatgtactatcaataaagtcccctgtactcaactctccaaaaaaaaaaaaaaacaaaatccatatgttgaagccctaacccccaatgtaatggtatttggatatacgtcatttagcaagggaattagtgttaaatgaagtcacaagggtggggccctaatcatcccatggcattggtgaggaagagacaccagagagtgctccttctctctcctccaccctctcactctccccctccccttctctctctgcaagcacaaaggaaaggccatgtgaagacagagcaagaaggtggccttctataagccaggaagagaactctcaccagaaaccaaatttgccagcaccttcaacgtagacttctaacctccagaaccatgagaaaataaatgactgttatttaagccacccagtctatgataccttgttatggcagccaaagcagatgaaaacattatacatgttactcatcttttttatttgtcaagtcagctgaccaattcccattccttcgaatctcaactcaaatattacttcctcttagatctcctgattctgcaatgcagagtaagaacctgctcctctaccatcaacatctggtatgtatctcctatcagagcacttaaacactgtaattaaaggtatgtatctgcatgcctccacaatgtaaacctagaggacagagaccatggtcctctacctttagccctaagatctagcacagtatccaacacataagtgtttcaaaaacgtatgagctacatgaattagttaaatctagatcacggctttgccataaaattatctagttttattagcaaaagcatatcacttaaaagaaactctgaatatgccaccttcaaaaatatttcaagaccttttgtcaatcagttaacctaaatgcacgcctcattcaaatatttacgtatgataatgagaagaacactgtcctagatggctgaaatgctaatagtctttaattcactattttcttattctcactgttgcaaagatttgtagttttattgatgattctcactcatgttctaaaataggagttggcaaactattggctgcctgtgtttataaataaagttttcctagaacacagtcatgttctttgtttatgtattgtctatgattacttctgagctacaagagagacacaaagaccatacagacaataaatctaaaatacttactatctatgctttaagaaaagtttgctgattcccgctccagataattcaggtttgcatacaagggacctcgatgttaacaagggaaattaacataagtagatttggctttctttaaaaagccaaaaaaatactttagaaatatactccagagctaaaatacatagaaaaaccactaaaaaaagtgcttacaaaagtactctttttcatgacacatcaaggcaggtaaaaagaactgaaaatatgacttgactataaaacacatgcatcctaagaactcctggaactacaaaaagttcaagaattttattcccattactcaacaattttattcccattacaagttacatgtaataagtaatttttttatttatggaaagttatttattgaaaattgtgagactaaattataaacagaaactttaaaaaatttattaactcctaatatatttcctaacataaaaaatgagactaatgacctatttttaacaaagataaatgtcttccattaacaaggataaattttagaagtacaaacaaataagcaaaatcttactgatattagtataaaaacaagaagaattaagaaagggaattcattgacaaagatttaaaagactgatagggtcaaatctgaaaagatgcacagacaagaattttcatcaaagtgttatttataatggggaaacattataaatgtctaagcagtcatcactagaagatcagttaaatatatttttgtatccttagaaggaaacgcaatatagtcaaaattgatggagctacacttactatcctgcagagatgcccacaatatgttaacaggcagattaccaagaattatataaaacataatcacatttgtgtaaaaagcatgtagaatgcatgcaagaagggaggtgaactctgcttgcattcaagcacataaaaatgtctagatgaaacaacatagacaaaactgttaaattgtggctattgttccttggagatttagagagtggattgttcttttttcttacatttttttctttcctagatttttctgaatgatccttttattttttttttcaaataattctatttccatttcatggtttaaaaaaaaaaaatcaagacttacccaactaaaagaagcagtgcacaaatcacaacaaatcccaaagtatacttgagtgccgttttaatttgctagatgccaaggagaaaaaagtataacatttagcaagccctttaaaatataaaatattcttgcaacactttaacagtaccttcacatcagatacatgcttacactcaatattgaaactaaggttgaaaaacaaccttaaaatttaaagaaaacaggtatactacatcttaagtatctttgcaaaacatgagattttttaaatcttttcaatagttaggcccttgtaaaaaccaatccacctaaagcatagttaattctccagtaggcatctttagtaaaattatcagaatatgtaataaaatattcccccagacagcaatcagaatctacaatgccccaacccaattcatcaaaatggtttataacaataataaacacaatatatacgtttgtgtttgagtatatacatgagtatatattaaatatatttgtatatatacatactcatatatacatatataagtatatatacacatatacatactcatatatacatatataagtatatatacacatatacatactcatatatacatatataagtatatatacacatatacatactcatatatacatatataagtatatatacacatatacatactcatatatacatatataagtatatatacacatatacatactcatatatacatatataagtatatatacacatatacatactcatatatacatatataagtatatatacacatatacataaatatatgtgcatatatacttacatacattaatatatatcttatacatatataacatatatcatgccaggcactgataagaacgtcacatatgttaactcatttaattctcataataactctaagataggttgttctcatctttagacataaggaagcttaagtccagagaagttaataatctgtcctaaggcacataggtcataagtgattaaataagtacttaagaccaggaacttgggaatttaaaaaccatgttttgcttggtgcttataatatactccaaaggctaagaaaagcaaataaagacaaagctggacattctgaatacgaataaaaaagttaataataatctcattttaaatcggtcagaaataacatttgtcctctcagactaacgaagtatctaaaaatcatcttttaaaatctgaattaatgtttcacatagttcttattcacaaagggggtaagatattctttaggaaaaaaactaaagaaaaggtaaagaagatcctaagatcaaccaaagggtagaagaatgtgcactttggaagaagtgaaagagaacgcatacatctcgtggagatcttatcaaatttgtaactagctaccttactttacataccttggtttttccaaatatagagtaaaatagtatctgcaaataacaattttgactctcttcataaatatttaaatacctaactttttttctaggagtcatttaaaatactgttaatttacttgctcctaatcttaatgcaaatgctcttgaagttttaagcatgattaagcatgatgctagcttttgacttaatacatttatttctgtatttaaatacaaatataaacaaggtataaaacaaaatcctataagtcaaaaagataagacatttagtcttattgtataactgttcccctaaattacagtgttcgattttgacatataccttttaacatatatttttttctttgacctattaattactatatattaatagatttcctgattttcagtcatccatgcaattgagagacaggcccaactcggttatataatatcaatatatttctaagatgctcctgaattatatttactattattttagttgtttataccaatacttaagtgataatggtcggcagttctgaacatggatgtgtgctgtatttgtcaggtttttaaaaagtcggtcctttttttttttttctgagatggagtctcgctcttgttgcccaggctggagcgcagtggagtgatctcggctcactgcaacctccgcctcgcgggttcaagcaattctcctgcctcagcctccggagtagctgggattacaggcccttgccgccatgcccagctaatttttgtacttttagtagagacaaggtttcgccatgttggccaggctggtctcttaactcctgacctcaggtgatccgcccgcctcggcctcccaaagtgctgggattacaggcgtgagccacagcgcctggccaaaaaaaaagtcagccttatcctggattagtaagaacaacctacaagtgctccttctttatgcttttgaacaggggccagcaaactacattcagtgtgccacatctgattcatcttctgttttactggatcataaaatgttcgctgtctctggatacttttaacactataatggcagacttgagtggctaagacagagaccatatagcccacaaatcctaaattatttactacctggccttctacagaaaaaattttgtatgcctgatctagaattgctttgtctaaaacaatagttacaagccacatgtggctagaaagcacttgaaatgtggctagcttgattgttgtgtaaaaaacaacccaaatttcaaagacttagtgtgaagaaaagaaacttaatatttcattaatagtttgactatatttgaaataatatttggaatatattatgctaaatacaatgtataattaaattaatttcaactgtttctttttattttaatttagctaacattgtatttctattagacaacactgctctagaaaaaattcagtcattcattctctgaaaaagcaggtaatattatttttctttcctaaactaaggcctctaaaataaagatacttacagtacatttactagtatcatcatcatccttttcttcataatagaagtagacaaaagggatccagaagaacacacagaacaatataacagaatataaagctgtggaaataaataataaaccgagctttactaaatacatatgtacttaatcatggttatctatctatatgtatatatattcacttaacaaattcactcccctatctgattccctcttctcataactctttctatatagtacatgatgcccaaatagccttttctgtcccatgtcccaagaaatcaacagtattatcagaataacaacccataattcaagttaactttacagcaatttctaacaatagtaataactgggtcaagaacaattgtggcagctgacatatgagctcttactctgtactaactacaatgctgagaacgtcctataaaccatcccatttaaatgaactttaacttttgtgttcattccaacttaaatttgagtacacttgacacaacatttgctattccagcaagttaaagaaacagctataaataatattctttgtgatataaataattttctcatctcaagtttaaaaaaatatgcagtattatataaccaatcttacacaaatcaaaatagagaaaaggtaaaaagaatagtagaacagtaaaattagactctctatttacccatcaatggaccacaggggttgcttccaaattttgcaatttgtgaataatgcagctatgaacatgcaaggacaaatagctcttcatgaccctgttttcaattcttagattatattcaaaattagattcaacattaactgataggaattactatttatctgctttttttaaaaaaaatgttagatttgacatacttttaaccagcagtcagtcaaaatatttatctaaattcaatatagagcttaagttaatccaaagatacagtacctttaacaataaaaacagaataaggaacatttgagacttaagcctaagaaacctgttttaaaatctgtatattcacattcatttgtttgtacatattcatgaaacataatagtaccagtataattatataaagcaattacagaatgataatcattgtattgctttataaaagaaagcagctgttaccatctcagacccattaggatggctactaacaaaaaacaataataatgacaagtgttgtcaaggatgtggaggaactggaaccctgtgtgctgctggtgggaatataaaatggtatagcagctgtggaaaacagtacgatgtttcctaaaaaaatgaaaaatggcattacatatgatccagcaattctacttccaggtgtatgcacacaagagttgaaaacagactctcgaagagttatttgtacacccatgttcctaactgcattgttcacagtaactaaaacatgaaagccacccaagtgtccactgatggatggatagagaggcaaaatgtggtatacaggagatcgagaccatcctggctaacacggtgaaaccccgtctctactaaaaatacaaaaaaattagctgggcgtggtcgtgggcacctgtattcccagctactcgggaggctgaggcaggagaatggcgtgaacctgggaggcagagcttgcagtgagccgagatcgcgccactgcactccagcctgggcgagagagagactccgtctcaaaaaaaaaaaaaaagttaggaaatgatatatggctatatgctacaacacagatgaacttagcataaccaggacattacgctaagtgaaataagccagtcacaaaaagacaaatacgatatgactctacttatatgaggtactgagagtagtcaaaagcaaggacacagaaagtaggacggtggttgtcagaaggagagaggaagggcagaatagagttactgttaataaggtatagttcaattttataagatggaaagtgttatggagatgaatggcaccaatggctgcatattatgaatatatttaataccactgaatagtacacttgaaatggttaagatggtaaaaaaaaaatacggaaaaaatgcatgttagtaatgtataataaaatctaaattacttattgtgttggaagaaatgactttaaagagttgtcttaacatttgctagcactatctcatttatctggaggacacttatgaaacagccctactacatgcaatacagataaaagaaactcaaatcaaataggaccctaaataatcaacagaggcgcagagttaatttatacttagcaatcacaaaatgtctgtcaacatactgaatttggcactatagacatttaatgaaatttatgcaggcttttaatattatgagcaactaatagtgacaataaatcttttagggcaatgaatattggtgtttctactacaaaccaaagaatagtgagttttaacatttctattgcaaatctaacagccaacagacataaacatttatctgcaaggaacttaaacaaatttacaagaaataaacaaccccatcaaaaagtgggcaaaggatatgaacacttctcaaaagaagacatttatgcagccaacaaacatatgaaaaaaagctcatcatcactggtcaataagaaatgcaaatcaaaaccacaatgagataccatctcacgccaattagaatggttattaagtcaggaaacaacaaatgctggagaggatgtggagaaagaggaatgcttttacactgttgatgggagtgtaaattagttcaaccattgtggaagacagtgtggcgattcctcaaggatttagaaccagaaataccatttgacccagcaatcccattactgagtatatacccaaaggatcataaatcattctactataaagacacatgcacacatatgtttactgcagcactctttacaatagcaaagacttggaactaacccaaatgcccatcaatgatagactggataaagaaaatgtggcacatatacaccatggaatactatgcagccataaaaaagaataagttcatgtcctttgcagggacgtggatgaagctggaagccatcattctcagcaaactaacacaggaaacagaaaaccaaacatctcatgttctcactcataagtgggagttgaacagtgagaacacatggacacagggaggggaacatcatacactggggcctgtcagggggttgggtcaaggccgggggagagcattaggacaaatacctaatgcatgcaggtcttaaaacctagatgatgagttgacaggtgcggcaaaccaccatggcacacgtatacctatgtaacaaacctgtacattctgcacatgtatcccagaacttaaaaaaaaaaaaaaaaaaattgttaacaggtattccaaagctttaaaaacttaaatacaaaatgccatttgtaaatcaccctaaataccatgccaatattaggattaacataatcaaataaaataatttgtgtaaactagaaaaaaaagtgaattagcacaacagacttgagtaggctgacagcctcacaacaaaaactggttgataaactgataggtggagtaagatttagcttcagcctgagtatgccactgtgtctgttacttggtgggcttggcctttagatagccaaacagcctaatgactattttataagcatttctggtgctcctaatcttgtgtgataaacaatcttttgaacacctaagttaccattatatttaattagcatagcaaagtataagacaaattcctgtacctcaataaaaagacaacttttttaaaaaatgggtgaagacttcaatacttcacattagaaaatatacacaatttctgggcatggtggctcacacctgtaatctccgcactttgggaagccgaggcaggcagatcacctgagttcaggagttccaggccagcctggccaacataatgagatcccgtctctactaaaaatacaaaaaaactagccaggcatggtggcaagcacccgtaatcccagctactcaggaggctgaggcaggagaattgcttaaacccaggaggcggaggttgcagtaagcccaattcgcgccactgcactgcagcctgggcaacagaacaggactcaatctcaaaaaaaaaaaaaagaaaaagaaaatatatacattggtcaacaagtacattttaaaagatgctcaacaccataagtcatcaggaaaatgcaaagtaaatctaaatggctaaaattaaactggcaataccaagtgttggcaagaatgcagaaacaactaacattatcatactttacttgtaggagtgaggtacaacactgtaaaaaactgtttagtagtttcttatcaagttaaacatatacctatcatgtgacccaacaattttcttcctctagcaataaagtataacaacttatgtaaaaggacctctgcccagagaagcttggttgatttgcagagtccagggcacttattggagacttgcaaaacaagtgcatttgcctaagtgaccagctttgattaccaaaactacagactccaaaaaggaaagcaagaattctccaaaaatcatgtttttgcacaatctaaactagccagtagtgcatggttccatatccagctgtacaaaaccacctttcaattagtaacatagagaacacaccaagggctaagttcctaggagttagtcaaaggtaagccacacaagcaggacctccctgaaaacatacaagcattcagcaatattaggtctgctgcattaactcttttacaataatgatgttgagagaaatattatatgcagtgatcaaaaactggaaatgatccaaatgatcaacaagtggatggataagcaaactgagtgatatattcacataaaagacgatcacacagcaataaaaaagaaacatgagaaacagatgaatctcatagaccttgtgttgactaaaacaagcccagacacaagactacctttctatgattgaacataaggaagtttgagaatggacaacactaatctgagaagtcaaaaaaaaatggggcagctattgacttaaaagatgtatggcaaccaaaattcccatgttgctggtaaaagtgcccacaaaagtttttagcaatcaacatctggggaaatgaagtggagaacagacacaattctcaacagactataatatccctctagtagtcaatgattcaaaataggtttaaaactgctctaaatatttgtttccctgatacaaccttctaagctatcttctaataatctgttctttctcagtgtcctttataaagatttcttcttttagtccataaatgttgaactgtaaagagagaattaaatgaacatttattttataacatttatcatatgatcagttctaatgtcaagttgagtttatatatctgtaaatgggggaaaaaatattgctgcctccactatcatgaaacaggaaaaactgcttttttaaaagttctacatcaaactcacagccattttcaaaggcaaattattcttgactctaaagttatgacactctcatatcctaacatctctataaaatatgcttttacttataaatgtttttgttaaaagattgctactagcaaataaaagataaacagatttttggtttagcagacccactaacatcaaagaacacattaagaaaaaatttttaagcctcatgtccatagaaattgagcgaaattaaactcatgaaacaagttggttttttaaaacaacttatcgagaactagcaaaaaacaagtgaatagagagccacttaaaggtcatggacaaaaactgtaccaaagaatacatagtaattcctaagatgtttaaacatatacgaagcaacaatctaccttttaaaagccacgtatcattaaattataactcacatgaaaattaacttggatacattagacttttaaattgttaaaaattttttaaacatatccttcccaactaccaatgaaaatagctaacatttacatcaaaacacaatgacaaagaaaagcagtcaatattgtgacagaataattagtcattacaaagctttttgttttagaggtcaaagtataaagatattctgggaattctaaaagccttctaaaattatctatttacccagctgaaaaactcctgagtcgagactgatagttgcatatctatacccatttcctttcagctggcactccctttcttgaccttcccccttcctactgcagcctacttgaaactgatacatgatggcttaaactctagcaccattttaaaatctgtggtgaccttaagatggaaatcatgtcctaaggatggagagtagagaaggaatgaacttagtactctcatgatgttatggcactgccataccagccctggatagcctatctccatacttactttaagtgagactgaaacactatatgactatttaaaccaggaacttctgaactgctaatagcagccacacacaattcctgaaacagaatttggtactagaaatgggcaaattcaaatatttattcctgagctattccaagcccttggtcatcttgtctgtgaagggtaggcataatagatctcaactaacttttgccactgaacatgataatatcatgaggtgccacagaaaatcccatgggttcaagatatacttctccttgcattaactgtgtagcagcaaccctacttcccctaatagggtcaatcactccatctgatatggtaactattcactggaattagatcaaagtggcctggtagaaatcataccttctaatggaagggaaccattatttcatcctacagtggaagtactcccagatgtctagtaagaattataaaccagtaagcaaggtaagaagcaaaagttttgtgagtaacaaaccactcaaaattactaataaatgaactactcaatactgaattaggaataatagtgtaaacttctatgctcacttctacttcttagttactggtaacaagtatatattttataggaggaagagaaacataagtgctcactggtccctggcattctctaaaatgtagacagacttttcaactcattttacaaggctagcagtcttaatactcacacctgacaagaataataagacaaagaaaaattacagaccagtctcacctgcaaattgattctttaaaagaatcccaattaagagagcagcaaatcaaatccaaaaatacatttaaaaaacaaaccaaaaaaaaaccaccaagatggccaatttaggtttatgctaggaatgcaaaattagtttaagtataatctagccatgtaatacctgatataccacttgaaagaataaaccaaaacaaacaaaaaagctttatatgatatcttatagatacttctgtatcttaatagatacagaaaaggtcccttttaaatgtattcatttaacaaatacctactgagtatgtttcaaccatcattctagggagcagtatacagctaaatcaaaacacagaagcctctcatgagacttaattctagtgaggaaaagacacaatatttaaaatcgtagtatgtactactcaaattatctttaaaaaatttcttaaatcaataagaacacaacccaactgaaagttacttgaagcagaaaactgaaaaagccaacaaattttttaaaaacatacaatttcatttacaaataagtgaaacatagactagtgaactctcatttcacactcaccagactagcaaaaactaaacatgtatgacaatatcaaagtttagaatatagagcaactagaaggcttatgttcttctaataagaattacattagtacaaacacttagcaaaatagcttgtcattatctaccatactgaagatgcatataacttatgatctatccgtttgactcctatgtatgtactctgcacatatacaacagaaaacatgtgcaagaatgttcattgcacaattttaacatcaaaaaactaaatgtccacactgattaatatgtggcatagtcatacacaatgaaattatactttcttcaataatctgtataaatgtctagaacatgaagatgaatgaaagcaagcaagccatttcatataaagttcagaaatgtaaaactaagtaagaatataacatgataaaactgaaaggcaaagcaagggattaacacaaactaaatttagagtatttctaagggagaaatagaagaaatggcatcaggaaaaacacaggagacttcaaaatgaccacctcaaacttcacacttaatatgatcaataaatagtctgctaagcataaaagcatatgtcaagtaaacatcaaagatgttgatatttgcaagactgctgtggtaggcagcttctaaagtggctcctgataaccctgcttctgtattcacgacctgtgtaatctcagcttgagtgtgggctggcactagtgacttactgctaaggaacagaatatgaacaaaaatattgggatgtcatttctgagattacgtgacaaaaagactggcttccatcttattgctgtatccttctctcactctgagacgccctggctgccatgttgtgagctgccctatagaaaagtccacgtaacaaagaactgatgttacaggccaagagagagataaaacccgaggcctgtctcaacccatgtgagagagcttacatgtcaactctctcccttgcggaatcttggaatgactacagtcccaccagacatcttccttgtagcccaacaagagaacctgaccgagcacacccaactaaggtgcatctggattcctcacccaaagaaactgtgaaataaggtttgctgttttaaactgctaaatgttgaggtaatttgttacatgacagtagataactagtacaactgctgacagtatagcaaagtgagtcagatgtgctgtgtaagttctaagaatatacaacttgagaataaaaatcatttacagggttgaacttagactttgtattctgaagaacagttgttttccccatggatatttttggttatttccccttctcaatggtatttattccaaggtttacactgcaatgccatttttttaacaaaaaaaaaattgttaaataaaatggtcagacaaaaggctaaataattcatgctataattcacaattgtatagcaacaaagaatcacattccaatgtataagccttagtccttcataactttttaacctcatttttttaatctatgaattagggataagattacaactctagaaaatcaaataataaaagtgcaaatcctctaagattttaagttatattaatagcaactatcctttactgactctccataatatacacagaactgtattataatcttcacttacattagctgattcgatacttttcccaacaactttgatacacaatttacatatcctgaaattcacaaattataactgtgtaattcaataatgtttggtaaatttataaagttctatagccatcactacaatccagttttagaacatttccattactccaaaaaaagttgttttgtgccagttcacaaataatccccaatcccctagcttgaggtaaccactgatctgctgtctttagagatttgccttttctggtcattttatatgcatagaattatataagatacagtcttctgcatctggcttccttcacttagcacaggggttgggattttttctctgttaacacataataaatattttcacgtttgcagtttatacatctctgttgcaaatactcatctgtgctgctgtagcaaagcagtcatagacaacacataaacaaatagacacagccaggtttacacaagccatgccataatttgccaacttgtaactcagattgctgaatatattaatatagtccattgtatgcgcatactgcattttatttaaacattcaccagttgttggacatttgaatactttccagtttgggactactataaaaactgctactatgaacatctttgcctagatattgcattcattcctgttgggtaaattcctaggagtggaactgctggaccatataggaaatttaactttttaaagaagttacaaatggctgggtgtggtggctcatgcctgtaatcacagccctttgtgtggccgagacaagaggataacttgaagccaggagttcaagaccagcctggacaacacagtagagaccctgtctctaccaaaaaacaaaaaaaaaaaaaggaagttacaaactgtttttccaaaacaactacaccatattacattcccaatagcagcattcaaagattctagtttctctatatacatggcagcacctgggtattgtctgtgtttcttattacagcctgttacagactgaatgttggtgtccccgtaaaatccatgtgttgaaaccctaactcccaatgtgatagtatttggaggtggggtctttggggggtaattaggattaaatgaagccacaaggtaggatcccatcatgggactggtgtccttagaagaagaggaagagagaccagagttcaatctctgtctctgccatgcaaggacgcagcaagaaggtggccatctacaagcaaggaaaagggtctccgccaggactgaagttgttgagaccttcaacttggacttcctagcttccagaattgtgagaaataaatgtttattgattaggtcacccagtatgtggtattttgttagagaagcccaaactgactataagacagattttggtactgagaagtgggctgctgtcctaacacatatctaaaaatatggaggtcgctttggaacatgccactggacaattttttttttaagtaatgttataaaatagcaaagaacttgggaactgtgttctagtgttttgtggaaggcaaagtttgccagtgatgaaactgaatatttagctaaggagattcctaagcaaagtgttgaagaagtggcttgattcctcctgactgcttagaataaaaagaaaaaagaaaaaaaaaaaaggaattgttaagcaaaatgagccagaacttgaagatctggaaaattctcagcctatccacattgcaaaaaaaaatggaaaagcttgttttgaagagaacactaagggtgtatttgataattagattagtgaagatatgaaccaagaagaacctaatcagccatcccagcagaaacactgccagtttgaactgaaggggaggaagatgggatgaaatgaaggaaggttgataggcttcttggatcctacaggaccagatcacaaacttgtttggctatgaaaatgtactactctacaagacataaaaagaatgtccccaaaggtgattaagagatcaaggctgcatcctcatttcaaagggggtgggaggggattgtctaggtttcaacatgtcagagaatagctgccttgaagccttgtgggtacaactcctacccatcagagccttgaggtttaacactgccccgcagaatggtagaggcaggaccatcaccacagtgggtcctgaaggcatagggtcaaaccaaagaagactgtttttgagctatcttataattctaatagtatctgcattgctaggttttttactttattgaaacgcttttttccttctgaattttcccttagaatgtctatcctatacctgtactgccattatattttaaaagcaaataacttatctggttttagaggttcacagtcagagaagaattatgactcaggataaattttacttgtggtcacacacatatctgatttagaaaatatttagacgagactttgtactttagagttgatgctgcaacaaacttaacactcttggggctgttaggatggaataaacgtattttgcataggaaatggacatggattctgggctgccaggagtggaatgttatgcagtaagtttgtccccccagaattcatatgttgaagccctaacgccaatgtgatagtacttggagatgaggcctttgggaggtaattaggttcagatgagggcatgatgttagggcccctgtgatggcattagtgtccttataagaagagaaagagaccagagtacatgcgctagatcgttacctcactctctctctctctctctctctatgccatgtgaggacactgcgagaaggcagctagctatctataagcatggaagaaggccttcattacaaaccaaatctgctggctccagaactatgagaaatacatgttcgttaagactcccactctatattttgttatagcagccttaactaataagacagcattctagttgatgtgctggtatatctcattgaaaacgtaatttacatttccctaatcattaatgatgttgaagatctttctatgggtttttaagccattcataaatcttccctgattaaatgcctgttcaaatttttgcttattttttaattgaatggttttattaatgattggtaagatacattttgaatataagccctttatgatttatacatgatttacaaatatgtttggcttgtctgtggtttataattatttttgttttaattgtgtcttttgaaagacaaagatttaatattgatgaagtataacttattaaggtttctcctatgaatcatgcttttggtgccatatctaagaactctttttctaacttaaggtcaccaagattgtattccttaatttcttttcttttttttttttttaatttgagatggagtcttgctgtgtgacccaggctggagtgcagtggtgagatcttggcttactgcaacctctgcctcctgggttcaagagattctcctgcctcagcctccccacatagctgagattacaggagcctgccaccacgcccagctaatttttgtatttttagtagagacagggtttcaccatgttggccaggctggtcttgaactcctgacctcaagtgatctgccagccagggcctccccaagtgctgggattacaggagtgagccattgtgcccccctcccttaatttcttctaaaagtattatacttttacagcttaggtctatgattgatttttgagtatggtgtaaggtaaggctcaaaaaaaatcattttttgcatataatagtccaactttcccagcaaaaatttttttaattgaatggaattaaactgaattggcacagctgttgaaaatcaattgaccatgaatataaaggtttatttttggactctgaattttattccattgctctatatgtctgaccatctgcaatactatatagtcttgtttactgagttttatattatgttttgagatctgaggatgtaattctctgatgtcatttttcttttccaaaatgttttttggctactgtaaatcctgttgacttccacgtaaattttaggattggcttgtcagtttttcaaaaatatttttaaaagtctgtgtgactttaatagaggctgcattcaacttataggtcagtttgagagaaaactgacataattgcatctttacagcattgtgttttcaaccccataatatggaattgtttatttaaatcttctttagtttctatcagcaatttttctgtagttttcagtgtagaaatcttatgcttttttgttaaatgtgaagtacttttttcaccctttttgatggtttctgattggaattgcttttctcagttcatctgaattgtctgtttctagttttcatatcaatcttatacttgtgattctgctaacattactcactggttgtatttgtccatatataggttccctgaaattttctacctatagaatcttatatcacctgtgaaagtaagacagtaataattcttcttttccagtttggatgtatttacttaagtaaatatttaaataactaaataataaaaattaatatttaagtaaatttattcatttaattatttatttatttatttagacttatcacactggctagaatcactagtacaatgttaaatagcagtgttgagagcagacatagttatcttgctcctaatctcagaagaaaagtattcagtctttcaccactaagtataatgtagctgtaggcttttcatagatgtcctttgtcagcttgggaagttctcctctgtaactattttgctgataatttttaatcaatgatcgatactggaattttttttgcatctattgagatgatcattcatttctgtcctatgtatgctaacatgtatgttaagtaaagtaatttctggatattaaagcaaccttacatttctgggatgaattcacttttgtcatactatgtaattctttttatatgacactggattcagtttcctaaaattttaagaattctgtgtctacattcatgagggatattagtccacagtttccctttcttgtgatgtcttaatatgattttggtatgaaggaaataatggcctcaagtgagttgggaagtgttccttcatcctctatttcctaaaaaggttgataaaggattggtataatttctatttataatacataaatagaaattggtataatttcttatttaaatatataattggtataattatttaaatacataatatgtgaaattcttcacatatttcttgtgtgaagaaatctaggtatggggttctctttgtgggaatattttaaataaataattcaacttctatgcttgctacagtgctatttcttcttaaatcagttatggtaattgattcaattggaaaattgtctaggaatttatccacttcatctaatttattggtataaagttactcaacattcctttgtaattcttttaatttctgcaaagttggtaatgccacttctttcattccttattttgataatttatatcctttttctctctctccctctttcccaatgccctaagtctggctaaagatttgctgatttcttttttttcaaagaacctactttggtttgaattttctttattgtttttctgttttctatttcattgatgtctgctctaacctttatttttcttctgcttgtttaaagttcagtttgctcttctttttctgttttcctaaggtagaagtttaggtagttgagaattcttttttaaaagagggatttaaagctgcaaattatcctctgagctctgcttgagctatatcccgtaaattttgatatgttacatttttattttcattctgttcaaaatattctccaatctaccttgtgatttcatcttgatccatgggttatttagaagtatgtggtttaaatgccaaatacttgtggattgccaagatttttttccattgctggtttctaatttaattacattatgattggaaaatgcactttgtatgatttttaatccttttaaatttactgataattattttataacctatcatatagtctatactgaagaatgttctccatgtgctttaagtcaattgtgttctgcatccattgggatacaattttctacatttttaagttcatcagtattgttgtttacatcttctcaaccttcactgattttctaactgttctatcagaaaacaattatttcctaaccagtaaagagttggttactcaaatttgcaactaatattggtgaattatctattttgcctatcaattctgcccattttgaatttgtgtattttaaagctctgttaataggtgcatacagaattataatttttctgtcattttaatgattaaccattttatcattatgaaatgtccgttgtcttaaagtctattttatttgatattaatatagtcatttcagctgtcagaattactatttgcatgacatcttttactaaccttttctttaaccatatactatttgtgtccctgaatctaaggtgtttctcttatagacaacacgttgacgaatcttcatttgttgatccactatgacaatctcatttgattgggggtatttagactacttacacataatataacaattattgatatggctgtaattacatttgccattttatactttattatgtcttttttgttgttccaggcttctcctttactaccttattttgtattaaaagttagtttctacattaccaattcctgacttattttatagatatttatagatacataaaataagtatatttttgagtcattttcttagtggttgctataggaattatactacataccttaatttatcacaatttaccttcaattaatattcacacaatacaggcaaaatatatattttttaaaaacttgctccaaaatagctctaatacttctttttctttgtgccattcccatcatatattttatgtctatatattataaaccctaaacccaacatttacagtgttataattattactttatacaatcttaaatcttttacaaagataagaaaaggagaaaaaatatagtgcctttatattaaacattaaccattataatttctgatttctttcttcctatgaatttggtttactgcctagtgtcatttccttttatccttaaagacttcctttagcattcttgtaagaaagggattcttgcaatgaattttctcaggttttatcttggaatgtcctattccaccttcatttttagtggattttagaggacacagaaatctttattttttttttcttttcattttagtgccctctggtgtccactatttcacattagaagttagtcactaatcataaagatgctgttatgtaattttttggctgcttttaaatttttgtctttggctttggcttttaataatttaacaatgatttgtccaggtctgtatctctgcttttcctacttgggcttcactgagcttcttagatgggtagattgctttttggccataatttcttcaaactttttttcctgccctcttctttctcttttcattctgagattcccatcacacatacataggtaaacttgatgctgacccacagatctctgtggctctactgatttctctttaatctttcctctctgatcttcagattagatcatctacctttgaaattcactgcttctttcttctgtcatgtcaaacctctggtaagaccctctagtaaatttttcacatcagttactatattcttcaatctcagaattttcattttgttatttttaaaatcatttctatctcctttttgaacatctctatttgtcacactttattttcattcttagcttactttgctgctttaaactgatttacaatagctgctttgaagtctttgtctgctaaatctaacatctagaaatactgtttccactatatgctgttttccttagcattgttcatgttttcctatttctttgcatattttataattttattgaaactggacatgttagacaatatgttgtagcaactctgtattacgctttttgctcctgaaggttgcctctttaattcctttgttcacttatttggcagggttaagtctataaaatctgttttccacaagtgtgcaactgctgatgtgtctattttttttaacgatttttttagtgttttttttttttaatttttatcccagctcaaaaaaatatatatttatttaaattactgtttttaagcctggcttcctagggattgctcctgtgtctatatagcttaataatcagacaataaccagaaataaactttgctcaaacaactcaagccaataagacttccagcccttccttgccaatgaacctgcatattggtaggagagtgtattaaaagttcaggccaattgcccctggcttttcctttctggtctcctacacacgtgtagagcctctagggcagccaggagtacatgactaggttgggccctctccagtctccaatacacatgtatgcagcttcagccagacatatgcttgtcccaattatgaccacaatcccatgctagtagaatcctgggtcctctccgctcacctgactccaagattgtcacttccataaacaatagcactagaagtgagcaccacccaactgagtgagtccccttctgatacagcagtacagctgtaggtcctccctggacccaccctgccctggcagatcttctgcaataaccaagctggaagttgggggtagggaaacataacagccctaggctaaaatacaagaaactaccactgtcccttagcagtttttaagtataaacacttctcagactgttgtatgtctttcattgattgctaaagaactgaagctgttgttttctgttcagttttgtccaacttcatatttgttttctggtgagagaatctgccaattttcaaacttggccatggctgaaatcccaccccactcactcaatcttaacaacacggaagtacacattattctctctcattaacaaagtaagaaattcaagtgagtttccctaaattacatagaaaataaaaaattcatgaatttcacaaatatttgagtacctactatgtgccaatatctgttctttgtgcttaaaacacatcaaggaccaaaagagataaagattcctgccctagcacagtataaattctagcaggaggatacaaacaataaacataactaaaactatataatgcatcagaatgtaattaaaggctgtaaagaaaaaaaatagactaggataaaatgagccagagattgaaggtaggcctcattcacaggtaacatgtaagcaaagatttaaaggctaaaggagttaaattagtcaagtaaataactggaagaaaagcattctaagcaaagggaacataaagcaaagggtctaaggtaggagtgaaactgaaatgttcaaggaacattaataacaacattaatataacagtgatggagagatgtactagttatctactaccatgtaagaggctactcaaaacttagtggtttaaaaaaacatttactgacagattctatgagtcaagaatatgagcacagtttagctgggtccccaagctcagaatttctcccaaggctgcaatcaagatgttagccaatgcagcagttatcccaaggcttgactggggaagaacctgcttccaggttcactcactgcgtttttggcaggattcagttcctcactagctgttggctggaggccgctatcagttccttgctatgtgggcctctccataaggcagtacacaaactggcagcttggttaatatgagcaagcaagagaaaaagccaaggagtatgagcaagacaaagtcactgtcttctacctaatctcagaagtgacatcccatcagcatcattttagccacattctctttggcagacgcaaatctctaggtccagcacacactcaaaaggagggaattacataagggcatgaatattaggaggtggacagcactgtgggccatcatgagagtttgcctagcacagcaaaatagtagatgagaacaaagaagtttgtggggtggggaagaatgtcagatcacataaggccctgcaggcttcagtaatgacttcgtcatttcctctgaattacatgggaagctacttcagggttttgagcagataaggaaaagacgtatcatatttttaaagaatcactctgactgctatattgtcagtaaaacaagggtggaaaagacagacttctgtgataaccccaaaagagacaatggtgtcttagacaggattatagctagaaaaaaaaaaggtagtgagaagtggtcagattctagataaattttgaaaatcaagcacaagggaattttctgccatatttgactcaaaatgtgaaaaagtaaagattcaaggatgactctaaggttttcagcctgagaaactctatccttcttgttgctatccacaagaaaaaaaacctactgtatgacagattaaaggtcagttgctttagaaatgttaaatttgagatgtctttgattttttggtagagttctgtaacggttggacataggattgtgaagttccagagaggtctgcacaaagattcgaaactgggaattgggcatataggtgatatttagaaggaagcaatggtataaaatcaccaaaggattaactgaaacagaacaggttcaaggattaacccgtgggacatacaaatattttaaaaggtcagaagaaagagaacgaaccaacaaaggaaactcaaaaggcacaaccaagaacataagaagaaaaaacaagaacatatgtctcaatctccaaaatctggagtgtgaaggaaggtttatgatattaatgtgacaaatcatcagttcatttagagacaaaaagtacaagtcacactagttataagtccaagagatcacttgctttcttagtatttccaactggaaacaaattcttacgctactaggtctctagagattatctagataatctcttgagcaaacttaacagaaaccacttagaaaacatcccctttaattaagaatactttcttttaaaaagggggaaaaggggcaggagacaggacagaactgtatcttatcaaacaagattttgtaaaaaggattttgaatcaaacaaatctaaaaattagtctcagtctttctatcttgtctggaaaagcactgaaatatattattagagatgttttcaaaacaatagtgtcaagaaaattgaaatttgatgagatactagtcagttctttcaatattaactttcctatatcattgcactaacagagaaaatttctcttgttctcttatctgatttgaataaacagcagtaaataacacctatttagcactaatcacatgtctcacactcctaaccttacgaagtaggtactactttatcaccatttcacaggtggagaaatcacaaagaagtcaacttcaaaggtctcatgtactcttctcaagttagattctaggagttgtaaaccctactatgatttgaatgtgtccctcaaagttcatgatcactacccaatatggtagttttgggaggtagggcctaatgggaggtatttgggtagcaagggtgactgctcatgtgtggattaatgtcactatcatctgagtgggttcattataaaaggatgtgtgtgcctccattgcccttctgccatgggatgacagcaggaaggcccttaccaaatgccagttccttcatcttgaacttcccagcctccagaactatgagccaataaatttctgttccttacaaattaccaagttttgagtattctactttaacagcacaaaacacactaagataaacctaagttcaaaatacataaaaaagtttccagatacaaattatcagcacctaatcaatagggaatgaagagaaacttccaaaaaactctcttaggtgctctaaaagtatggcatagaaactggaactgaaaagcttcccggtccatcttattctcccttagttccataacttaattcatctaaatatgtgtatactttgactcactcctatttttactacaaaattgttttaacagcaaaaaaaaattttattaaacacctaataaactgggatttttctatgaacatccatacaatggaaaacaatgcagtaaaaatcttttaaatgtacatatataatatcttcttaacagctgcatttgaaaagaccaaatattgtcaacaaccccatttttcatcaacactagcatggataaactacggtatgttaatatagtaataagaatcaacagagtactgttgcctgcatcaatatagatgtttcaaatataatgttacacactgaagaagccaaacacaaaacattatgaactatatgattcaatttacatctacacacaagatgatagcctgaaaactagtgtcaagagaagaaagtctatgtggatgatatggtttggctctgcgtccccacttaaatctcatcttgaattgtaataatccccatgtgtcatgggagggacccagtggaaagtaatggaatcatggggacgggtatttcccatgctgttctcatgacagtgattaagtctcacgagatctgatggttttacataaaggggagttcccctgcacatgctcttgcctgccaccatgttagatgtgactttgctcctcctcgccttccaccatgattatgaagcctccccagccatgtggaactgtgagcccattaaacctctttttctttataaattacccagtcttgggtatgtctttatcagcagtgggagaacaggctaataacatgaggaattgataggccagttacagaagaactgaacaaaaatagcctcaaataattcctgcttagggtttgggatagttttaattcatttacccccgcctttcattaatttcttttacatgaatttccttttacttaatgttttttctcacttcttacttttgcatgcatgcaggggttgtagaaatagggagaggccaaatataaagataaaaataaatttgaaataaaaacaaattagataaaaggctaaaacacagacaacataagggataaaaggactgcaaagcaggcttaaatatgaaattaaacagaactcagaagtcactgctaagcctgcatagcaggtctaaatacaaaattaaacaaaactcagaactcaaaactcacacgagggcagttttataaaagaaaagagtaggctgagtgtggtggcttatgcctgtaatcccaaccctttgagaggccaaggtgggagtactgcttgagcccaaggagttcaagtttacaatgagctatgatcacgccaccgcactcctgcccaaaatacagtgagatggaaggaaggaaggaaggaaggaaggaaggaaggaaggaagggagggagggagggagggagggagggagggagggagggagggagggaaggaaggaaaagatgaagaactaaataaaacattcaaaagaaataaaaggtacaaatccttaaagtttctggggcgggcataaccttcccagatgagggagtcacctgatcagagtccttaggtgtgcagggaataggatgaaaatgaacaactttaccctctcatacttcaacaagctccagaaaactgaatctgctttgtaagtagcttcagttaatgaggattattaataactaatcaacagctggggagtgctcacaaggagaagcagcaggcagcctgatttctgccagcttctcagaacaaaacaccccaaattccattaatataacagaagatccttaaaaatgtggtttccagaccctaggatttgcagagatcctctcagggtattcacaacatcaaaactgtttgcataatgatactaagatattatgtgcctttccactatgtttacagttaaactaatggtgcaaaaacaacagtggataaaactgctgcccctttacaggaatcaagatagtagactcaaattacactagaagtcattgtattcttcagggaggagggagatttgagccttttattcacaaaagtcccttttgaagcagtaaaaattctagtgtccacatttgcatatatatccttttaatattctgtgtgacaggaaatacacataaaccatgctgtacttgtgtctcacaacatctcaattttgtctgcgctctttgagttgtgagctacagtagccacttttttttcaaagaacatcatttttacttgaaagaacaactgacagataagcaatggttatccagacttgattattagacaggctttctcaaaaatgaacagtgagactatcactccaaaggaaataagtgacagtatttgtcaccaatgataaaactgaagctttcaagagaaaattagaatgttggaaaacttgaatctatctttgagttttacagcatctcaatatatacttttctgataagaataatggcaatattaacaaatgtggttttttcaatgtataatgatatgtgtcaacattcagaagacctatattattcactgaacaaatattttccaaatgaataaggcataatgtcaactgtcttatttggcatttgacaaatggacaaaagatccattcaaagtgcaaatgggccaatagatttcaatgtcatggagtatgaaaaagcagtgagactataaatttgaatcagtagtttaaaagtagttaacactcctaaacaatttcattgaggaagatgactaaaacttctttaggagttttaagagtttaaacctttttgatcagtttctcctctatggaaaactagcatctaaactagcacctaaactggtacctaagaaaacttgacacatacagaaaaaaccctgcattagtaactctatgaaggaaaatatgtatacagtttactcaaagttatcatgaattaggcatctaaacattaatcttaatattctagaaaagagattatcacatgatttgttaacagaaagctcttcttttgaaaacacacatggaacccgaacataaaagacaattaaagcataagtaggtcccatggagtcaatgcttagccgccttatccctcaaacctttatctcattgcacatgcacgagacatctttagaaaagccactgacttaggccactggtttctaaacttggctgtgctaaaatcagaatcagtaccattagctttttagtaatagattcacaggctgcctaacacaacaaagtaaattagaatctctcgggatacaatctaccattctgtattatttaaaatgtccccagtgggcaggtgcagtggctcacgtctgtaatcccagcactttgagacgggcagatcgcttgaggtcaggagttcgagactagtatgaccaacatggcaaaaccccatctctactaaaaaatacaaaaattaactgagcatggtggcgaacgcttgtaatcgcagctactcgggaggccgaggcaagagaatcacttgaacctgggaggcgaaggttgcagtgagccaaaattgtgccactgcactctagcctggacaacaaagggaggctccatctcaaaaaaattaaaaaaggggtccgggcacaatgagtggctcccatctgtaatcccagcactttgggaggctgaggcgggaggatcacctgaggtcaggagtttgagaccagcctggccaacatggtgaaactttgtctctactaaaaatacaaaaaattatccgggcgtgatgacatgtgcctataatcccagctactagggagggtgaggcaggagaactgcttgaacccaggaggtggaggttgcagtgagccgagactgcacttcagcctgcgcaacagagcaagactctgttgcaaaaaaaaaaaaaaaagaggccccagatgatttctgaagctgctcttgggagttcagtgctgctaatccttcttataagtaacatccccagtactatttatcaaaaggcagctcacttaacagtaagaagctacagctgaggaaataagaactactttgggctatgccatttactgacaaactgatcttcaacatctctccacatcaatatcttcatctgtgaaaggtagaaaatacaaaaaaaaaaagggggagagagggcattcatgaaaactagataagattttgaatgtaaaagtcttacacagtgcctagcaaggttagatcatgaaaatatgttgatatattaagagggataggaaggattagacaaacttagcctctgacagaagagatggataaaaactgtgttttctgtttgaactctgtatagtcctcaaaatccaggagaagacaaattagatgtttcctattagggcagttagatagtatctagcatttgaaaagaaacagctgagcttcaggatagtaactaccttcgaagctacggaatcctttcagggtcctagctgtaggtcacctctgggtcagagccaaaggcctattagccatagctgagatggagatgactaatattataccactaaccattcatattatccaattaaattttcttgttttgattccatggtcataaaacaaatttttcaattcataatctggctttttaaacaaatttttttcctagatcactgtctcaactatcctattcaaagcaattatatttctcactataaattaagttctataggaaatcaagccttaagtcccaagacatctactgtttgtaatgattaacttatcacacaggcatttaaaatgatactaagggcacattatccttgagtggattgaggacacaccatctttgggaggactaagaaaaatacttacaaaattcttttctgtgggcttaattctctccatggaacaaactgaaaaagcctgcatgaattaacattccagtttacaagtcttttgcgaacttaattacaaaggattagtccaatggcctctaggttcaacgataagatacagttcacagaccttgacttcactaacgtataaactggcttatctcaacatatgttctacagaatcactacactttagtgtcatacaggtgacagacctccccccctaaaactttgtgtagaagtatttatattctatttatactaaaaaggcaacattctacttaatatagctccatttcaaaacttttaataggtcaaaattgtattttattatatttaatatattcatcagaaataataaattatattttgaaatttcataaatactaaaatctacccgaaagaaataaaatttcatggggcctacagattttagattaggataaaggcaaaggagcaaagcagctgaattaaaattcaatggggcagggcacggtgcctcacgcctgtaatcccagcacttcggaaggccaggatgggcggatcactaggtcaggagttaaagaccagcctggccaacatggtgaaaccctgtctctgctaaaaatacaaaaattagctgggcgtgatggtgtgtgcctgtaatcccagctactcgggaggctgaggcaggagaatcgcttgaacccatgaggcggaggctgcagtgagccgagactgtgccactgcactccagcctgggcaacagggcgagactcagtctcaaaaaaaaaaaaaaaacaattcaatggaactcgaaaacatatcccatccatagaaacttttgtagatttttttcagtttcccatttaatgtcctactgaaatcttactcagaatctttattgctgaaaaaaatgacatccttctcctaactcaacaattacacttttttttataaaacacaagtttcatgtttattcaaagagaaaattctggaaacatttagcttttgtattattataaagcttttataatctaatactgagaatgatgtttgagggagggaaggaggaggagccaagcaaccataagtctgggattaaaatgactctgtggagagtaaagttgatagtacaaattccccagagactgcagtctactaatggcaatacttagaaaaaatttttagaaaattgaaatttaaaatcaaaaaaacaggagtgggaaattggtaatgataaaaggagaggtgagatttaaagtaacttgactgaactgctacaaagaagtgttacaaagtgaatctaaatgaagcaaagtaggttcaagaagtttcaggattttgaaaatgaatacatattatttattcctgttgtagaaaacagaaatctcatatgtggtttcaaaattaaaagtttatatgtagctttatattgtaggagttattaagaaattattgtaggcagatagagaggaaaacggtccttaggaagttttcatcttttaaagcatctccagaaaagtttaggcaacctttgatatgcaaatgcaagccattagaaactgggtccacccaaacctggcaataccagcactcttcttcttgcccttgccccacatgttcctggcgacatggccgtccccacatatccccacctgtgtagaagatcatggcaccctgtattggcatattaaaaggctaggtgggagggtcctttttttttttttttttttttttaacaggctatgtggatgacatgcctggtcaaaccaatcctgagccctatgcaaatcaaacactggcaccttcagcctcttcatatacctgactggtatccgtggcaggtggggttccctctcttggttttggagctcccctccctctgtctctgtacaggggagcttatttctttcttcccccttctttcttgcctactaaactccctgctccttaaaactactccatgtgtgtccatgtcatttttttctaattcgacccaagaggaagaacctggggttctccactcatcggagtcgtatcagtattttggttagcagtccaaatagggaaagaaactgaaagatacttactatagtaaccgtataatacagtgtcctcaatctgtctgctgacattagcattagcccagtcctaggataaaaggaaacaatagaaatattaatgaaacacccatttgcctaacaattaaaagtcaagttttaatacgactgaatatcacttccaaaatctatccacccacataaaaacaatctatgtcttcaataagtgagagacagacaatagacaaatttcagtatgtaaatgctgagataagacaacacagttctgggaaaacacagacaaaaggcacctaactcagactgaagatgaggaatggcttctcaaaaatgactaaactgagacctgaaaggagggagaatgatctcagggaaacagaaaatagtaggaaggaaagagggagtaaagaacatacacagaacgtttgaaaaaagcttcaagaagctaaatatagattaaattgagcttttggaaaggtaagagaaaccaggtggagagagggaagagaaggacacatatgtcaggggcttgtgagtcatgctgagtactttggactttgtcctaagggcaatggaaaatagtgatgaattttatgcagagagcaacaaacctgattagtacttcagaaagaacatatttgagcatattatacatttttttaaaaacctacaggaaaaatcagtctaatctcctttgcattcatcccacacaagggttgttcgaattactaagcttagaaaatataattcaaattaatcttttccaatagaaaaaaaatctataccctattctgtcagaactaaggtacaatgtcaagcctttttggcctatactctaaattctgtgcatgtgaaaaattaaacgtggagaatctaaaggacttatcactgctattaagtataaagcaaaatttagaatccaggtcagtgttttataaacacttaaagagctcaagtcagtgtcaacattctatgagtgctcttaaaaaagggcatcaatatttaattctcttaagataattaaggatttttcttttctcttttttttgcccataaacacctctagcaatgagtagctataaatttgctgataaatgcctaaaatataaaaaaagtagaaaatccaaacttacttctacaaaggcaaaaccttgatatccaaagcacaataaaaacaatatgttcccaatagtaataaggaatagtaacaaacccttaataggccaaatagaaacatttatgttaaccatataaaaaataaatcacaggatataacaaatttaataaatggaaagtcatctgttcccacatttaaagattgtaaataccaactgccatccaaattaatcttaaaattaatatatatcaccaatcaaaatcccattgtgctaggaggtagagtatattaacatattgattctaaaaatcatctgacaaaacaagctagggccagaaataaatttgaaaaagaccaacaagaaggaatttcccaattactatcctttactaataaaacgtgaaaatccactattatataacctttcacctacctattggcaaaatttaaaacaataacatccagtaatgccaaaatgtggagggaaagccatctgctacacagtaagatagtctaccatgtagacattctttattgaatcgatcctaaaaatattcacacaaattaggatggatattagtacatagatagtttattcattggacaatactacttgtccaacaaattacctcaggagctcttacaaagcgataagctagcccaaatgggcccttcctttcccacacagcaggagctgtaccaaattccatcactcattggactaagagacccaaagtctccaggtgttcagcaattgtcctagcattcagtgaactacttgtacctactcagctcatattctttggcacccaagtccaaggtgtttattctacctgcaagaccattcttaagaggccaggtgcggtggcttacatctgtaatcccagcactctagaaggctgaggcaggtggattgcttgaggtcaggagtttgaggccaggcattgtagtacacacctataatcccagcttcttggaaggatgaggaatgagaattgctttaacttgggaggcagaggttgcagcgagccaagatcatgccactacactctagcctgagcaacagagcaagactctgtctcaagaaacaaaaaaaaaaagagagagagagagaaaagactaggaggttatatgcctctactaaagcacctgcactgtgggagagtttctctctttgcctaatgtagttacaaaagaacctgagcacttgctgacccttgtcagggtaaattagaccctgtactaattaacatttattggttttgggccaagagtcctttacccaacaatattcggtgtagggtcgtttaaaatattttttaaaagaaaaatgaaactggagacaatctaaatgccagaatagaaatagtaaaatttactactgtacatgcataacatagaataacatgttgacattaaaaacaatgagacctatataaactagcatagataaatatctatgaagtacttttgagtaggaggaaacagaacaaatcacaaccaaaagttttaacacatgtaatctttgtctaaaaaatgtaatgaaagaaatacccaaacatattatagaaaaaatgaaaagaaaatgtaagtagcgcttaccacacagaatgggaaagcactggggagaattctgtgcaatgactgaaaattttttcatcaatgattcaagtatccaaatgaatatgtacataatcaaagcttcaactcctaagagctgtgcttctttagtgattacttctgtatcaaaacagaaatttaaaagtatttttgtgggttttgttctgtttttgagacagtgtctcactctgtcacccaggctgcagtgcagtggcatgatcatggctcactgcaacctagaccttcccaggctcaggtgatcctcccaccttcaggcttccaagtagctgggaccacaggtgcatgccaccatgcccagctaatttttgtattttttgtagagactgggtttcaccacgttgcccaggctggtcttgaactcctggactcaagtgatctgcctgcctcagcctctaggtttacaggtgtgagccaccatacctggactaaaaggattttgaagatgagcaaattaagaacaatgtatcaatgggccagagaataataacaactatcttttttttacttcttatatgttatacaaacttcccaccaatttccaagacagccccaggaggtagtaatgtctccactgagaatcacttaaaaattagtttaaaatcagacaaaatcccaatctcaaaaaaaaatattaaaaataaaaagtctgaaggttaacttgaagcaaaagaatcattgaaatttagcatcttttactctataaggatcttttgcctaaccagttcttgtggcaacaggagtattgctgttactattttaaagctacaaatatgtgtaagatatacaacatcactcaagtactgttagtgtatttggcttttacatactctcttgcctccaagatacttgatgtattgtcaagagagcttagtttgtaaaactttccttctaattttgggaaccactatgaccttgatatgttttataaactattgcctctcgaagtagaaactaaaagaaacttcagagtcatttaggacacaaaagaatgtgagacaatcaagaactaaataaagaatattaaagaagaatatttcagaagacaaggatatgaattccacagaacaagaatgtaattggtcgcatatgtaaattccattccccatttttcaagttgacttttgaaacctgctgcataacccaaaactccaaaatgattctcctcacttttacctgataacttcaccataaaaatggtggttctcattcaggagccattttgatccccatggggcatttgacaatgtccggagacatggtggacagagtcagtatactacaggaatctaggaggtaagaggtcaaggacgccactaaacacctacaattcacagggcaggcccccataacaaagaattatccaaggcaaaatgtccatgattgagaaatactgacttagaggtctctaaaataatttgcagccccaagacaggagctcactcaacttactattaaatctaaaacatatctccatttgtatccaaattctagaccttctttcctctgaaatacccacactcctattacacccaaccctttcactttcactcacccttctggaggaaactgcacctgcaataccttctctcccctcaaaaatttctctcactgtactgaattctaaagtatacaaattctagtaactattaaacacaaagagatacacaaacaccacaaataaaaacacctccattaacccacttctcactttcgtagagaacaaaaacttcctgaaaagttgtcagcattccttatcacttcttccttacttctctgtccatatctaacccactcaacctaaccaccctactgttctgctgaaattattcttcatggtcaccactgaccaaagccaccagtcacttctctaccccattcacttcacctctcaacaccactgaaaaaagctatcattctttcttcctgaaacacattattctgatttccataaagcctccctcttctgtttttcttatctctcaggttgcagattctccccttcagctgaccttctacacgatagagaactccagtcctcggtccagtgtcaaggcttctctgactactcagtcttcccagctgctagtcagtccataactgtagatatcatccatatgttgcttcccaaatacttctctccagccctaagctcttcacagagcttcaactccctacttaacacctccacctggatagatagtacagtacacactttaaaggtagcctgtccgaactataactcttttctctacaccccctcacttgcccatgcacatgccctcttattcctctaagtttccctatttctctaaggtatacaaaaacctaggcatcagtgctccaattttctttttctttcacctgtccccctatatctaatctatcagcagatcccagcagctctacctctaaaatacatgccaattttaatcatttttctctactagcaccactctagcccaagtcacctttatcttttaccttcattaacttcatattgcagttaggagaaaatctaaacttattaatatgacttaaaagtcatgaacagtctggctcctgccttattctggatctcagcttttaccaaagcaaaaccctcaacaatacatgtcagccaaataagccaagttcatcctggcctaaaggcctctatatttgctgctgcttctccctaaaggctctctccctctggctctttactagattggctcctcatccaggtatcatggcaagaaacctcagcagttttgccttcctatccccctctccaaaacactcataacctgactagactctcatatcaatctatttcctcatagaatttatcactataaagttaccttatcttatttgttgattattgatctggccttgcagactaagctccatgagaaaagcaacctcatttgccttaatgattaatctccagtacctacaattgtcaggcacatactatatatttagtaaatattaagtaaataaacatatttaaggttcaataaagagcacaaagttctaagatacagttcccaccatttgaaaataggaatgagggagcagtagagtttagcccagacatctaataacagtccataaagatattcataattagggaacaggagtaagatatgaacaaacaccaaaacattaaatgttttcatgacataccttaatattaactaatttttttatttttacatgttgtgtaaaagaaagaatatttattcatattagtgtcgatttctttttttttttactattggatcagtatatttcatgtatatccccatccaatgttactggccaactatcaaagactgttaaagacagcacttccagctgtactctaaaaggttctcttctgttatctaaaaagttaattactttagaaaagaagctagaaacaaattatctagctaaaattattaataatgccatatgctgaaagaaaggtcaacagaaacaactcaggcattataatatacccctgccataagaaggcagagaaagctagaagggtaactaaaacaaaaataaagaaactagcaatgactgcctgctcacagaaaagcctgggcaccttctgtttttaagaaaaatgttagcaatcattaatatgtagagtttccaaataattataccttagaagacaagtccataattagagagaggcttcaaaatatttgaggtggaagtagagaaagttagagaatgtatatattcatttaggaatttcaaatgcacactgtaaatattattatacattagcattcatcatggaaaacaatgtcaacttgtacattcatctttacaaacaaggttggaatagaccaaaaccacgttggcatcctttttactctgactacatttacaatcgtggcatgaagtttgaagaattaattcttaaatacttaaacttatctttcactaggcacctgaattcagtaataactttaggaaaaactactgtctagagtttatcaggaaaatgttttcaaaaattttttcagtactacttttgagagtcagcaaatagtccagtttcaaataaaaactcatgaatttcactaatcctcaccgagccgcccaaaatgagaagggaaaatacagacacacagaatgtttcaaggtatcaaaaaaactaccaagaaaaatctgatacattatctaagttaaaagcaaacagaactagagacaacttaataatgaaaagtaggaaaggccagtcacaggggctcatggctgtaatcccagcactttgggaggccaagacgggtggatcacctgagatcaggagttcaagaccagcctggccaacatggtgaaaccccatctctactaaaaatacaaaaaattggctgggcatggcggtgtgcatctgtaatcccagatactcaggaagctctggcagaagaatcgcttgaacccaggaggcggaggttgcagtgaaactccgtctcaaaaaaagaaaagtagaaaaaaacaagaaccaacaactgatgaataactaatatcctaataatgaaacaaagttttaaaaaagtagagggaaaagttttaacagatattttccccttctaaatattagtgtaacatttagatttaacaaatatagtgtgttaactacagccatattttttttcttttaagggcacatgtattaaaacaagcaccctcaatttttatagttaatatttttgcttctttagtggattcttaaaatcttgttcaaacaagtataatgcaatctcatagatttaaatatcgaaaacaaagaaacaaaacaaacctatttcctaggaagcgagcactaatttaagcatgtgctcaaaacaatacttaatctaatagaaagttcataatttcatgaaaatactttagaaatttttttattatattttaagttctagggtacatgtgcacaatgtgcaggtttgttacatatgtataaagatgaaatgttttcccacaaaatctaaataaatcaaacatgctcaattctaaactaaaaaaatctccgattcaaacaataattataccagggataattatatgacctctatacatcagaatacacacatatacatatatatcattatctatttaaacttaacagctttcagaaagaaaaatatcctagaaatttataattatgtactgtacatttggaagtatactacactgttttaaaataaaaagaatatccagaaattctgaaaatgtcaaaatctcttatccaagaaacaaagcgatatacagagccaaaagaaattaaacatttttatagaatttaattctaaaatgacacttatttatcagagaaaatgacctcataatgttacaatcaaccatttaattatctatgtctaacagtattaaaagtgtatttattcttgcccaataataaaaagcagagaaaacccaatgacaccagtaaaattagtcattttctctagaaataatgtttcaacccaaaatataaaatgtgaattaagtttatattttgaaaaaatgtagaatcactagtaggtatcctatttactaggctacctgaaaatatctcttacttgtttagaagccatcttcccaagaaacctcatgaacaaagctctctggaaccaaactgcagagcttcaaatcccagcttcagcacttacaggctatgttatttcacctctttgaaccttgatttttcagccacaaaaacacagatactactacttatctcacaggattgtttaagagaccaaaggaagttactaaatgtaaatcacttaaaatagagtctgacacatagcaaatatttaatagatgttatttactatctttataacattacaatgtttggcacacactaagtgctcaattaaaacttgctaaatggtgtacagaaaaaaaatgtggttttcacagcaatcagagtatatctaattttcatagtaatcagaataaatttaaacctaactacaaaaatattttcaaattatttaccccatttggaccagggatcgtggctcatgcctgcaatcccagcactttgggaggctgggcacgtggatcactcgaggccagaagtttaagaccagcctggccaacatggcaaaaccccatctctactaaaaatacaaaaagaactagccaggcatggtggctgcatgtctgtattcctagctacttgggaggctgagggacgagaatcgcttgaacccaggaggcggaggttacagtgaaccaagatcatgccactgtactccagcctgggcaacagagtgagcctctatctcaacaaaataaaaaatatatatataaaataaaataaaaaataaaataaaattatttacctaatttagcccaattcaggaagttattttgtaatcatgtattattaagataaatgaaaaactatttcattcaaatatttaagtactaaagctaaatactggggctacaacaacagagacagttcctgagtcacagaagcttaagctagtaagaaacttaaaagtaatttgcataatttaaaggaaactcagaaacctttagtccacacccttcatttttaaaatgaggaacctcaagtccagaaaagttaagtggtttggctaaaggtccacagctagacagttaagggtcaagactagaactcagatcttataattcccagcctaattcactacaccatactgactcaaagtactcaatatgaaacggagattaggatcctgatctgccactaacaaaagcccttctcaattatttacttattgcattaatgcaaatcaaataagcttcaagggagttatgagcagcaaaaaatatataacctattatgattacttaaagcatttgcagggcggctgaattaatagttcttatgtcagttgtaagtctgcttctggtctatcaggttagatgtcacattctcagcttctatgttgtatttccattctcattcattcccagatacaaaaataaaacacaatatgtatcggactgccaagtgtgccagaaatttgaaaggaaaaaaaatctgcaaagtaagattatatttaccttaaatgtaccattttgatttttcatgtaagaaaccaaaaatatatccactggtagaagtgctgatgtgataagtgcaattgctagagaaaaaattgctgttatggtggagacaacttcactttcccgccgactttggtatttacgaacatatatccagcagaatgccaaaatagcctgaaatagaacaaaaagagatgtttgttactacccagtgtattttctctgatttttgtatgtgtttgaaagtttctagcaggaaaccttatgtgaagtaaaggttattttagttgtgtaaggaaagcccactatcccttaaaaacttgtccaagatgtataattttcaaagcctacttcatgaatgcagtacatcacgtatgcatacacacacaatactattaataacagtgctcagctacatatttcctcattaaacacagtgcaaacgttaatggtttcacacatcacagttataactagctttgaatatttttttccctgtagatttttccaacctaaaagagatatgagtagaagctgttctattctaggcttattactgaagcattacaaaatataacttggatgaaaattaacttctgtcctgttctgacagttcaagaatagcattgagctaaagattaactgccagtaatcaccatgcaattatcacattatactataatttaaattttaaagagcattaaacaaagaaaagtcaatgctgaaaatggatacatgtgcacagcaaggagctttccagtgaaaaaagttcactcagaggtagaggttgacatctctagtcagccaagtactcttaatagttaccaatgccattctagtgactaacacagagcataggactttaatgattctctaacgttaggaggcatcggaatcacttggaggaactgttaaagcacagattgctaggccccatcctctgagtttcagattcaagaagtctggagtggagccagaaaatctgcatttgtaacagcttccccaggtgaggctactgctggtccagggctgtattttgagaacttctactctactcatagggagttgcagacagagactgtgttatttcagccttcactgtgagtcagaatcacctgggtaacttttaagtacccttataacttccctacattccccaatcaattctatcaacggagaataaggctcctccaggcatcagtactttaaatgcctgaggatttcaatctgagccaaacttgagaaccattgttctaaataagagctctggtagttttaaaagccttgttttgacctttcactttttcaacagcggttactttctttctgagcatcctacaattccagggcccaaatgaaactaataaaaccaccaaactagttttgcagcttccaaatccttctaccgcaagcaagatacaagaacaattccatcatctcagaaaattcctttgtccctttgtagttaactcctctctctgcccccagcccttgagacaggaataatgcatgatgttcacaagggctaaaaaattccagagagcagttttccatgactagaggctaagggctaataagaccctgaaaaaccagggtgtggaccaagctggttaagacccactggacccaacatggcaatggatttgacctaggtttcacctaggacctcattatatgctcattaacatgctcaatcacacacctaccagcaccatggcagttccaagaccactcatatttgatgtaaaaatgggtggcaccacaatttcaagaagtctctacttttttccaggaattttcatgaatatgtcccttggataaagaaacccataaaggtagaaactccaaacctcaccgtgtgtctctctcttaagaatgcccacacgagtgtgtacttttccctttaataaatctccacacttacactattttctgacttgccctttaatgtcttctcatgacagtgtcaagagcctgaaaaccagctggggttgagatcccaccagtgtttggggatctccctcagcccaccagtatcaccctgacaaccactatctgttttctgcccctatagtttctgccttttctagaatatcataatgccttcatatagtatgttgtcttttcagtctggctagtgtcatttggcacagtgcatttaaaacccatccaagttgctgcatgtcattgcttcatactgctggcctttcaactggtgacagaatagcaggaaagaattgactgagaagggagttaagactttggaacaaacaaacaaaaaggatctaggctcaaattcttgattttgggaaatttatttttcataaaatgtgactttgtattaatatttgaatgagcttgtttttaaaggaattcataaatatttttaacattccccaaattcattctgaagtctttgaaagctgagtctcatctttatatcctcagcagtacttgacacaaagtgttccaataaattttttattggatttcaagaatgaaagaaaacctgcattttgtaggtattactgcaaacaaaggattttgccaatatcaggcagacaagctaggaaacggcaaccaggcagaagagttaagccagagattcccaaactttttggtctcagaatccctttataatggttttaaaactgataaccttaaagagctttttgttcatgttatcaatcattactacaatataaaataaaaccaagtatcctcgtctataggaatacttctttcataacaagttataaggattaaatgagatataaagggtttaccatagtggctggccatagtaactgcttaacaaacagtagtagttattagataatttgataaaagaaacaaatatataactctgttaacaattataaagaaaagtttcaaatagtccccccagcttctcccaaaagattcaaaataaattggtctgaacactgagatttttaaaactccccaggtggttctgatgaaaggtcaagtttgcaaaccactggggcagaagaaggaatgagaagagatgaatcttcattaaactaatgagaatagatgacatactgtatgggatcttgttaaactgcagatctgattcagtaggactggggtcacatatttggtatttctaacaagttcccagatgatgcccacactttaaggaacaagaataaatttgctttacaaaaatggagagtctcctattgtaatggcaaatacaatttaaaggtggtgtgagccaaattacagaggacattgaagctagatagaacagtttagatttgatatagtaaagacagacatagttagattacaggcatgagataccaaatctaacaattccttatgtgtgaagaaactgaagtccattctttttgcccacgatcacaaaagtaggcaacattcatgtcctgaatctttttttttttttttttttttttgagacgaagtttccctctgttgcccaggcactatcagagcttgctgcaactgcctccacaaaccacctcctgggctcaagcaatcctcccacctcagccttctgagtagctggaacctcaggcatttgccacctcgcccggctaattttttgtatttttagtaggaatggggctttgccatgctgcccaggctggtctcaactcctgagctcaactgatccacctgcctcagcctcccaaagtgctgggattacaggtgtgagccaccacacctggcccatgtcctgaatatttagtagatgattggcagaagttctccaagtgtgaaatccctaggccctggtagtccccagaatcctttctggagattcagaagttgaaaactattctcataataaatactaagatgctatttgcctttttcactgtgctgacatttgcactcatggttcatagccacagtgggtaaaactactggtgcattagcgtgaatcaagacagtggcaccaaactgcaccagtaatcattgtattcttcaccacaagttcaaaaagggacaatttaaattaagactgtgcttcacaaagcagcataaattcattttattgaaattcaacccttgactctttttaatactttgtggggtaaaatatgaagcatgcgtacataaagtcctgctgcataccaagatgtgatggctatctccaggaaaagtttagagttaaaagctaaaccaaccactcttcaaggaacaccatttttacttgaaagaacaattgtcaaactggttattcagacttcgctttttggcagattttgtcaaatgaacaaagggaatctatcacttaaagaaaaactgacagtatttgataccaatgataattatgagtcaaactttcaaatgaaaattggattttgaaagacttacatccacaagtatgagcttgacaactcttcaatacttagaattttcagagacatttctgacaagatcagttgtaatttaatgaaatgtgatattttgatattgtgtaatgaaacgtatccatatttaaaagatgtgcataactcagtaaaccaacattttctaagtggccatggcatcatgttataaaaccatgcatgggtaaaagagcctttcaaagtgcaagatgggctaatggattttaatgtaacaatgaatgaaatgctcattgatagggtttcagattccaccttgcagctgacatgaatcttccacttgttgagctttggtgtagtgtcaaaaaacatccacaattatctgaaaaacgctcctctgtttctgactacctatcattgcagctgtattttctccatacacttcgactaaaataacataccccaaaagactgaatgtagaaggcaacaaaagaaaccagcctttcttctaataaaccaggatttaaagagatttgcagaaatttaaacaaaagtccttcttcctaatgcttttatccacgacaacattcaattctgattttatttgtccttgctgtaatattgccaacttaaatggcctctcttcttcatctatccaaactctaccacaattctcattttcttccaatattgttgtctattctcttaagtcctgctttatttatagtcacactttggctttcggtccataaaatacatgtttcaagaatttcagttttctcacttatcttcaggccctctttaaagccgtattttgtttggtttacatcctcttacaattcacaccacttctgtaccgtaaatgtttattaatttataactgccaagatagtctcacgtaactttcatacattacatgcttatttatttttttctaaacaaactaaatctgatggactggaaaagccagggggctctccaaatacaggactgggtggctgcagagaccacagtcaacctttagggtttcatttcctccaagagaggactaacatgttccagggtaaaggcagtgtttttatctgtgacagtgatggcagtaacaagaggatccttttcttaaattttcacaccattcttttcttttattttctttttttagtctctactgcaaaaatctactagaacatactacataggtaccagacaccaactggatctgacaattaaagtaaaaccaaacaagcctgatttccagaactggaggtttttgttttgcaatgcaaaaaggtcaaaatacgtgagaacagaaagtaactacagcctcggacgatgagaaaagagaagatttgagaaggtagagaagttatgaaaggaaataaattgaactcccaaataaaccaaagggttttaatatgaacagggaagtaatagccaggccactctgagacatttctatctacactttgctcactgaatatgcagaaataagatcgttggaaaagaaagcacctgaggtcagacaggtagtagtatatactccgatactggtaataaagagggctacagctccgccctccacaggtatctacaccaatcaaaaaaagattagaagagaatgtgacacctggaagtcagaacgagcaactcacgtcatcaaggcagaatcacacaatgggcacagaggttggagactcactagccccaagggtagggaaaatgagggaaaaaacatacagagaaggtgacaagtaaacaacgccagcgcctacttaacttgcaaagatccagcgctgccgccccacaccgtgtgacaatgttttacaggggacgaaaggccaccacatacttctcaaccccgagggtctcttccgcccccaaaccccaccggccccattgcccaagtcagcgatgacggcaagagcttccaaaaaggaccctgcaaccctagacgtcatcggtgaaatgacagcaaaagagaccggaaatcgacacccccctgcccccgccgcccgcccaagcccccaacactaaggagccctccacagtccaagctaaaagcggggcggggcgaagagggtctccggggcccggagaggccaactgcagggcctgcccctcccttcctcccccagtccaaacatggggaaaactccaagcgcctcccctaccagtagtaagaggccgaatatgcaccagccgatcaccagctccgccgaggccgcgccagaagtcgccatcttcgcttccggtccagaccaacctgagcgcccggggtggggaaaggggagggggaaaggggagagagcgcgagatatactgcacccgcgcaccctaaaggttaaaggggcggagggggaggagcaagt

SEQ ID NO: 52 - DNA, 95 bp, Homo sapiens
  source 1..95: mol_type = genomic DNA
tggtgccaggggccggctccgggctgcactgccgaggcactgcacccgcctcacacacgtgcaatgcaacagcaatgcaccgcggggccgcccgc

SEQ ID NO: 53 - DNA, 19789 bp, Homo sapiens
  source 1..19789: mol_type = genomic DNA
ttatgtagcattcatgcggaatttattatacaaagaattttattcaattaaacttgaaatgcatctggattcttaaaggttcagtagtgatcactgggacagggcgatcataaaactgaatgggctgtcggaaggtgtcgaggcagcagcaagggtgacattgccactgacgggggcttccgaactggggacgtttgtcattgggatgtgttacaagttcgggctgtggaaattactcgatgaaaaacgcacattaacgatagccatgaaatattagttaagggaaactaggttgagaaatgagacagcaggatctatcagagcctggcattgttcgccacagcccaggtagtgattaaaacgactgtcaagcggcagtgggtgggagctgaggagcacggggctgtgagtgacgaggccgcgtccggggctcacatcttggcactgactccccaggacaacttggttccccacccaatgcctccttccagggctgctatggggttcaaatgagataatgtctgtggaacacttggctcagggcactgcacatagcaagcccttccacagtgcgggctggtgtcactgtgactgtgggcttctctctgacacaagagccaactgccagcttgtctctggaaatgacactaaacaccccattccagggagcctgacctggaggcggaggaggcattttcatgggtgcaaaatgtaaggaagtgcccacaaactcagggatcgagtagtatttgtgtgcaatattttccaaaatcaaattatgaaaaaaatctacgataagcaagggatcacgactttaaataaaaacaggctgctgtttgtttcaaaaccccgtgttcccgtgcaatgggactgattgtttctgagagttgccagtggtgtgcaaacactggggcagcgggggcttcgcagtcacatttcctgactgtagggctttcattaacttttcccacctggttcaaaatatgggaggacatttgctcagtgtacagaggggtacacatcttttcttttgcctcgggctcttgatagagcttttgaaaggcactgcagaagagcaaatgttttaaacaccccatccttccagcccccaaagcaagctttctccatttttcccaggttggtagcacaggagagaaacacctgctgagtggtggcatctgccctgcacccaggtggtttctcagagaagtgtttgctggtgaaccgggagacagatacagaggcgggggtctgagaacgcgactgttaacatccaggctgtgacacccggtcctggaaggacaggacttggcaacaggtgaacggccttgtttcaaagattgtcactttaggatgttgtatttactcaaaaagctttccttatcctttggaggctgtgctttcccatggctaggcatgcagggctgctgtgttattttatatatatatatatattccaggaagattttgagattttgaggtgtagacagaattgagtgattcgctgcaagctctttgaacatactccctgaccgagccttagtgattgcgttttcagggtttttttttttttttttttttttttgtgacggagtctcactctatcagccaggctggagtgtcgtgtcacgatcttggctcactgcagcctctgcctcgtaggttcaagtgattctcctgcctcagcctcctgaatagctgggattacaggcacccgccaccatgcccagctaattttttttttttttttttttttttagcagaaatggggttttaccatgttgaccaggctggtctcaaactcctgacctcaggtgatctgcctgcctcggcctcccaaagtccgttttcagctctgttttgcaaacactgagcaccgactccgtaccagacctggtagtgacgatgggggcagggaggcacggaacaaagccacctcctggaaggcattcacacactcctggtcatctgcacctcacccaccctgcccaaggctcaagagggccatcacagcctgtcagcaatgaaaggacccagaagacacaagtgaatatacctggccctcctgcaaactttgcaggccaggtggtaagaatgaaggcaaaaatatgcacgtgactaagaaggtaatgtttgctgacttgccagcaagaaagatggccggaaagaccagctgtcccgagcctagcgcggtggcccatgctaagcagccactcagtcaatatgtgatggctgaatggagttcgccaggcatttcagccctgaaactggacaagagcctgcccttccaaagtcatttcctgcaattagcagcctgcagtctttaggttcttggggctgcctcttctgcccttcataaatattgcctttcccaaggacactgctggcactggcagtgtcgtttcatagcaggagggagcagcagtgacaactgaaataaatacagccgtggcaccgatctcagaggcataagccagccaagtgcaacatcggagaaatcagtctggtggatgtcagccttgctggaaactgacaacctcattttctcaagctgaagatgctgcaccgcagacccttgactcagtccaaccagacagggaatgttcaccttcaagtggtagtgttgttctcatcagcatctccatccctttcagagggggtcctctaagctgcacccccatcacacacacttcaatctaagccaggagtttctgagcctcgcctgtcaatctgcagctatccttcccccacactttggcggtgatgggtggctcagaggtgactaaacttccaaatcttgtccgccttcccctttacaaatgtgacatttaaagcacctttggcacaggtaaatcacaattacattttcaagggcctctggtcccattccaaatctgtgaacaacctgagctggcagtgggagggctctctctcacacacacacacacacacacacacacacacacacacacacacacggctccagcctttccaacttttattccttttccgcacagctccttctcattgcagcaatcactttacctgtctttcctgcaatgccaattcattcccacatccctccaagacccaggagagcttggggaagcagggtcagggacagaatccccaaagggtcacagtcccttgaggaaggtggcaagaggtgtagatcaaagctgagctgggacaaaaggctgctttgagcctctctgggtgagctcttcaggaaccaggaccccagaagggcaagctcctctctccacggccatcgccatggagggatcctccaagctcccactttctgtgatttcagagtccctcagactcggccgatgggtcatttttcatgtatattttctcttgattcccctccttcatggctgcatatctggctagcgtgaagagatagtcactgagtctggaggggcagagagagagaagcaaacagaatggtttgaaatgagagatcaacgctaactgggtcttcccatatccgcctacaaggaggagatataaatgacgcactctgggcacattgtgcagggagggcgggggcccagccatcttgcacttaatggatggcacacgaggccagctgctgtgaatgccaaggactctactccagtgtcaaggctggggccattcctgcaggatgaggccattgccccggccctaccccatggggcagatgactttggactcctctctgagccggtttttgcacctttgagtgatcagggctcaggtgcgtgatcagtttgggtgtttcccaaactacagtgtgcacaggcatcaccaggggatctcagcgacgtgcagattctgactcaggagggctgggctgggctgggcccggggctctgcaggtctagttcctgccctggctgatgctgacactgctggactaggccctactgacattctggatcattctgtgtgttcggggctgtcctgtgcatcctgtgcagtgtaggatgctgacagcacctttggtctccacccaccaggtgccagtggcacccctgcacccagtgtgacaactagtaatgcctccaaacatcgccaaaggtaccgggtgagaagcacaggctggagcactctagagaccagagcccagcccctttcccgcctcctcctttgaaccaacagcaatggtcatctgtgcatgaggccttctgcaggggcagcagtggagggaactagaggacgacgccacgggccccagaaggcgcttacgctgtcagctcttctgccttctgctgtccgcaccttttgctgtttcactcccagcacgaggcaccacgttcctccctctctctctgccccagtcttgccctcagaggccagctccacaccacatcctcctgagtcctcccctgactcaggccccctgggccccacggctggctctcaggaagagcgaaggggaggttgttcagggtattttacccctgggccgcatgctcctggagggcagtggtgtgcctgttgcttgttggctctgtgaagcctcactgaggagatgaaatggcctgtcccgtgcaatgctatgggaccgcagggttgctgctttgaaggtgaagtagacctgctcctcactcccggcgaaacccccctcccagaaggaaaggagctgctcaggacccgtcaaagcgccatgtctctgggaggagtggccacagtcaagggcctgaggtcactttctagacacccaggacagctcctggggtgcagacctgctcccccagctctctacctgcccccaggctctggccttgcccacactgatgccacagaagccagggctggggcaggaacccgcagagcaggctttgggccaggtgtggctccagcctcatgggccggccgcgaggcagaggaagccctccctgggctagcctggctcactggggcctgcatggggtcccctgagcgcagcttggcccggctctcttgttggttcatgctgccgcaggccctctcggggacaggaaactggctgagagagggcctgaagcctggctccctggtcagtcaccaccgagaggcctcccctgagcacccagcctctaagaacgccctttgcccccgcaatgccactttgcacttaggtttttcttcctggtttttacagcagcctctcccaataagatctaaatcttatcgggacaggcacagggcccaccttgttcaccactgcctcccctgtgcccggcgtggtgcctggcacagagcagatgttcataaacactaagggaatgaaggagggggtgcgggaatgctgccccacactgcttcccggaccgctgcaccgctgctacttcccacagatgagcctcggctttcagagaggaacccccaggttccacgcgagtacctgtttaagaacttggccacgttcgcatcggtctctcccatctggacaagaggcaccacactagaaagggaggagacactgagtcacgtgacattatggggctcaacaggctctgacctgggcctaaaccttgagcagcatttcacatcctgccaccgctcaacctgaacctgcacaggctcggccggcagtggagatgacaaatccatcacaggtgggtttaaacaggccatcggccccctttccaccagcacatcgcaggacggcctggccaaggagggatcaaggatggctggtgagttgagggagccacctggcctacaccacaccccagccagccagcttttgtaccactggacctgggtctgggtggggtgaagttggggtggtctgcctctagccttcaaaggaagtgggggcctgacccttaattcccaatgggctaaactctaagccccttgtacatcatgacttagaacaacttcacaggggagaaaaagacccaggcagaccaagctcctgattccgcaggattctggattcctggggtccatgccagtctatttgcagatacattagacactggacggccatctgctgggcaccagtgtggtggcgggcccttgccgagcctttcccaggtatcaccctgtggcataccccttgttggcaagccagctacccaaagcccagcctcagggttctcatccccacccaaagccatgcacccggctagcggcccaggagggtgtgcacccaggcctgtcacagagctccaggctgtctctagtgggcaccgcatgctcagcgaggagcttcctcacccgaggtgccccaggtgtgtgtccccacctcaggacaatctgcaccttgccactgccatggctgcgtaactctctgctgcatggaggacctatcagctgctccgccatgcctgttttcggggcctttgggttgtttccagtttcttgctattatgagcactgctgatggatggctttgtacaaatgacagttttttcttttgaagccaaagcttgttctgttacctgggatctctaaggagctatctgggcccgagagcctttcataaagaacaaaaccttagtggtgtgggaccgtggaagagctcaggcttggcccagacagacgtggactccaatctggattctgctatcaaccatgtgggggaccgtgaccatggtgtcatttctctgagccacagcttcctgactcctgtaaaacagaggccaccaccacctctctcccagggctatcaacaaggagtaaatgaaattatgaacataaagtgccagtccattggatcaaagtagggcttgctttctcttctctgtaaagctggctggcagcctggtctctgagtggtgtagatagagactttgctcattttcttctaaagattccttgaaaaggctgtcagtagctttggaggaggtggtggctagtctgctgacaacgtccacctgggctccccacagccatgcaggcctttcaggagccttatgcacccagcagccagcagggtcctttcatgtctacccctgtccccaagatggctgaggctgagaacccagcaataacttcctgctgttctcagaatacagggctcacaaacaaggtgcaattgtgttgtctgatagtctatttggtcacatgtcactgtctccacttcacaacatggtgctctgaggacagggacttggtctgtcctggtccccgtctggcacagtggaggggcccagacaaggtctgttgatgtgtggctggatggctcagagatggccctgctgtacctgcctcctgcccgctgtgcagaggcccctctccctctccccatctccgtcctcctctccctctccctcccccctcccccttgttcctctccctctcccttgggccctctccctctctccagccctcttaccgtctctcggcccggcggcacacggcccggcagaaatgcagcgccgagctgatcttgcctcccgactgaaaggagaaagggacattgcctgagcagggtgggaaaggtgtgcccactgcggacaggagctcctctgaagtccagccctgccccccaaaccgggcagtgttctgcctccaggagccctgccacggcacacccaccgggcacgctgctccagagtgggcagggctgggagggaccggtgaggacctggagggacttggggaactggaggacagcgtctgtcactgtgaaaagagggatttattcagagcccatgtgtgtctgtcactgaacctgcctgcagccgcccccggttaagcctgcccagtacctacaggcaggatgaaggccgtgagtggtgggagctggctggtgtacttgtcgatccactgctccagctccaggatgggccccgccttgaacgtggtatactctgaggagccaaggagcagagggaactgccatgaggccatcacccaccagaccatggcgggaaccacccccgccgcccttccacctgggtgtcccgcagactgcttccactggctcagaaggtaccttccctcccaggagctacgagcaaggctaactgacccacccgtgggtccctgggggcctgggatcccagatggtgaccctaggagagtcccctgaccctagggccctctgaacacccacaggagtttgagaattacttaagtgagcctcccgggccgaggagcatggtgtcgccagggccgagccgacgtcctgcaatgtgcactggatctggggggcgacagaaagtgacagtcaagatctatgtgagatgggctggacagagacaatgtgcagaggcgccacctaatacgccggcaaagcctgtgccagctagctcatgaagggctgtgatatggtttggcaatgtgtccccatccaaatctcatgttaaattgtgatccccagagttggaggtggggcctggtgggaggtgattggatcattggggtagttttgaatggtttagccccagccccctagtgctgtcttgtgatagagttctcatgagatgtggttgtttgaaagtgtgtagcacctccctcttcacactctctctctcctatcagccatgtgaagatgtacctgcttcccctttgccttccgccatgactgtaggtttcctgaggcctccccagaagcagaagcctgtacagcccacaaaaccatgtgcagattaaacttcttttctttataaattatccggtctcaggtagttctttatagcagtgcgagaacagactaatacaggctatcagaccttgaactggctgacatttgaaagcaaactctgaactttcagcacaacatcttcgttggacacccagccctgctgagggggacctggtgtggctcttttgcagtctgagggaggaaaaggctcccatgggggcagcagctgggttaagcagatgacacgcatcacacacccagggacagtcaagaggaaccgtctgggctctgtccacgtctcctgtgcacctaggccctgtgaggttttcttcttttctcaacatttgacagctttggttttctaacctgtaacagttgggccaagaggtcaaatgtgacagtgctttctaaactctaaaggacaaggagcttggagaatgtagtcagccgaggcgtgtggggattctgggagcaggaagcctggctgggtgaggcctgtgctctgtccaggtggggagtgggtttgcttggaacagaagtggtctgttaaggtctgctgcaggactccaggcccctgcatgacaaatgtccaacagctctcatgcatgtgaagaccacaagtaccacctctgactttgtgcccagccagggtccactcaagctggatggtgggctaccaggagggtgaaggtctgcgacttctgacctctcctaagatggccactgtgacagcattcaagaagcaggccatggtgtgtgagagcagaggctgcccatccagcactgggctggaaccttcccagggcttctgaccagcagaccttgggcaagctgcttccctgcttggggtctctgcactttcacagtcaaagcgggagtgataatactacccacttggttggccacgtgcagcgtgtaccccaagggctggggagaaatggcaccagtttgggaatcagattccagctctactgatgcctggctgtgggggctgggcaagtcagcctttctgaggctcagtttggctccctataagctgtggacattaacttccacctcacgggtgtctgtgagggtgaaatgggtgatatgaggaaagcagtggcattgctgcccggcctcatccacaggccctgcgagcggctaccaggccaggcggggctcccaggtgaaccagacactgtccccgccctcacagtgccaaggctgggtgggaggtggatgggtgaacaggttaacaccccttgtgatgcctgtggttagaggatgtggaaatccaggagcagtgcctaacccagctggagattaggtggccagggaaggcccttgaggaggtgacgtgacagctgcgacccaacgcgtacagcagacagaaatgaccgctgctaccgcggctcctcaggaggttgaaagccttcctccaccacacagaatgttctggcagctgaggcttcctcctgcagccacagcctgtggcagccccacctactaccctccgtctgttcccaggggcctgagcaggctccagcctgggcttcagaacggaagtgggaagggctgaccctgcggggagcggtttctggggacctgggtccatgtggaggtggaaagtgcggcaccctgggcattctggggtggtgaccctgtctccgtgcttgaagttctctgcgtgggtcagaggccccctccttcttagggaacagaacagtgacactgtgacgcatgagtcccacgggctgagggctcactgcagctaggcttcccaggttccctctgcatcgggcatgagcgaggcacttcacaccggctttctcagcctcggtgctattgccattcaaggccgggtcattcttcgttgacgggggctgtcccctgcattgcaggatatttacatgccagcaacacccccaacacccagatgtggcaaccaaaaatgtctccagatattgctcagcgggccctgaggggcagaatggccctgggttgagaaccgttgcattttaaattccctcatttagtacaatcctccccactcgcctgtgaaggaagattatatgtctccagttgtttgttttggagacagaggtttttttttttttttttttttaaagacaggatcccactctgttgcccaggctacagtgcagtggtgtaatcacatctcactgcagcctcaacctgtaagactcaagcgattctcccacctcagccttgtaagttgctgggactatgggtgcatgccaccatacttggctaatttttaatttttttttttttttgtagagacagggtctccctaagttgcccaggctggtcttgaactcctggcttgaagtgatgctcccaccttggccgcccaaagtgctgggattacaggcttaattgaaccatggtgctcggcctgagacagggtctcaatctcttgcccaggcaggagtgcagtggcatgatcacagctcactgcagccttgacctcctgggctcaagagatcctcctacctcagtttcctgagtagctaaggctacaggcattcaccactatgcctggctaattttcaaatattttgtagagtcagggtcttattatgttacctaggctcctggcctcaagtgatcttcctgcctcagtctcccaagtagctgagattgcaggtgtgagccaccatacctggcctgtccgcattttacagatgaagaaatggagctcacagagggagagtaactagccccaggtgacacaaagagtaactggtggctggatgctgagtcccgtgatggccaccggggctgaagattcccagcttgggtgagatggtgttactcactttctgaagctcttcggcaaatgtatggcccttttctgtgactaattccagagcaaacctatgaagaaaaaggaaaaagaatttgcctgtaatgtaatgtccctaggccctgtcttgccataaacaatagattctcaggtggcaggccatttagttaatttagctataatagccatgttatttttcttgctaacaataagaacattatagccttccatttgggggcggtggtatttgtttcttgaaatgccttttcggatgctcattatttccagtcaagaattccttttgaacagctactctggccaggcccaggagagtcagtggtgaacagaagctgacccaggctctctccagcaagttggtgacagggtgagcagtgacagtctcaagtgctggatcctgagctctgacccgcagccctgtggtgataggtgagtgggaaccagacagacccaggtgcaaattctgcaccgctgctgagtgtctctgggacttcaggcaaagcttacaccttcatgttcaggagcgtgatattcaggagtgtgataggtaatcagattagacatactcctgaatgtgaaggtgcaaactgagatcagtgctctgaaggaaagagcaatagaagcctaatctgaccttggctagagaggcagggagggcttcctggaggaggtgatgctggaggggagactttgaaggctggggaggacttccctcataaggcagagaaagcaaactgccccccgacacaggtcaggaccctggctctgcctccctcagaaccctgcacttccctcctgcaccagtcagtgccccagcaggagacagtggcgcgctgcagggattcctggaggagggctttgggaagggacaattcacagaggtatgggcagagtttcagggaaatgcaggagcctgaagggcaagggtcggggaaggtacaactcaccctggagggagctgaattctggagtcactcagcagggagggagttaggtagggagcccagctgccaccagagccatgcaccactggggaacagggtcacacacactcatgagctctctgcactcactctcctatcacctactggtgcctcccactggctggacccacctgaatgccagaagaccaacgaatcgaggtggcacagccaccaggtgataaggtcagcctcccatgcataaagagaaggtgaagagaagggatttgaaagggccaatggagaatatccagcccatcttcctggcacatcttacagttagaactaaacacaccagtatgtgattcccgtctggtgtgtcttcccctctggaccaaagggagggctgtgcaggctgggacacagtctgtctccatcatagcggatgccccatgcctgcctcacaggaggtgtgcagaagtacctgcttgccgagggatgccccgtgaccaggccagtggcaggccccaccctgggcacttgccccaagcctgctcccaccctcgtagctgcccagtgagtgctgcctgctccctgcactctgcagctcaggaaggtggggctgaggttctgctccctgcactctgcagctcaggaaggcggggctgaggttctctgttgagcagcgcctcgcactgcagatgcttggtcaatatctgaccaaggaagaatccacaactgaggtttctccaacctcccgctcctcctcaactgagagacgatggctcgtgttttagagctcattagaatagctgatgcgagaactggccttttctccctttgcccacttggtcttgtgtctgccctcttctggaccccctcccacacacaccaaggggtttgtttgccttctctacccggctggctgactatctgtacctcccattatctgtcccgaaaatctcacctagtcaggcccgccatggagaaatggtagccaggaacaggtaagtgttaagaatagtaataatgaggagactcgcttgaacccgggaggcagaggttgcagtgagccgagatcacaccattgcactccagtctgggcaacaagcgcgaaactccgtctcggaaaaaaaaaaaaaagaagagtgataatagctaacattatttttacttgtgctaggcactgtcctcagggtgaaacatggaatcatctcatttaagccccacaagaacagtgagatgggaattatcatgatgactacttgacagaaccgtaaactgaggctcacagaggccacgtgatttacctgacgtcccagagacaatcagcagcggtgctgaaaatttgcagctgggtctgtctggctcccatgcacctataaccccagggccccggggtcagatttcaggatccagcacctgagactgttgctgctccccctgtcaccagcctgtagggcatgctgggcagactgtgctcctgcttgcaaatatttgctgcccctcctaccccgctgatgtcaggcatgtgcacgtgacaggctctggccgctgaaatgtgaataaatggaaggcatcattcccaagaaaggtttgtcttttggagacagagtcgtactctgtcacccagactggagtgcagtggtgcgatcatggctcactgcagcctcaacctcccagactcaagtgatcctcctgcctcagctttctgagtagctgggactacaggtgtgcaccaccacgcctggctaattttttaacttttctttttagtagagatgaagtcttgctatgttgctcaggctggtctcaaactcctgagctcaagtgattctcccacctcggcctcccaaagcgctgggattagacatgtgagccgctgcacctagtcatttttttttcaacttttatttaccaacaaagtttagtctccataaagactgtcaaaaactgccaatgttgactatatttcaagtcatcatggtggggtagtgggaaaagttttcaatcagcaataatcacatcttgggtaaacctcactggcgacaacactgacactgcacaatcccctggcagcgtcaggagccaatgtgagcttcaccatgacctcttttccctctgccacaatgactgataattgccccaggcagcagctgtactagcagcctgtgtcccagaatgaaggccgcatggagccaaagaatataccctgtgatgggcatgaagtgggaacagcaagtccatctttggtgtcataagtcaggagattttggggttgtctgtgatcacagcatgacctggcccatcctgatctggtccatccttgagtccaccttctaaactttggcttatgtaaaaaacaacagtcacaaaagggatcacattggatgtactgtgcattatactaactcacctctttcactcagtatactaacctcagtggcacacacaggctcacctgaaaagtgagggatgagagggaggcagcttcacatggcatgggccagaggccagcgcaggcacaggcagggccagaagggaaaggagtctgcagccccacagccttgtggagctgaccagcctgtgcttcagggctgaggaaagttcaataagggctgacaacctccgaggctgctgcccagcatgcgtgagagcttcacattcattacgtttactcatactcgactcaaacgcaacctcaaggccaatcctgtcccccttacccaatagctgaacttaattcatctgtagttcccacggcttcaaacacttggtcatctttgggtctcctttctcctgtgaaggtactagaaaaccctgtggaaaaaaatgtttagccacccaaattaagattctgttttcctgatatgctgtttttttttttttaaactttcaaagattttaaagaactttctcttttttgaacagtcactctgtcatccaggctggagtacagcggcgtgatcttggctcactgcagcctccccctcccaggttcaagtgattctcatgcctcagtctcccaagtagctgggattacaagtgtgtaccaccatgcccggctaatttttgtatttttagtagagacgggttttcgcccatgttggccgagctagtcttgaactcctggtctcaagtgattcacccgcctcagcctcccaaagtgctgagattacaggcatgagccaccgtaccaccccttaaagaactttcaacttgaaatatagcatatacacagaaaagtgctcaaatcgtaagtgtgcaagttggtgaattactactaactgaatatacctccttgatcagcacctagcttcataaacagaacatgagcaacaccctgaaagcccccatgtaaccccttttagttgccactccccaagggttagccactatgctcacttctttcctgatgtgcttttcaacttaaaaaccacatactaaccatcctgataaagaaatacaacacgttctatattttatatcatatatacattaccattatatttcacatgaagtcaaagtcctctgtgcctctgcctagctcacagtcccgcctttctcccccaacctctgagaaagtgaaaactgcccctgacagtttggagctggctttcgctatcgggcaggctttggggttgccaggtgccggcctggcactcacaggtagactgtggtgttctgctgaacacaaaccatttcacagaaaaccatcagacaggccactctatgactatgacggttcgagaccaagacaaggccactgcggaagaacgtctgagcacagacgactgtgtccaaactccaaaagatgaccaaacctcccccttccctggctaatgtgagtgactgctgcatctttatccattacagcgttagcacctctttgtcccttctgtcttctagaaacaaattattaacatacccaattacaggccaggtgcagtggctcacactgtaatcccaggactttgggaggccatggtgggcagatcacttgaggccaggagttcgagactagcctggccaacatggcaaatccccgtctctactaaaaacagaaaaaattagttgggcatggtgatgcatgcctgtagtcccagctattcgcgaggctgaggcataagaattgcttgaacccaggaggttgcagtgagctgagatcgtgccactgcactccagcctgggcaacagaactagaccctgtctcaaaaaacaaaaaaagatacccagtgacagaaacagccctgcttcctaacaggattcaatccagaacaaagccccacttccttgtaaccacccaacacaagcccaaccctacaataagtcctttccaacatcctcttccttctttttaattgtggtaacagatgatacataacagaaattttaccattttgacccttcttaagtttaccattcagtggcactgagtatgtcccgtacatgcttttatacttttactatacaagtatatatccaaaaaacaatacatactagtggtctgcatgcttttgtactacaaaaaatggtatactgtcttggtgcggtagctcatgcctcctgtaatcccagcattttgggaggctgagctgggaggataccttgagcctagcagttcaagaccagcctgggcaacacagcaagacctcatctctacaaaaaaaattaaaaagtattagccaggcatggcgatgtgtgcctgttgtcccagatactcagaaggctgaggtgggaggattgcttgagtctgaaaggtggaggctgttgtgagccatgactgagccactgcactccagcctgggtgacagagtaaaaccctgtatcaaaaaaaaaaaaaaaaaaggatcatagcaacgcattcttctgcatcttacttttttctatataacatgttctagcattttaaaaactattaaagtaatatatactcattataaaaaataataaaatagaataaaagtatgtaaatagtgaaagtccttctgtttgttcccctctcacaacttaatctctctcccagaacagtcccaggtgtaacctttcagactattctacacacacctgaacacacatatatgtacatgcttatccagacagattcaggcttttgtcatttaatatctcttgggtgtttttcatttcacattacatttttgtaacatattttgagatctgtcaaatatcatactttttttttctgagactttttttttttctgagatggagtcttgctctgtcacccaggctggagtgcagtggcatgatcttggctcactgcaacctctgcctcccgagttcaagcaattctcctgcctcagcctcccaagtagctgctggggttacaggcatggaccaccatactcagctaatttttgtatttttagtagagatggggtttcaccacattggccaggctagtctcaaattcctggcctcagatgattagcccaacagggcctcccaaagtgccgggattacaggcatgagccaccgcgcctggtatattatactttaaagtggctgcaaagaatttggaagaactttaaaatggtgtatgccatgagtatttctttgcatttttcacctgtccccaccctacctttgtctcccgttttggtgtaaatcttggggatcctgggtgtcttcgaggaaggctgtggcctaatgagaaataaacatcagtatctggtgagtggggatggcttacacagagggtcagctccttcagagggtcccagcttgctgcttgtaacctcagaggcagcacttaccccttactgcttagatggtcatctcttgttgatttctttcccctagatcctttctaatagcaaacattttgtgggcaagaccagagctggatgacagagtgtgtagagtagctgatgtaatgccttgctcaacaaagatgctcaataaatatttgctgaaggacttgattgatcctttgccattgtccctgcactgtgccaagtagtttacaggcattatcttctggaattatcctggaatctttccacaaccccaaaggtagccaacacctattctcttcattttactgaggaggaaactatggctcagatgagacaccttcctagaccatccaagaagaggcaggagtgggatgcccaaaactgtcctagaccagagcacaaactgtaacttctatcctaccgaaattatttatttatttattattattattattattttgagatggggtctcactctgtcacccaggctgaaatgcagttgcacgatctaggctcactgcaacctctgcctcccaggctcaaacaatcctcccacctcagcctcccgagcagctgggagcacgggtgtataccaccacacccagctaatttttttttttttttttttttggtagagacgggtttcaccatgttgctcaggctggttttgaactcctgagctcaagcaatactcctgcctcaaactcccaaagtgttgtgattacaggcgtgagccaccgtatctggcctatgattattttgttcacagacagggtcttgctctgttgcctaagctggaatgcagtgcagtggcatgatcatagctcactgcagccttgaactcctgagctcaagtgatcctctgcctcagcctcccaagtagctaggactcttaactctatcctacccaaatttttatcttatactccaccaactcagggcctcttgcaggaaaagaaacctgagccacttccatagtatgaggcttcgagtgtactcagagatgaagaattgccaaaatacagctcaaaaagtggcattttcaaaaaacaatgtaaacaactcaaggacatagctcaaaattaaaatgtgacattacaagcccattcgaaggttaatttcctggatctgtgaactaaattaatccattattaatccacggtactctagaggttctgaggtctgggttgaggtgcaagtttcaaggaatatgaggaaagccatctttagaaggtgctggtgtatctgggacctggggaataaactgctttggagattggtcacaatctgagtcgagagccctcctggcccacatgggatatgccctgccctgcccgatgatagcgggacttcattgggacttaggcaaagactacctggtctctggcgcccacgtggcccacgttgccatggtgacgtcagaacagcgtggagacgtcacctgacggttgccgcggtgacctcacggcggtgtgacgtacccatggcgacgacaccacgattcacggcaggtgttcgagttgcccttcccgccagccactcacctgtccccgtcttccacgccctgagggccgcggctctggaaacggggatacaggagcctggcggcgccgaagcacccgcgcaggccaagacggctccccaggccaagacggctccccaggccgcacacagccatgagccaggctgcttgacgggacct

SEQ ID NO: 54 - DNA, 19789 bp, Homo sapiens; identical to SEQ ID NO: 53
  source 1..19789: mol_type = genomic DNA

SEQ ID NO: 55 - DNA, 68842 bp, Homo sapiens
  source 1..68842: mol_type = genomic DNA
acacatttcttagtttttaggtggcccccgctggctaacttgctgtggagttttcaagggcatagaatcgtcctttacacaattaaaagaagatgctgtttaatctgaggatcctgttaaacaatgcagcttttagaaatggtcacaacttcatggttcgaaattttcggtaagtgatggtcagagacttgggtttgatttaggaatcatggtgatgcataaaactatattctgcagtaaggcctctttctgcagaatgtagtgccacgctctgctttactcttatttgagacagctgcctctaattccagcaaagctttcatttctcagtccttctgtaatcagatttcaccgtgtgctgtaggggaagccacccatggcaggtataacagactaaacgttcttgacatctttcgtttgtgtacattctaaacgagcaagtggctgaaggaaattaggggaagtaatttacacagggccttcagcttatatttgggcttgctataaaacaatatatcactctaagatgttgagactaatcagttcttttgaaaaaacagactccaagtagcaactaataaatactgacaaagctgctgcaaagacgccttatatgtgatggggataacgacatttttaaataaaatacaagtttgaaaaccatccctgaaattcttgctggcatgtgcaaagcaggctgtctccaatgaattcattataaaagtttacatcctgcttacaaccattgtgcatgtggttgaagatggcatggagtgtgtctgtggggaagggaaaggggaaggggaagggaacaggggagatgagttagctgggtaaacaaggccatcaggtggagacatcactaccagaaagcttctagaacagtttcatgttaataatgagacagaatttcttcagagcctctttataacctaaagcaaccttcccgacttccttaaggaagaagcttttggtctgaagttttcttttattattagtaagtggacctgtgatagtggccctgggcatcccttctctggagcagctgacagttctaggttctctggactccaccattagcactacttctttagtgaatataaggctctcagaagtcagaatgataccgtaaataatattgtaaattaagcccataatattagacctagttgagacctcagagccatgaaataatgccttctcttattttattttgggaggaaatgtgatttttatttcttaaacagctcaaatattcaattgaaattgtttcacttctcttatttcaagtataaggtaaaaaaagcccagaatgactgtggggtttaccaattagtgccagagttagatcagataacaacctggagaaaagtttaaagaactaggttcaaggcctagcaccacccttgctggctatatgaccttgaacaagtcactaaacttttctgcaatgttgtttcacctataaaatggaaaaaaggataatacctgttctgcctacattacagggtggttcaatcattccttcaacaaatattaattgaacatctactttgtgccatgccctatcaaggagttggagatacggtggtaaataacgtaaaaatatacttcactccagctacatgaattcatagtctagtgataatcagtgagataatgtatatgaaacctaaaaagtgacagaccaatgttcattatttattttagtattccattacactgagttacatcagataaaaatgtgatgaaattttattctatagcttttaacaaggaatcatcactgagttgaaaacacccaactgaatgaataatcaaagcctggaacttaaacttatactgttctttgaaaactacaatgataattgatttttaaaataattattacggattaaattttgcaagtaaaacctcctccaaacagttgaactttttttttttgtatttactaatacactactgtctatatccagtagccagactacatttctgaaaatcctggtgagctatttctcacagtgaatgggggctggcacaaaagtatggctaaatcggcccaaatccaaactttctatttgaaagtgtgaaagcctcgagtcacccatgttgttagaaactcaatagtgtgaatctctattgaaaaatgagataatgttgaaatggtttcgacatgcattctcacgtggcataggtatttttctttcctactgtattggttagttgcactacctgtcagctagataaattcagaatttctggtctccaataagacttacaacctttgacaaagccctcaacaacagagaaaaactccctgtcaactctgcctgttctatatttttgctttgattttcagcctttcacagggattcgagttatttttttctcccacatctcttgggaaaggtggagggcccttgttatgtaacataccacgtgagtttactactccagaataataggaaatatgtggttagaatttgatggtgccacaaaataggaatcgcagttttgaagtgagcggtcatatcgccatggacatgataaaataatagcttaagtgaggctgaagccatccacacagcccctggatcaatcacttttagtcagttaaatttttttttaacaagatcgataggatcagaaaccaagactgctgaaaacacccaattcacaggctttccatgtcataaacaaggctctaaagccttgctgtgtttggataatagagaatatcctatgatttgttgcctattagggaaaccacttaaagctttttaagaaaccactaaaaaaaaaatctctttctttatcagaaaagaccaatttgtaagtgcagttcaatttcatctcacaaatagaaatttcttcagagaatattgagctaagctactcaattctgtggaggttatggattggagccagaggtgactagttttcaggtgtttcattccagacctctgtaagggctcacataactcattatgctcccttcgtctctcacacatgcccatccatacacacgtggacatccagacaacgtgattataagacgttcatgttcttgcatagaggagagaaaccagtgcactttgattattcacaatgtcgaaacttaaaatgaatgccttttaaaaacatcacttcagctgggtgcagtggctcatgcttgtaatccctgcactttgggaggccgaggtgggtggatcacctgaggtcaggagttccagaccagtttggccagcatggcaaaaccctgtccctgttaaaaatacaaaaaaagaaaaagaattagctgggcctggtggcatgcacctgtagtcccagctactcaggaggctgaggcagaagaattgcttgaacctgggaggcggaggttgcagtgagccgagatcgcgccaatgcactccagccacctgggtgacagagcgagactctgtctcaaaaaaaaaaaaaaaaaaaaaaaaatcacttcacttcagaaaaccatacaagagatgggaccaaaagttgaatggggtcatgatgttttccttggccaacagtggaatttgtttcctagtttatttttagtaattgagtaacgtaacttagataaaataagccactgatttttgagtttcaggtttccagatctttaatagtaggtctgcagaaagctagccttcatctgaattcttcaattttcagatgagaagtttcacaattttagaatattaatgatctaaggtatcttagaaactactagtcactcagtgctcaataataatgttgtagaaaaaactgagttcttttcacatgaccaggaaagtttaggctcacagacactttgaagggtgagggggagcggaatttattgagtgaaaaggaaaaaaactcagcaaagccagaggggttcctgttaacaggcccccatctcacagactgaatgccaggttaccacacaggaacaggagaggcctagctcctccccactccaaaaggtgcagtgcgaacttccccaaggccccaccctgtcctcccagtgtgcaggtgggcattattcagaaagaatcagtcaggggagtgtggggaaagggcgggcctcatccgggacaggcagtcctgttcatcagcctacaggctgttttaggcttgaacgtggggtttcgctgggggtcgcgggtttgggggcccttggctgccccttgtctctatcaataatttatatcacatatgggtatgtggcaacagtgaggagggtttcaagtaaacttttattaatacattattattgttattgttaataagcataaatttggaaaacatttgtgagtttttttcacatcagtgggatcactgcaaagtttttttttgtgaaaatacagctcctttcttttgcatgcattctaatatgcctttttgagaaggaaagaaagggatagaattaaagttaggccactgaaaattcatgtggctccagtttacaaacttcatgagtgtgggggaagacatagacaaagagaatcgctaatttcgttcactttattaaattttcaggtgaagaattgaggctcgagatggcaaataaccttcccaaggccattgtttattcttaaatctgggctgaactaggactacaattcaaatatttaaaggcactgctcttctcatttcattgcttgtattactttgatcccttccaattgatcaagctggccaatctacctttgcctaatatccttttttaggtacagccagaatatctcagtaaagaaaaaaaacatacacaagaaaatatgccttagctcttgcattaatgcaaggttaaagaaacataaaaatctcagccataaggcccattggccccctcttatgtctccagaagttaaagtctttatctcaaattgtccatggggatcagagtatcatttaacactgaattttttcctactctggcaaaatcagtttctgactgaccacattttactcaaatcaagcactttctcttccaataaaatacaattataccaggaatacatccaagtctctcccaccccccagtttaccagagttggaaaatgcagacactagcaatgaaaggcttcattctgcaagtagcaaatactcttccattttgtagctaggaagatatttgggtaaagttaatacaaggatctcttattaccttggcttagcttcttagcattcagtgatttggggttaagaaatctctgtaattattttttcaaggaataaaatgaatataaggaactagacttgcctttttcaagggctctggctctgaccagactgcagtgacagttttgatggagtatttgtacgtgcttctcattgtttcccacaacattgtatcctccctcttatgtgcagcctgaataataataatgtggtttgtgtctggtgtaccaaggagatttcttgtttactctgatttacttcttgtacactttggtacaagaaaagcaagcattttacaggagactcgaataatgcatttggccctggttctggtgcttgtgaaccagagcaggctgcctcctattgaagaatgaggtctctagggggaacttaatagccattgatgccagcagtcttacctggctaattcaagcgtggctttatcacccaaaagcaagaaaatgcttgctacagaccagaaaaaaaaaaaggaggcctgtgtcagaactgttttaatgtggtacaattgtggaactcttctaatttttatgtagcttaggaaagaggtgtggcaactccattttggagccaaggggaggtctgtgaggagacagtaaacaggataggaatttaaactgggaccattgtatttgctttccttccagtgataaatttccctggttagttctcgatatctatgaaaaacagctctttttcccaagctaacatttcctgccccacctcctggatggaattgagaaaggtggtgactactctaatgatttttcagtggtataaacagcataaccccccctcactagctgtggtggaatttttttttttttttttttgagatgaagtcttgctctgtcacccaggctggagtgcaacggcgcgatctcagctcaccacaacctctgcttccagagttcaagtgattctcctgcctcagcctcccgagtagctgggattacagacgtctgccaccatgcccagctaatttttgcatttttagtagagatgaggtttcaccatgttggtcaggctggtctcaaactcctgacctcaggtgatccagctgcctcagcctcccaaaatgctgggattacaagcatgagccaccgcacccggccagctgtggtgcaattttaaaagaaattctagttaatcactcaagccctcagatgctggtatgaccagatatatagcatctacctctctaccgcttttgtccccaagaaccctgacaacttattctgtccaaaaggagtttgtggcaagaaagaaccaaagtatcagtgtagtccactattactgtacttccatttcagccttcatggtggtatgagcaaacattggccctataaggtatacttgccagttttccaggttttggcccttgactcatagtgctgtgcttaggatccaagattagtccactcttgtttcacatacatatgtccagtcattgttcccagtagtgcaaatactataccagagtggtggggttctaggggatttcagctttagcaacacactaggccacagtcaattatcctccatgattttcaggccttgtgttcagcctgggccataccctatatttgctcttccctcaacataaattttgtcttttttttttttttctgagatggagtttccctcttgttgcccaggctggagtgcaatggcaccatcttggctcactgcaacctctgcctcccaggttcaagtgattctcctgcctcagcctcccgaatagctgggattacaggccctcaccaccatgcccagctaattttttgtatttttagtagagacggggtttcatcatattggtcaggctggtctcgaactcctgacgtcaggtgatctgcccgcctcagcctcccaaagtgctgggattacaggcatgagccaccgcacccggctgaagtgatgttttttaaaaggcattcattttaagttttgacattgtgaataatcaaagtgcactgttttctctcctccgtgcctggcctatgtcttttcttatcatcagaacttggtcaggatgttgaaaatccatcatgacaaatctttcaatattcatcccagaaatctgctgggaattaattctttctttcttttttttttttttgtttttgaggcagagtttcgctcttgtcacccaggctagagtgcaatggtgcgatctcagcttactgcaacctctgcctcccgggtttcagcgattctcctgccccagcctcccaaggagtagctgggattacaggtgcctgccaccacgcccggctaatttttatatttttagtagagacggggtttcaccatgttggccaggctggtctagaactcctgacctcaagtgatccgcccgcctcgtcctcccaaagtgctgggattacaggtgtgagccactatgccgtgcctgaattctttcttatacaaattgatttacttttgccctaatgacctactatcatttattcatttacttaagaaatatttattgaatgactactacattccaagcactgtactaagcaccgggtatatattagtgaataaaataggaaaggtccctgctatttgtggatcatatgtaatccagtgagaagagtaaaagtagcaataaataaacacataaatatatattaaaattgtgataattattacaaacaaaatgaaggtaaagtgaagactacttagacagtagagtcaggaaaggaatctcttaggaagtgatatttaagcttacagcctgagaatgagaaggagccagctttgagagttgaggggagagtgttctggacaaagggaatggtatatccgagtcctgtgatgggaaagcttttggagtacaggcagcccctcctttgcgatatcccaatgtgcacaaatttcaattaccacagtttagttaataacactaggccactacgaacacagttcaaatttcagtcaacatggcatattaattatgagtaattcataaagcaaaacttcattgctaactcttcagtctacaaatcaccatgtaaataacacatacacagtacctcatggtcagtgaccaattacatcacttctttcaaagtctgttggtgattggtcactgtgcatctgtcattcagtttgcatacagacagcaaagagtatatagctgtgctgcctccttttctcccagtgataaacccatgggcattttacaaaaatggataatgacagtgcagtacatgaaagtgcagcagagaaataaaaagtgcctttgggaggctgaggcgggtggatcacctgaggtcaggagttcaagaccagcctggtcaacatggtgaaactccatttctactaaaaaacacaaaaattagccaggcgtggtggcagacgcttgtaatcccagctactcaggaggcttaggcaggagaatcgcttgaacctgggagacagatgttgcagtgagctgagattgcgccgctgcgctccagcctgggcgacagagcgagactccgttaaaaaaaaaaaatactgatagcagtggaagttaaatttggattgaatgtaaatcgagttatggaagaaacagctgactatgtgattgttaccctgctgctgtttgagaggctgtagatatacagccagaggaacttagtgaagacaaagttattgacataactgcagaaagtggttgtgacaaaaaggatgaagatgtcccaggggaagtaacaccagcaaaacacttcacattaaaggaactctcacagatattacacagcgttcaaagtgcaaaggaaaatgttgaaagtttatccaaacttagaaagaattatgacagtttaccaaaacatagaaaagatgcttgctctatatcataggttctaagatgagaaagcaagcactgttcaaattactcttgatagagtttttacaaggaaataaagcactataattctcaatgcttctaatgttttaaattacattgtactaaaaaatacatcagttttactatttttcacttccctacacatttacaactgacaataaaagtttttaatgttctgacaattttttaaaagtcacagaacgattacaattttcccactaaatattaaggttactttacatggcttcagatttaatggctattcacagtcccacacactaccatgcaaattaaaaactgcctgtgtttaaaaaaaaaacagttttggaggacattatgctaagtgacataagccatgaaggacaaatactatatgatttcacttatataagaatcaaaaatagccaaactcatagattctaatttaaaacatcagacaatactggttgtcagaagttgggagtgggggaaaaggggagtttttctatggatctaaactttcgattattctagatgaataaattctagagatctgctgtgcaacatagtgcctatagttaacaatatggtgtcgtgcagttcaaaatttgttaggagactagatctcatgttaagtgatcttactgcaaaaccaaacagcaaacaaaaacacaaaggggcacaaggaaactctggggtgggggaaggttatctgctaacatttattggagatgtgattcaagggcagcaagagtgagggcagcattatcagctgctgccatggaaagtctagagtcagaaagggagatttttccaatcacttgtagtccaagggaaaaatattgaaataaagtttctgttctatatacatttgaaaatcaaaggccttgacaaaaaggaaagcttcaagcaggatgtttgtgtgttctttctacctttatattcaaatcttctgtcagtggagaaatagaaacagcagcatctcacaatgcaaacccacagcagaacattaaccctaaccctaactacaagcttaatttcacttccaacttagaaacttctaagtatgtaggacaaaagctgaggaagccccagaaacttgttactttctccagtctgtcttctattggggataataagaactggaagctggagcttttggagtagtaaaaggtaaggtattgttggtcctcctctttcctgtttccttttatggaaattggggagaaaaaatttagtcctttgcaaaattttcatttccacttctatttctctgagattcaacaagaacaacacaattctaagatctatgacattctcttaaataaagcctgtagccttgtgagcattcagaagtaagaggatacaacaaaatcccgcagaggctgagaataggggatgatattgaatcctttaagtatagcagtttggagactcagcttttgtgggctccaaaataaccaggagtctgagcttgaactcaagacaaaaaattgagggcctcaaaattagttcatgagtggtttttcctgtggttgatggatgtgagttcaacagctatagtgatgtttctcaaattccttgaaacagagggagtggggttttccagcaaagtattcttccccttttaaaataatattagaggaagtcttaagccaaggaatatcaatgtgttattgtaagacatgtagtcaagaaggtttatcttctgtaattttatgttgcttggatcttattccagaagaaaaatattttcaaatctgccccaactgtgaattgagaaagattaagctgccgtgccttcatttcaggccacatatgcaaatctgttttataatccccagaagaagatttcagttgaccctgaaaaatgcatgactgttagtcagtgcttactccttaacattatcagtacttagtattccaagtgttgcttaatattatcactaattaatattatcagaagaaaacacataaccaaaatttgtacgtaaatacaaattttctgtctaaatgccttgcttccaaagttatcaaattgctgactatgatggagatattgggcacagttgtgtaagcattttactaggatttcagtagaaggaagaaaatgaagggctgtctagaaactgctttagccagcaaaatgtctttgtatatctacaaacttatttttaaaatatttggttctttgccgggcgtggtggctcacgtgctgtaattccagcaggttgggaggctgaggtggttggatcacctcaggtcaggagttcaagaccagcctggccaacatggtgaaaccctgtctctaccaaaaatacaaaaattagctgggcgtggtggcacatgcctgtagtcccagctactcgggaggctgaggcaggaaaatgtcctgaaactgggaggcagaggttgcagtgagccgagatcacaccactgcactccagcctgggtgacagagtgaaactccatctgaaaaaataaataaataaataaatataataaaatatttggttcttcttagtctaaaccttttaaatttttattttcgtgtatgttttgttatgtacataatctattagtatagcagcacatataaacaaataaaacatacattatgaatccatgtttaaaagtttttactgttagaggtacgtaataaaaagttgaggaccactgctttaaagaaatttccatttggagagcccatgactcacatatttttaaaagtcaaagacaataatacatctttgaaatagcaatgttaactaaaattttgtttctacatataagctgaaaacagtaatttctatttgtagttgaatatgtcatcaatgtcttagattaaatcagtcaattggctgggtgcagtggctcacacctgtaatcccagcactttgggaggttgaggtgggcagatcacttgtgctcaggagttcgagatcagcatggccaacatgatgaaaccccgtctctactaaaaatacaaaaattagccaggtgtggtggcaggtgcctgtaatcccagctactcaggaggctgaggcacaagaattgcttcaacccaggaggtggaggctgcaatgagccgagatcacgtcactgtactccagcctgggcaacagagcaagactccatctcaaaaaaaaaaaaatcagtcaatcaaccaattagccaaccaactgacaaactcttaatccttatggaaattctcttccctactaactagacctctgaagggctcagtctcacaaaatgtctaccaaaaaatatctattcacccactgaacattaaatgaaccaatcaactctgcaagaaacatatgtagtgcaatattcacttgtctaagttactgacatcatgcagtggaaacaacaaattgagtgaatttgtgcttttcccacctataagcttatcaccattgcaaaaagacctccataaatcccaacagatgattaactcttcatcccaagtagcacaggctctcttgttaggttagaattaaagcatgatcattttgtgacagttattttacttctagtaaaattaatgtttagtacacgtggtgaaccacaatttgcctttggctgtttataatttcgaatggtagaaaataccaattattgttaaacacagataacactaggaatgatgagagaaagatgatgtccattttatagaatgattaccgcaaataacaattattgtcatcacaatataacaaaatgttaaaattgatctttttcggttttggtttctgtccaggcccagtaggtactgattcttccctcattctaaagagatgctagaccactaaaaatggaattgcaaaggaaatagacaaaattcagtttggaatcccttagttaccaccttcagcttataaaatgtgttgcagaaaccaagagaggggttggaaattagaagataatttatagagagtgtttctattgtgtatcatgtgcctcctcccccatgaaggggatactcttccttcacttcaagcccaacaaaatggctccactagggcccacagtaaactgatgtcaggatgatacctgagaaatttaaagtaggaaagacaggctagttagctgttctgatagcagaacaagatggagtctataccaggatggacctgacacttgttagagcaaagaacatggagaacttcccatgaagcaatagggaatgagataaaaaagacctagcatggtattgtttcagatcatgaccaagagacctcctggaggggtgggggaaatctcagcaaaatagaggctggatgtgttcccttggatgccagaggaaatgtaattgtctgtatcaaagactgctatgagaaattcctaatgataagcgggggttctccaaaggacctccaaaaacacatcacaagagagtcaggtgttggagacacgtgcaccaatgctagattgctagagcagaaccaggcttttgctggctcttaactcctcaccttcccttggcttcacttagaggaactgaaagtaaggaaacgaggaaatagcacattggcccctctttccccatagaggaggccagctttaatcaggcataagctggaagggaaaaggtgttaacctgcagcaaatttcttaaggtttttttaaaatcactattattattattatatttttgttacatgttattttactgagactctttgaggtagtaaaataagcagagggctttttgtatttttctgagttagtagaaaagttacagcgtccattgtattttcatccagggataaaaagaacaagctccaagaacagatttgaagggcagtagggggaaaatacgaaattattttctattgtgcattacaaatgctgcttgtacagcccaatgattttaataataatagctaaaagttatcaaatacttattatattccagacaatgtctgctttacatgtattaaataattttatgctcacaacaactctataagattattatagtaattttctaggtgtgaaatttagaagcagagagtgggtaaataaactgccctaggttgtgtgactagtaagtgacaaagccactcatgtggctatttcaagcaaataaaaattcaatctcttttcacaaattctttttttttctgtcaaacatccaaaatactggacatacaaaatataaaccaaggccatatcaaatttcaacgcattaacactttgcagagacacatgaggttatatgtgatttgctgtgctttatcaagaataagaagataaagcatttgctgtgctttatcaagaggccgaggcaggcggatcacttgagctcaggagttcgagaccagcctggtcaccatggagaaaccccgtctctagtaaaaatacaaaaattagccaggcttggtggcatgtgcttgtagtttcagctacttgggtggctgaagcaggagaatcgcttgaacctgggaggcagaggctgcagtgaactgagattgtgccacactccagcctgggccacagagtgagaacctgtctcaaaaaaaaaaaaaagaaaagaaaagaatgccttatcaacagtaaaacaatgaatcaccatagtacatgggtcttttctgaaatacatatttctcccttttaaatctctttttacaggtgtggacaaccactacaaaataaagtgcagctgaagggccgtgaccttctcactctaaaaaactttaccggagaagaaattaaatatatgctatggctatcagcagatctgaaatttaggataaaacagaaaggagaggtatgtaacattttctttttacgttccattactaccagtcccctttttttaaaggcagccttcccaaagaaagagggaaaaaaatacattaaaattcttaaacagtagctaagtaatgaaacctcacagtcaaggtaattgattatcatggagcatacaggcatacaaaaaagcataaaaatcagttattgaatgacaagtcattgcacttttttcacgtggaatgctgaaattcattattaactggatcgaacctaagaaatcatttgtctgaaaagcatttatttatttatttatttatttattgagatggagtcttgctctgttgcccaggctggagtgcattggcgtgatcttggctcactgcaacttctgcctcccaggttcaaggaattctcccgcctcagcctcccaagtagctgggattacaggtgcataccaccacacctggctaatttttgtatttttagtagagatggagttttaccatattggccaggctggtctcaaactcttgacctcaagtgatccgcccaccttggcatcccaaagtgctgggatcacaggagtgagccaccgtgcccggccaagattttatttttataccccttttcttttctctgtgtattttctatcaagtcaaaaatgaaggccaggcgcagtggctcatgcctgtaatcccagcacttagggaggccaggcaggcaaatcacctgaggtcgggagttcgagaccagcccgaccaacatgaagaaaccccgtctctactaaaaataaaaaattagccgggcatggtggcacatgcctgcaattccagctactagggaggctgaggcaggagaattgcttgaacccaggaggcggaggttgcagtgagccaagatcgtgccattgctgtccagcctgggcaataagagtgaaactccatctgcaaaaaaagaagatgatcctttttttccaagtgacaaattttaattttggatgcatatcagatatagaatcattaggataatgtcaaaaaattcacaatgatgtgacagcgttttaaaaagcatttagattagcaaagaaacaattaatggtatccaggtaggagaagagatgggatatggttcttagctataagcataattctgcattttgagcaatttatcttcgaaagacaattaatacagtagcttcatttggactgcttaattgtgaaagcatttttgtattccaagcttgttcagcctttttaaagagttggtttcaggttgagaaagtttgacacggttttgattttatctagtaggctggctctccaagctcctaagaaaaactgaggacaggagtgaccgcaactgctatgggttgatgttcctataaaacacctgaaataagagaaaaggtctccccaggcccaggcctatgttcttgacactttgtggatgagggaggttagctggcaggaatctatttgttccagaattccttctatcaggaagcccatctacagaagaggaaggaggaagcgccccaccccacattcagactctccagattgttttcaaatgacttccagaagcaaagtctttgtattcccatgaggatgcatgatgaatgtgtagctaaaacactagggcttcatcattgatctaagtgaaagttgtagtgccccatgttgtaacagagtagcattttcccagctgagaaaacacctccaaaccaaacaccttcgaggtcattgaaaactgaatggggatttcaatagagttaagtaagaaggtggttccagtatgaaatactaatatattttggaaaaaattcacatgttgaacccagaacaattaatactgctttctaattacatgtcaataagctgtgggagttactgttctcttcccccatttgtatagtacataaaaaaacattttaaattcacttttttttttttgagatggaatattgctctgttgcccaggctggagtgcagtggcaagatcttggctcactgcaacctccatctcccaggttcaagcaattctcctgcctcagcctctctagtagctgggattataggcacccaccaccactccaggctaatttttttttttttttttggtattttgagtagagatggggttttgccatgttggccaggctggtctcgaactcctgacctcaggtgatccacctgccttggcctcccaaagtgctgggattaaggcatgaaccaccacacctggcctaaattcactttttaaacaatattttaaacacttatttgggggtagttattacttattttctaataaagaatatgttttaaaacataatttatatataagatatattttaattctattcttgtccttgatttatagtatttgcctttattgcaagggaagtccttaggcatgatttttgagaaaagaagtactcgaacaagattgtctacagaaacaggtaagtccactgccaaattcacacttgtgttgaagagagggattgaaggtgaagactttggaggggtaacccagtgcggggatttgtctgcctctagcaaccacaaagaaaaaatcatttttactgggagcagcaatgcaagcctgtgaatgagatttccagttctcataaaagctgcaagcagaaaaattagcttcatctataagaattccataaggaactgagtagaagttccatataactcttcatgttcagaaaagaaatataggtgggcacacattttcaggccttgaactcacgtgggtaagaaatatgtctatttttctagcatgcaaagaacatttccttgtgtgtctcaattctgctagatggtggaaatttaatctttgcgatgttaggcaatcctcagttgttttatggtttattttgtccattttgggtctcctctccatttccccacagtcaggttaaatcatggagagtatctgaatgtcaagacatgtaggggtatggggatctggtccttggtcattagaacatcatcatcaaatatccatgctaggttctgttgggacttctatattcccattggatcttggctgtctcccacttactgcaaggtttgcttcactctcattgaaagaactcatattgagacaaccaagtataaaggggtcactggagaacctccaaccggcctgaacattgggaggaatgcacacggggctgaagcctcaggaagttcacaccatttgcgcggggaagagctggcctctcctgttccgaggtggaaactgggattcaatctgagaggcgggaagacaactagcaggactcttgctctgctgagagtccctgttttccttttttttcttttcacccgataaaccctgctcttctcacccttcaaagtgtctgtgagcctaatatttcacggttttgtgacaaggaccccattacaacaatatatctcttggtttcattctctcaacctcttagcagctctccaagacacattaggcacagaggtactacaaggctgcctctactctattgttccttcctcatgctgggtgccatggagctctataacatttactgccttctagaggtctgtcttaaaagcaagacaggttgtcctcagttctgggattctccaaactcatggagctttccagcatgcccccccatccttcagaagttgacttggggaacacatagcagagtacagtatcaaaggtccatcagtttttatttctgttgcttctcctctcttgcttctcttcttcccctttcagttcccagtattggaggccaggaaataaagcaggaggaaaaactggctctgactatccatggactcttccaaattgtgcctggaattctaggctgttaaggatattttttttcctcaagctattatctctgcagtttcaaaatggacactttgaaactcgtaagccacaaattgcctcttttctttctctctgcatttctgctctaccagacctcacttgaatcaataatatgactgcccaaatgagcaatcagacagggtcaaggaggaagtaccgcaaacaaaaacatattggttgatatttcaaatagattattctaccttacgagtgtcagagctttctagggcttagaagcaaacaactattacatgtgatttttaccttgcaatgattaataatgaagcttaccaaatagatatcaaaaagaaagttcagggggattaagcgacttgccaaattcactcaattaatacagatagcaccaagattcagatctgaagcccactattcttactaatgcacactccttccccctaaagagaaggaaggaggacgagggaaatatataaggtgctaatctttaaagccctaggaagaaaacagataagaacattttgctctttaaagctggctgctgtaagagatcatgttgatatctgacagatggtagggaaaaaatgaataaaccagtcagcaattctcaaattctgctccctttcaacactagtattccatgagttgggtagaattttattttatttcattttatcttgtgtgtatatatttttgtttttaccgttagtacttaagagaattgttcttttttgaagtcaccaaaataattgtttaatacatagaaatttctcaaatttaagtttttttaaaagggattttgctgagttcatggcatttctatgacttttccctgttcaaatgttatgtttgaaaccagaatatttctgaataaatgattggtttcaccatttataataatgtggtagttaatctattaataaaaatgagagtgacaatttaataagtttttggaggcagaccctgtgccaggtgttctacattaattatgtgtgttatctcactcaatcctcatggcaactctgtgagagcaagaccattcaggaaaacaggctgaaatggggccagcaaatggctcaaaggcacgtacctaataaatggcagacccaggattggaagctattactatatatatttttaaatacctaatttaataaactaaatctattgatttaatttaattatatggcatgtaatagtcatgttttcttctagtaaaattgtttctactggtggcattaagcattttgttaaatgatggttttctataaagaaatccttagaaacctgccccaaatcgtaaataataacaacaaataaatgaagcaaggagagtatgactgttaaaacttatagttcatggagcatttgtcattatcctcaataattgcatatggcatcctgccaaactcaacagtagaatcactgaaagcgagtagctgtcttaattgtttacagaaacagtaaaccccaatcaaaatcatgacagaacattcctattgtgagtatgtgcatcttaacagttgtcctttggtacaatttttcaacaagtaccacctgttactttggtgcttagaattaaaataggtgtaattataactgttactgccccaaatctgtgccagcccctgacatgatcctcacaggacagtccttggcaattctgttccaagcctgagtttcagagctacgttcacattcctacttatctcaggagacagaatcaaattctccacccaactctgaccatagtaattgtttatgtaacatgtttattaaagtgtaacacacaaacagaaaagtgcacaaatcattaagcgtatagatcgatgaattcttacagtgagcaaaccattgtaactaacacccagatagagaaacagaatggtagtagcacccagaagcttcccactacccttcatttccttccagtcactactcctcattcacccaagggtaactattatcctggcttctaacatcacagattcattttgcctatttttgaactttatattaatgggatcattcagcatgcgctcttttgtgtctgacttcgttcgcttaacattatgagatgtatcgatgtagctgtgtgtagttgtagatcattcatgcctcatccactctttgtgtgtgcctgcctggcaaaccagacaattctcctatgagtctaccaatgataatattcttttatagcaaatgaattgagctgatagacagatacatttattaatctcagtaaatgcagtagctgataaaagatgcaaaaggcattctaagagatggttcttttcattatttaacattggtatttcactttcaaggtgaaatagaaactggtgttttaacggctgtttcaaaatcatcgtctgtacaaagatgccaatgtaaaaattgtgatactattgtgcaattataaaagccaagcacagagaggttaataactgccttagttctaccagcaaaggtactcggatcccttatatttccaaggaatgaattctatttatactctttttaccaaagcaggcagggatctatggggaagtaaaagagcaaaataagatttacttttattttcccaaacagaaattaagaaattagcagaagaggccgggcacggtggctcatgcctgtaatcccagcactttgggagtccgaggcaggtggatcacgaggtcaggatgtcgagaccatcctggctaacacagtgaaaccccatctctactaaaaatacaaaaaattagccagacgtggtggcgggcgcctgtagtcccagccaatcgggaggctgaggcaggagaatggcgtgaacccgggaggcggagcttgcagtgagccgagaacgcgccactgcttccagcctgggctacagagcaagactccatctcaaaaaaaagaaaaaaagataaaaagaagaagaaattaacagaagaaacgctatgttcaaaaatagctgatgtgaaagcataaacaaatgaaacaggtaaaagcaggcttctctggataaagggtggagaaagagtggaagcccatctctctgtcctcttctccttggcaatggcagcttctagtggctgctcaaaacctctgatgcccctcataagcacgtattaccatccagacctggtaaaccggcaaattcttgacttgtgcttttgggctgggatctgaggcttctttttgatctgtgacaaaaattgcaaaggcaatttcttctcagaggtagtatttcctccccatttaatctttttcatgaactgctgaagtctttggctcctgcctgtacacactttctgttactcttcttcctacccctatttcataagtccaagcaccgtatcgatcttctgtatagcacaaacagggaagtagaaggacagcagattaatcctgagttgctatagcaaaatgacttatcatcaaagaaagagtgtgacttggaatagacctaccaggaggtccgaaactttgtttgaagtcttcatccatagtcctcaaccctcaatggtactcatacttgtactaggcacttagtaggtgcacaataaataattttttgacgaatgtgcggtatttatgtgtatttaggtgacgttgcatgtttataaagaaattaagtactcaagagtgattagtgattataatcaccactaaacttcattacgttgcttcatagataatagaaatttctcttctttctgttagcaaaatgagaggctgttcacaaatgagaagaatgggtcctttcttcagagtcaaattcctcctttattcattcaatgagaattcattaagcacttactatttgccaggttttattctaggtgctcgggagtgatacctcagtagacaaaacagatgaaaatccatgccttcatggggcttacattctagtgggtacacagacaataaacaacagacataataaataagtggatgatacagtatgttggaagatgataagtactctcagcaaggagaagaatgtgtctggaactgagggaaaaacaagtgcaccaatattgggactttggctttttggggaatcgttggatgatcttgaacaaaggagggacatgatctacttgcattttaaaaggatccctctgactgagaataaactgtggaatagactgtggggagcccagggtgaaagcaaggtagaagtagtgaagcctgtcaatagatagctatcaattatagaagctggggttgtggtggcagcagtggagagggtaagagtaacagatcctaggtatgttttgaagagagagacaacaagattactgatgtattgggtaagagagagatgtcaaggatgactttaagatttctgcctgagcaaatgtgaaggctggtgatggaacaaatggaaaggggaaggttgggaattcggtcttagatatattgagtttgaagtgtctattagacatataagcaaagatgttaaaaaaaagcagttgcacatgagtctggaatttgggagtgaaatctggcctagagatatttgagtgtcaccagcatatagatgatatttaaggccatgggactggatacaattataaagagagtaagtgtagattgaaggatgagaggagaaccaagggctagtcctggggcacaccaacattcagaagtcaagaaaaatagaaggaaccaacaatggtgactgagaaggagcaactaccaaggtagatgcaaaggcaaacaggtgtgatgtcctagacactgtgtgaagaaagcttatcaagtagaaaatgaagatcaactttgttgaatactgctaagtgaaggaagagggctcagaaatggccactagatggagtaacgtgaaggtcactgataactttggtgagaggagttttggtgcagcagtggtaggggacaaagccttataggtttgatggaaatgagaagagaggaactagaaaaagaaagaagaacaaagagctttgctgcaaaggggagcaaacaattaaaggaatacttgtcagggaaattaggacaaagagaaatctgtatctgtttttaaataatgtgtgaaaaatgagaacaacccattcaagatgttggtgacataagggagaaagggaggaattgctagagcaatgtctttgagtaggcaaggggagtggcttctagtgcacgagtgaaggcattacatggggcatggaaaattcatctatgcttaatagaaaggaaagcagagtatatgagtacagatgctgactagtcgggaaatggagtagagtctggaagttctcctcttattcctgtaattttttcagtgaggtagaaagcaaggtgaacagttgagaagctcacttcacctctaaagacatgcatccactgataatgaagggatggcaaaagatattccatgcaaatggaaactacaaaagagcaggagtagctatacttatatcaggtaaaatagatttcaagacaaaaactggataaaaagacaaggccattatgtaatgataaaggggccaattcagcaagagaatataacaacaataaatatatatgaacccaatgctagagcacccagatatataaagcaagtattactagagctaaaaagttaaatagaacctaatgcaataatagctgaggacttcaacgctccaccttcagcattggacaaataatccagactgaaaatcaacaaagaaacattagacttaatctgcactgtagaccaagtggacataatagatatttacagaacatttcacccaacaggtgcagagtacacattcttttccttagcacatggaacattatcaaggatacaaaacaagtaccccaaatttaaaaatacttatattaaatatattttctgaccacaatggaataaaactagaaatcaataacaagaagaattttggaaaaaatataaacgcgtggaaatttaaaaatgtgctcctgaatgaccattaagtcactgacaaaattaagaagaaaatttaaatagttcttgaaacaaatgaaaatggaagcacagcatattaaaacttgtgggatacagcaaaagcagtactaagagggacatgtacatcaataaatgcctacatcaaaaaaatagaaaaacttcaaataacctaatgatgcatcttaaagaactggaaaagcaagagcaaaccaaacccaaaatttgtagaagaaaagaaataatacagatcaaaacagaaatatacaaaacagagactaaaaaaaataaaagatcaatgaaataaaaagttggttttttgaaaagatacactttcaaaacataggaagaagccaaccattttctcaacacgttagctgctaccaccttgttccagcctatcaactctcacccagattttcgcaacagtctcctgacttgtctccctgcttttgccctgctacagatgtccaattaaaatgtaagtcaaatcatgtccctcctctgctccaagccttaaaaggcttcccattttatccagacaaaagtcaaagttgttgccttctccccagcttccttctgcagcctcacctctgcaccgtccacactaccttcttgttgtctctctctctctctttcttttttttagacgaagtctcactctctcgccctggctgcagtgcagtggtgcagcttggctcactgcaaccttcacctcccgagttcaagtgatcctcctgcctcagcctcccgagtagctgggattacaggcgcccgccaccatgccaggctaatttttgtatttttagtagagatgggtttccccatgttggccagactggtcacaaactcctgacctcaggtgatccgcccaccttggcctcccaaagtgctaggattacaggcgtgagccaccgcacccggcctcttgttgtctcttgaacccaccaatcatgaccttcacacaggaactttgcacatgctcttcccactatctcgtatgttttctatggttcacctatccatcttcctcaggtctttactcaaaagtcccacaatcattgtggcttccttgaccatactacttaaaattgcaacttgggtcctgtaaatttcctattctccttccctgctctgtatttcttatagcacttatcagtatctaacatacaatatatttaatttactcattcagtttgtactctgtctctccccatttgaaagacaaaaactggaaaaaaaagacaaggccattatgtaatgataaaggggccaattcagcaagagaatataacaacaataaatatatatgaacccaatgctagagcaaccagatatataaagcaagtattattagagctaataagtagtcaaagacttgtatcttgtttacaatgctttcttcagtgcctagaacagcaccaggcacatattttcagaatgaatgaatttcagaatcatacagtgaggccaggacttgttgtgttgtgtagttactccacagacatgagatgtgccatccacctaaaatttggtttggttgctgacagtgagaatatctcacatgcaccaggaagatatgaaaaagtttattactcacatcatgtggctttctggggatagtaggtctggtttccaagcaggtctgaaagtagccccagagagcagagaaacgatatggagttctagtgtgatttggcgatggggctgggatgaggattcccatgcgcaaggtagggcttgtgcagtttgaacctcctgctagtgccaaaggagtgagcacctgaactttcttatcagctttcccagatgtagggctgaagggtcaggcagggagaggtggacagtcaaacatcagaaatggggtcagaatgttcattacaggtcccatagcaagtaggactgtttgggcatttcatattctttgatcctacctggcacctagcacataagatttgcaagggatcttacaactctaggcaaactgtcttctttttcagatgaagaagactgagtccagtcccactatgtcattctgtctctgtagatcacactttgagctgactcaatagctggcttccctatggcaaggcctagggctgtggagacttaaaaacaatcttgcgcaattttttagactctgactctcagaacccttttctataaaattcttgtaatatctactgtacactttgtcagactaagggattcaatgaaagaatgttaataatgtgccatcatatgattatgctctgtgaagagtcattgctagggtcagaacatggtggtctctagttaaagaccatttggtctaggcatatttaagagaacacttttgagtataaaataggtagactataattatttaattttatatacagtaacagaaatgaggaccattgctttgtgtgggtttgatttttaatatttttttttctttttggagatggagtcttgctctgtcacccagggtggagtgcagtggcgcgatctcactgcaagctctgcctcccaggttcatgccatcctcctgcctcagcctcccgagtagctgggactacaggcgcccaccaccacgcctggctaattttttgtatttttagtagagatgggatttcaccatgttagccaggatggtctcgatttcctgacctcgtgatccacctgcctctgatttttactttttatagtgaaactttcaaataaacagaaaagtaaaaagattagcataatgagcataccaataccctttacatcagtctaacaattgttaatatgttgccttcttcgtctacttgttttggttgttgaactaaagtaaattaaagttacaatgatattttaccccaaaatacatcagtttgtatccccaaaaaataaggatattgtcctatatggctatgatgtcatgatcacactgaacaaaaataatgattccttaatatcatttaatatcagtccatattcaaactgtgttaaggcttcagtaggatgtttcatgagattttgagtcaaattctcctttgtggatctgaaactcctcattccccaattcaccgtgcaattaatgatttcttccctgtttatgggaaacagatgggattagcaaattgtgactgttgcttatttcccaaaagataaatcaggcacatcataataaggaggggaaaagtaatgtttgtaaaattccttggacaaatctctatcttgcaattatgtgtatttgcctttatgtattggagaaattctgagcattaaaccagtctcaaatgagacagtaaagttctgattggatgtcaccatctcccataattttccccagaatgtgtgatgaaagggctccagcctgggtgacagggaagactgtgtcaaaaaataaataaataaaaatgaaaggcttgaaaataaaagaaagtaagcattgagatagtggtttcaagtcactaagagtaaaaaaagtaaaagggccactttactgttttccttatcttccaatcaagacagcgtcatatattttattttattttttatttttttcagacagagtcttgctctgttgctcaggctggagtgcagtggcatgatctcggctcactacaacccctgcctcccagattcaagcgattctcctgcctcagcctcccgactagctgggattacaggcgcctgccaccacgtccggctaatttttgtatttttagtagagacagggttttgccatgttggccaggctggtcttgaacttctgacctcaggagatccacctgcctcagcctcccaaagtgctgggattataggtatgagccactgcacacagccagctttatatattttagagaaccaaaaccaggcatagccccaaagagggaatgatgcctcgttattgccaggtcttgaataagagggtggagaaatgggcacacatgtgaaggagagttaattacttgagcacaaaattttatctacttccctcaattcctcattttgctttgcatgggaattctgtatcagagaagttggagagctttaaagattttgacttttcagttgagatgatgccaattctttgtaattttgttttccactttagttgttttttcaaaatgatttttttcttttttttttattgtaggctttgcacttctgggaggacatccttgttttcttaccacacaagatattcatttgggtgtgaatgaaagtctcacggacacggcccggtttgtaaatattttcttctctccaaagctgatttcagaatctgatggataaatttcaaaaataaaacataattctctttaaataatggttttccctctaattgttctgttctccattttccctctttccctgatattctgaatacctctccctcatcctgtggccactttccatcggttgaaataatttttcttggcaattttttgaagaagcttctgatcataaaatttcaaacttatggaaattttgagttcatcaagtatgactcttagatttaacagttgaggaggaaatgaaggtccagggaaactgacattcagtggctcataactagttactatcagactaggtaataatattaataactactaataacacttattgagcatttattgtgtgctaggtatttttctgacttgtttaatccttataacaacccagattgtcataaagaagtgaaacaacttaattaggcacagactagctgctataacacaaaatctcaaatgtcaatatgctaacatagtgcagatgttcctgattggtaaaagggaagaacaggttattaatttatgtgggttattcagggacactggctgagagtgattctaccatcttcaacatgtgacctccaaggtcagtttgggtgttaacatccagccaggaccaaggagaatagagcatggagaaggcatacttgtttcaaagccaccttagcagggaagcagtacaaacaattccacttatatttcattaggaagtactagtagctcactcccatctagatgaagggagagacggggaaaggctcttccccactatattataatgaaactgaagcataggcctcctgactcctcatgcaatgctcataccactacatcatgtctggctaaaaaatccagagcaaatgtctttgttaaaagttttgccctcaaaagagaagactaatgattcttttcctgaaaatgatacgccatgaagttatttcttgcagataacgtctgctttttatggcaaccaccctagtataaagaattcacctcatttgacttgctgaagagatttcaaataactcttctttaaaccttttagttatgttatttcagatgggacaatgaaagtattaagaagtgtgattagcttctggattctagggacaaaaggaatcaaggaacataaattttttcttccaaataatctgcctctgacttggattatatttgtctgataattctgcttccacaaaagtgaaaatatactttattcaaaagcaaatattacaagctgatcaagggatgaagccagagacatacccaagcaaagtttcagtgaggatcctctatataggaccaggtgaaagatggtgaatgagtcatatgtaaagcactggttggaagagggttcagtgggaggaacagctgagcatccaaaaaaggagttgagcagtgcaggttggcagtcagaaagaggtcaggatccagaaatcagtgcagtgggcaggatcccaagatcaagagacaaacagccaagcatgggctgaaaattgaggatgggtataaacgtgctcttttctgggcttgctctccacacaattctcactgcaagtccttagttagaggagctctacatagatgctgagcaaaacagtctgcttacagttttttttttttgttacaagttccaaaatgattgggacattttgagtccatataattattatagttccattgctacatgaatacatgggtccatgaaatggagtccatataattcattttgaccattttgtcttatccaaaacactgaaaataatagctactccttaaagattgtctgccgtggacctcttgtgctattatctctaaatcttttttaaaatcttgcaaagtaagtattattggcctggttttatagatgaggaaagcatggctcagagaagttaatggagcttagaagctgactaagtcagggtttaaatcaagctgtctttattttctaaggccgtgttgttttgattaccccataatgctgcttctattcagcccacgagaggggcagcgaaacaagttatagaaaatattgggctgggcgtggtggctcatgcctataatcccagcactttgggaggccgaggcgggtggatcacctgagtttgggagtttgagaccagcctgaccaacatggagaaaccccgtctctactaaaaatacaaaaattagccgggcgtggtggcgcatgcctgtaatcccagctactcaggaggctgaggcaggagagttgcttaaactcgggaggcggaggttgcagtgagccgagatagcgccattgcactccagcctgggcaagaagagcaaaactccatctcaaaagaaaagaaaagacaaaaaaaaaaaaaagaaaagaaaacattgacaacattgacttgcacgtcaagaggtccccaggacaacccagaggtttgatgattcactaggagggctcacaggactgagcatatagtcatactcatagttatgatttattacaatgaaagtataccaagcacaatcaatgaagggaaaaggcagaagcaggaaaatgaaaggagtttctgctttgtggagaaaatgacagattaggcactgaacatattgcattaaagtttgaacctctgagtgcaaatgttcacaagtcattggagataaagaccttgagtgaagttgagagctgaagaaatataaatataagctcggtggtaaaaattacctccatggtctcaatgtgggagaattgcagaaggctgtgccatgagaacaggtgcaattaaggagggggaggaggaaatcctcagggcacaaagagaacaagcatagtacaatatcagaagaggctggcatgggagatgggggatgtcagaaaaaggagtagagtagctattgtagaaatctgactttcttttgtgtacgtcattactgcttaatctgccaaaatatctgacaaacaagatatgctgggactcagaaattcaataaagctaaattgaagaagacaagataaatctaccaccttccacagatgcaattgaataggagatgtaaggaagcaaatcttaatgacatctaccttgctgatatgcaccttgtaaccctcagcaatcgcttcctttgctttttgtagaagtttaacattttaaggtgcaaagggattggaggatgattaaatgacattgctggccctttcaaatcaaaagaatcatgcatgcctgacactgattgacggtgttgcttcttcattgctggtccagctgctttgggggcctggtcgaataaaaagtgcctgcacattgttgaaagaagagcctgagggagaatatagtgagtgtagcaaccaaaagaaaaaaaaagaaagaaagaaaaccgggccagtctcttgaaagctgttaaatgcaatttccatagtgccacttatttgttcaaatgatttaattgttcatttattcagaaatagttattgaatgcctcatttttcttccagacattgttttagcactgagaataaaatgctgatcaaggctgggtgcggtggctcacgtctgtaatcctagcactttgggaagccgaggggctgggggaatgggggtgggtcacctgaggtcaggaccagcctggccaacatggcgaaaccccatctctactaaaaatacaaaaattagctgggtgtggtggcgggcacctgtaatcccagctactcaggaggttgaggcaggagaatcacttgaacccgggaggtggaggtggcagtgagctgagattgtgccactgcactccagcctgggcgacagagcgggactctgtctcaaataaataaataaaataaaatgctgatcaagtcaaacaagtttcttgttagagtggaaattgcattctggagcgaggaggcttttgctaaacaaatgaacaaagcatgaatagaagagcaggttgaaataagtgctatgatgaagctaaagccgggttatttgttggtggggtggcggctgccttagattgggtggtcagggaaggcctctctgaggaggtgaaagttaagagctcaataaaatgacagagccaggtacgcaatgctgtaggaagagtgtcacagaaagaactgctgatgcataagcctaaggcagcaacaagctggatgtgttcaggaacagaagggaagccattaatgttctaaaatcttcaaacaaatacattttgaacctgatttttttttaaaaaagcaccttacagattggtcctcagtctcacccaccaaagaaaggaaagataaaatcagaacaaggaataaaaatcctaaatacacattcaaaatccaatgtattgtacagcagatctttagaacttatttatggccgggtgtgttggctcacgcctgtaatcccagcactttgagaggccgaggcagacagatcacctgaggtcaggagtttgagaccagcctggccaacatggtgaaaccccatctctactaaaaataaaataaaaaaaattccgcacacctgtagtcccagctactagggaggctgaggcaggagaattgcttgagcccaggaggcagaggttgcagtgagcccagatcctgccactgcactccagcctgggcaacagagcaaggctctgttaaaaaaaaaggccgatgcagtggctcatgcctgtaatcccagcaccttgggaggccaaggtgggcagatcgcgaggtcaggagtttgagaccagcctgaccaacatggtgaaatcccgtctctactaaaaatacaaaaattagccaggcgtggtggcgtgtgcctgtaatcccagctactcaggaggcagaggcaggagaatcgcttgaacccaggaggtggaggttgtagtgagctgaggtcacagcactgcaccccagcctgggtgacagagtgagactccatctcaaaaaaaaaaaaaaatatatatatatatatgtaacttattcattcatcttctataactgaaataattgttgaacagcaatgctcattgccccccacctccaacccctggcaaccaccattctactttctccttttatgtatttgactattttaatacttcacataggtggactcatgcaatatttgtccttctgtgactgacttatctcacttagcataatgttctccgcgttcgttcgtgatattgcatatgccgggatttccttctttgtaaggctgaatgatatttcattgtgaatatgtaccacattttctttatccattcatctgttgatgaatacttaggttgtttccacttattggctattgtgaatagtgctgcaaggaacacaataatacaaatatctctttgagtttctgatttcaattactttggctaaatacccagaagtgggctaaatcatatgataattctatgttcaatttttcaaggaacttccacactgtttttcatagtggtggcaccattttacatcaccaccaatggtgtggaagaattccaattttccacatccttgtcaacacttgttatcttttgtcattttgataatagtcatcctaacaggtgtgaagtgatattgcactgtggttttaatttgcatttccctaattattagtaatattgagcacattttcatataccttttagccactcgtatgccttttgtgcagaaatatctattcaaatcttttgcctatttttttaattttgacttttatttttttgctgttaaattgtaggcattccttatattttggacattaaccccttgtgagacacaggtgtgcaaatattttctcccattccataggttgccttttcactctgttgattgtttcttttgctatgcagaagctttttagatctcatttgaagtattattacaataaaaaagtcttacatttagagttagtaagattttaaaaattagatcataataaacaagtatcccaaagaagatctgacaattaaggagagaaaaaactgtattgttcttttcttccttgttacaataataaaacctattcactatacagaatattgtggctgaaatctcgttagcttggtctgagttgcattttgtataatctagaggtgactgaaggggagcactgaggtggagctgtccactgatattttggaggagctgatatgttggagtctctaacaccacactcaggtttgatcatttattggaaggactcacagggatcagcatacagtgatactcatggctaagatttatcacaacaaaagaaacaaagcaacatcagccaagaaaaaaggtgcatgaggtaaagtctaggggagactaggcacaagcttccacaagtcccctcccagtggtgtcacacaggatgtgcttaatttccccagcaaaccagttcccaaggcttttactggggactggtacaaaagtgccctctgcctagtgtgatcccaaattccagacacccagaaggaaagcaggtgttcagcataaaacatagtgcatatccaaacagtttgggcacagtggaccacccttctcatttctgggaatggtgggaaccctcctaaagtccaagttcctagatgctagccaagggtcagccttgtaagcagccctttgaaggacagccacctcaaggcgctatgttagcttttttctgcataatcaggctctcatctctcttctgaattttgctcaatttcttttacctagatgtactgtaactggtaagggagtgtatgttatatccatgggaagacagccttaagatttgagttgttttcttgcttcagcatggatccctggaggcctaggttcccctggatagaatcagtcctattgctcacttccctttattgaagagtctctcttaggagctccttctcaccccctaacatatcagaaaacacaaaacatacacatagatattcagttaagtttacttcagatgtgagggtattttcagattttgtcatttaccaggtgctctactggggttatgaactggatattctttttttttttttccttgttctgggcttgtccttttagatgtgacaccagaagtgaccaccttcgcgtgactcagatcactgattttttagaagatttaaatcatatggaatttagcaacagcaagtggggcattatcactccagtttcaaggctttctgtttcttctgtaatgacagcttttcatgcctaatgctcagcgtactactgaaaagtgcataatagcttcccagtcatttgtcttctaatatagtacttagtaatgcagcttcaggaaccacgtgtatgaaaggctccatataaaaccaaataatgtaacactgttctactctaatttctttccctatagatgtaatttacttatggtagtgattgctaaaatgtgttcagctaatttgtaaaaccagtagaaaagaaaatgaatgtagaccactatattagtttcctatggccaccacaacaaattaccacaaacatggtggcttagaacaacagaaatttattttcccacagttctggaggctagaagtccaaaatcagtgtgtcaacaggaccacaattccctttccagtggctttcagtcatccttggcattccttggcatcaccccaaactctgcctccatctttgcctgggcttctctgtgtatcttctcctcttcttataagaatatctgtcattgaatttaggacctaccctactccatatgacttcatcttaactaattacatctgcaaatatcctacttctgaaaaagctcacactttgagtttctaggtagacatgaattttggggaaatgccattcaacccactataaccacatatccacatgtccctatgacaccataaaaggggtttccaatcattgctattctcaaataatgaaagttatagagggatttgtggatgaggcccaatcctcaagaggagtgaaccattgtcatattaaaaggaatatttataaaaaaaaaagctggaatactgttattcaggtatttataccaattatgtccagactaaaaatgttaaaggttttacgatttttggtaaaatgttttaaaatattggtacctaatgggaaatatatatctcatgaggtagtaataaattggtacctaatgggaaatatgatacttccatgaatctttacagagaacaccaagaacccagcaggtatgaaaattctatatttttgggaaaaatgattacaaaagacagtctctcacaccatgaacaatgatatattctcttagaggcagtgtaccagagcgtcaaggacaggggcttcaaagcagagtcacagtttggttcaattcagagctctaccacatgctagccctcatggtttgggccagatgcttctgagtctcagtttcctcagttgcaaaatggagatacttatacttatcttaatgcattatatgagggtaaatgagatcgtgcttgtaaaggacacacgcacagaagaaattcaagtaatgttggttgaatcaagttatgatctaacccaatctcaagacaagcactgactcaattttggctatctctgtggttttcctaaacaggttacactgacccactgaacttccattagcatattttgaagaagttattctaaatgccattataccccattcatttttctctaaggtcttcaaacttgggatctaacatttaaatcaaaacaacctggccattatagatccttcattaataaattgaatatggcaattttattcaacatctctggcttcttccaacaccagcccatttgacaagaacccatctaggtttgctgagagtattatctatcttatttcctcatcattcttatgttgatataactaaaatcatctgggtagagatgccagagggctagaatattctgtttcccagagggagattcagagagtttatctcataatcaatttacattggggatagagattaagtctgcttaagtctccttttgggacttggctgaatttgacaaaaaataaaatcagaaacatccatttttaagtgattacagggttctcaaggatgtaatatgcacaaccaaaacatccttcctctatctcccagtcagctgttcaactggtaagagttgtcagtgaaagaaactggagtttagagggcatgcagtctgattcaaacaaggcaggatggagacaaaagagaaaatggataacaggaccctatgagaatacaacctctgtttgcctttggcttttgagacacttgcaccatgttccaatactttaggaacaactgaactccttttaagagcaccaggattgctgtatgattgtccatctcatcaacatccatgtttgctcatcaacatccatgtttgatctggcccagcacactacttgttttttattttttagtgtttgttcacccaaccacactaactctgcaccaggttttcctggggtcatgagaggctttgtttattgtctttttttgtttcattttgctttgttttgtttcagccttcagggtgttttcattaattcctaaataagtttcaaacttataccaaaagaaaaaacaccaagcaacaacagaaactaagggttggaaaggatttatttatagcaaccatccttttcatggagagagtgaccatcactctctcaaaatggtcattgagccctgcataaatcatcccatcattctcagcaaactattgcaaggacaaaaaaccaaacaccgcatgttctcattcataggtgggaattgaacaatgagaacacatggacacaggaaggggaacatcacacaccagagcctgttgtggggtgggggaaggggggagggatagtattaggagatatacctaatgttaaatgacgagttgatgggtgcagcacaccaacatggcacatgtatacatatgtaactaacctgcatgttgtgcacatgtaccctaaaacttaaactataaaaaaagtacccagtactaaggcactctttatatactcagctattttgtctgatatctatgtagtctgactgttctcatcaaaagtttatacaatctgactgagaattatctttgaaattgagttagaattggtcttgctatgattcttctcattgttctcccattttattagtatctttataaactcattggatgctaatacatttgaaggtttcaatttattataattattattcttattaattatcaaattgtcccatatttggtcaatgtcatctttgttcaagttgggtcattttgacctaactccatcagtcttcgataactctcttgctttgtggtgtgacaagatgttccaggctcatcttgtacatttctttattaagaccaagaattagccattgctctaagaagacttggggcattttcaattactttcaaagtcacacttgggagaaatttcctttcttgaatgatattttgtctgattattaaaataatattccttttgatagaatatactaaagaagattaaaaaaatagagccactgataccaccatcatccagaaataatggatgttaacattttatctctggaaccatctttccacttaaagtttcatgccgtgcctttcctttttctaaacagtaggaaaagagatgatgaatgaaactagacattttaaatatttagacaaaataggttgaacacatgttttaacttgttaatcatttttgaaaaatcctaatattggccattaaacttccagggcaagctggtatatgtgggaaactttaaatttgagtaatttggattttgcaaaagtctttttgctaccattgttggctaatgccaaagattgtctgcagagctgtaagaatgcactggaaggcaaacagtactgtatatattaatagaaatgaaaagagggtaaaatgaaaagtcattatagaaccagagagtatttttttaacttatcaacttttcatgtgtagcatgtataataaagctcttacaatgtttaaagctggggttttagattgatggagagctctataaatcccagattactattaatgtgcttgtagtccagctctagttacagggttgtcattgtttccagtgaaaaggtttgtttttattttttaaagatctttagtagcctggaagaattaaaatggtgatttctagcaattttaagcatgaagtagataccaatgtcattcacaaaataatatgaactaattgtctagttaagtgtctttaatatctttgttcccctaagtgagtccaacatgaaagcaacctaggagctgctccctctccacccccatatcattggattccaccttactcgaagctcctgtggctgaaagaggactaaagtggcattttctgccaggctttgtcacgctcccttttgcccacaggtgctttaacctccaaggggctttttgtgcctacagggatattccgcactctttgtcctttgtttacagtccaatttcataaccttatgaatttgtcaaacatttagcattttttaaacctaaaataataaacgttcctcaaagcacagctaccaagtcaacggcgtaaatagcccttgggagcttttcagaaatgcaaattctcaggcctcaacccagacctcctgaatcagaagcagctggctgtattttaccaagtcctcctggtaattctgatgcatattcaaattttcattgctttaaatattcacacactacttatacaaccaataaatcaaatgtatattaagtgaacaaaacgaatctactcaaccatttacacattgattgcaaacttaatgaaatgcttttaaacatttaacttaatcacaagcctaacatttcagatttccctgcattaaacatcttacaaaggaaaaaatacacgtaaaataccacgttgtttacatagccgattattattttgacaacaaaactgggcacaaagctattaatatcatagatttaattttgtttttttattcttaaatctccttttatttttacttttgtatggtcctggaatttaaacttctgtacattgctggattgttgggaattctacaagagactctttatactttctcagggtttatgtaatttttccagactggaaagaacaaacatatcacctcgggaagtcagggatacaggttaagtggattactggccacttaattttggttggttagtgggaacgggttgctaaattcaaggtgacttaaactcaagttgctggccactagacaataattttttatcacatagtttttgttttttgtcatggaatctatattgttttctcattgctgctttaacaaattaccacatacttagtggcttaaaacaatacaaatatattatcttacagttctggagggcagaagtctaacatgagtgtacagggctgtgttccttctggaggctccagaggagaatccaattccttgtccattccagctttcaagggctgcctgtatccttgggcttgaggccccctttttccatcttcaaacctagtgtcttcatagcttctcctctcatttctaacctcctgcctctctcttattctctagtgttatattgggcccacccagggtaatctccccatctcaagatcactaacttatgaatatgaatcttcaaaattccttttgtcaagtaaagcaatacattcattggttctgtgggttaggacatggacatctttggggaccattattttgtctaccacatgacactttttgtcaatgtatttcacatttttactgtgcatacacatatacacaatgtattttttaattaggctttacaatatataattttattgcccggtttacaactaaatatattgtgaacattttcttttcttttataacagttaaaataattgcatagtttggagaaaacataatttactaagcaatcttgttggggaaatttaggtataatttttttccaaggagatttcattcttttacaatgctgttagaaaaaaggagagtctgtcttatataactttctatagatgatggaaacttgcccttcaatttagccttttaacttgcttctctacatccacctaatcatcagtcaagtaattcattttcttttttcgtgtccatctctcccatttgcttcctcttttttaccccatctccctggcacacatgcagacagatttctattactaccccagcgctttctgatccttccctccatggcctccctttaatgaggctttctttcattttaaagagaccattttaattgattttgatcaactctactcaaaactttatcctcagtttcgcattaggattagcctttaataatctgaagatataattcaattgtttaaaagaccgtgttaataagaccttggtagagttacatgtatcaagaaacataggacttgggcacaatgtacatacggctgactttcttttgaaaaaggaaagtagtttctgggggggggcagggcagaggtaagaagtaattggtacgtgaaggaagtgaggaagtgttagggaccattatggaaatgtattctttttttgttttttgagacgaaatctcactctgtcacccaggctagagtgtagtggcatggtcttggctcactgcaatctccacctccctggttcaagtgattctcctgcctcggcctcctgagtagctgagactacagtcgcatgccaccacaaccggctaatttttgtatttttagtagagacggggtttcactatgttggccaggctggtctcgaactcctgaccttgtgatctgcctgcctcagactcccaaaactgtattcattattttaaggcaactaacaaatgatcttctttcagttaggacattggagcagcagactttactggtcatgaaatttgcatgatatctaaagttgttatttctggaaataggtaaatgtcagttcatagtaactttgtatggaaaggcatgtgccagctagcataaaagtggtacatgcagatggtagttttccagagtcctgggagccatgaggtgctcaaacatcacaaggccatcacaaccaggtagaaatgcctcaggaaagcagaggggttggccatgccagcatttacacataaaacgcttcttgggcagccagatgacatggtgcacagacccacagttctctctgcacacaacatgctcacagttccatccataggaggaagggaagacacaaaagcaccccagcgtgcaggttcccccatttggacagcaggttctgttttgttccttactgtcctgtgtccccatggatggcacaaactctgaaataaggatgaattgcaggctcctcctggggctgagtgctgtcccctctgaaagccaagtcttcctgagatagacatgcaagttatggtggcccaacccaacctggccaactaattctagttcaaatgcttttgaaatggccatgatcaaaattacactccgtcattgtcccctgaacgtttaggcaggccagaggatgagagagagcagccgtatttttatcttttaaattgattctgtttttttttttttgagatggagttttgctcttgttgcccaagctggagtgcaatgcagcctctgcctcccggattcaagtgattctcctgcctcagcctcctgagtagctgggattataggcacatgccaccacgcccggctaattttttttttttttgtatttttagtagaaatggggtttcaccatgttagccaagctggtctcgaactcctgacctcaggtgatccgcctgcctcagcttcccaaagtgctgggattacaggcatgagccactgcaccctgccatggattctgatttttaaagaaatttagaagatttaagttttgtttgtttttaatctctggcagcacatgactcattgcaatatttaataatatattaacctggcctggtttcaatatttaaaaacattcatctttcttattggcattgtgttgtaattaattagttaaatcatcaaaagttttcatttccagagaaacagaaaagtgaatcttaaaatttagacttcttagccaagtgcggtggctcacgcctgtaatcccagcactttgagagtctgagacgggtgatcacctgaggtcaggagtttgaaaccagccaggccaacatggtgaaacctcgtctttactaataacacaaaaattagccgggcgtagtggcgcatgcctctaatccaagctacttggtagactgaggccggataattgcttgaacctgggagggagaggttgcagtgagccgagatcatgccactgcactccagcctgggcgacagagcgagactccgtctgaaaaaaaaaaaatttagactactttttatggacatttaactaagttagtattttggagtaaatggttattatcgttttcctcattggaaattgcatatgcgactggtgctagccaaccgctggactccttttctagttcacttatatatgagaccacaaatgctgctgaggcctgtttattcatggtacagtttctactatttctaggactgtttggcttacaaattatgttagtaatttgtggcttatgcagataaaaacaatacatatctatactatatgaacagaaatatacttaacaaaaacccacaaatatctatctatagttatatataaacactttcctacttatgtaagtaaataaatttacatgtacataatattcactcttctttgatattactattataattttgtacattttatttacattaacttttttcttatgtacatcatgtccctttagaagcataatttatttcatttcatgatctttattactacaaatgatcacaacttgaaaaatgggagctcctttaagctgactgtttttctttcagcagtgcctctgccatttaaaaaacaaatcactcttgtttcctggcaagaacaaaatgttacagacctattctgattttattctgcccaataacgtgaaactgactatcctctaatggtttctggttctttttttaaaaatagaacaatattagagacaaaaatctggtcactagggatgtttacaagtgtcaagtggggaaagactacagctactgctgctgccttgggacttctcttgctagcgactgagcttaaagaaaatacgtcttttataagtgtgtaaaatcttgttctttccagtatagcttatcatatcgttatcccttacttttcttattgtatgagatttcagcaattactaagagtttcttcctctacattgatccactgtgtcacccagtggcacagtagcccactttcctcccacctcctctctcactccgttttctaggacaatggttctcagcctagtcttcatactggattagcttggggagctttaaaaatgttgatatgggtctcactatcatagcttctgatttaaccttccaaaaagcagaatatggcatcaggattttgtaaaagctccataggtgatactaatgtgcagccaaagtaaagaacctctgttctagaaaagtgttgcaacctgaataaagccaaccaggcatactcccatgaaattacaccacagaggttccagggataccagcttgacattataaacagaaaaattaaatgcatgcttatcttttgactgctttgcttcaggagttttggggatggggacttgctaaagagagaaaaacacacctgcctttttttcagtcttcttgaaagactcatgtgtacaggtcgttgacttctccaattgttctgctagcatttctgtctttcagtctcatcttcctcactccttcctaaccttgctctaattacttcaaggttttaaaaggccttgatttcttcatctttgaggttaagataatgtctgcatgtgacacacactaaatctagcaaaattcaacaacatactgtaaagttcgagaaaaccataacaggttggcagcctaaggtcctagctgcctaaaatgatttgagaggctataatagaagtcaaatctgcttttctggctatgagattccagaaggtcaactgcagtgttaatccagactttttttatttgtctgtacacactttagggagtgctacatgtttaaagaagtctgaagtatgacctctaggattaaacacccctctgcccccaccctctccttctctctctctctttcttggggttttagacatcataaaattaaccaattcatctgatatagggaattgatagttgattataattatataccttattgacatatctacctccacttaagttacttttccatgacagaagcttgcattcttatagtatgaaaaacagaatgtctgttttagtaagaggacaaaggcctaggacctactctatttctgtgtaatctattagtattagttcttcacttagttccgatacacacccaagtctgggaaccattgtcttagggcatcaaataagtaagggtagttgcttctctaacgagaagggccttaacagaaggtggtgaactattctttgctcagaggagtttagctgcctttttccctcaattccctccctgccaaggatattatagacagagtcttctgtttttgtgggctgccatctcagaagctttgtctagtcttgatatattgcctggttaggattttaagaaaataatagatgatgctttcaaaaatatggcagtctcaattccctctttcttaggagtctcaaactttaatatgcaaatgaatcacctggaaaccttgttaaaatgcagattctgcttcagtaaatctgggtggggcctgaaattctgaagatctaatatgctctcagatgatgctgatgttgctactctgaggggcaaggtgctagctttggttctcaactttggcagcacgttacaatatagtaagaatatttttaaaaataatgatccctaggtcccactcctagagattttgatttttctgatttaattgatagagaatatggcctgggcatcaagagtttaaaaaactctccaagttgccaggtgcggtggctcacgcctgtaatcccagcactttggggggccgaggtgggcggatcacctgaggtcaggagtttgagaccagcctggccaacatgacaaaaccctgtctctactaaaaatacaaaaattagctgggtgtggtggcgagcctgtaatcctagctacttgggaggctaaggtgagagaatcgattgtacctgggaggagggggttgcagtgagttgagatcacgccactgccctccagccagggagacagagcaagactccaactcaaaaaaaacaaacaaacattctccaagtgactttcatgtgcagcaaaatttgaaaaccccttgtcttagtccaccatcaaaagttaaccaatatcacatttttttaaaaatggctcttttattcacttctcatgctataaaatatagcgcgcttagatagttcaaagcagtggtttacaaatctctatccccactgaccctggtgtggagaagcttccatcagaagtggtagaataagaaaaataaggataagaattatatagtaaatttcataaagctcaaataattcatttcaaggattcttctttgaaattgtctttcacacctttttgatgttaaaatatcctttttaaattaaattaaggtagtaacattatacctgtttatttgcttttctcatgctcttaatttggtaaataaagagttgcaaatcttatgttgatctccacatatttttggaaatcttgctggttcatgaaatttgaaaatctgggagccatgggcatgataaatccattaaaaattagaaaaaatctgatctttaagtctagaaaaatattgttataggaatatagtttttaatctttgattctctaatccctggggccaagcagtccttgaattttgtaagcaccagagtttattgctttctgtgtcagttcaggtccactaagcagatttcaagaaggaattagacttgcaagagatttattgagggaaccaccaagaaacataaagagagaggcagcaggagtgggcaagagggccttcagacagggaggcaggtctgacccctgtgggaaagaaggatgcgtgggtagggagagagcctcagccagtagcgcagctctgagaaagtctcagccaggctggtggggagccccagagcacagactgtctatcagagaggtccctgtcacgcaggaatggcccagcgctattctccccactgtgttctgtcatcaggttggaacagcctggggagggtggccttggcaggaatgctgcagggcatccgaaggtgtagcagctagagtgtcagccaatggctctcctcacagcaagttctcttctgtagggcgatctgtgtgtgcacttccatggctgccacactgggacttgcaattccacagtgaaaatgtatcttttttctgttggatgatgtgaaagaaaattagccatatggcaggtcattaatgtttctccgtatatcttgcttttggtcttgtcccttttaaccaatggccatttattaattataactcatcattatgtctgctgggcccacaattatctccataaaaaatgtaaaatcgctggtcactggataagtcgtgggaggtagaacatctggcttatgtaatgaatacatgtttaatattaccttttaaacctgtaatgttggtaggttttcatgtagtaaaaattctatttattagtatttcttgttattatttctgatcttatattaaataaggcattattaagcataattatcttagattatctttttcttggtttgccacagtgtattgtctagcatggcagatgcagtattggctcgagtgtataaacaatcagatttggacaccctggctaaagaagcatccatcccaattatcaatgggctgtcagatttgtaccatcctatccagatcctggctgattacctcacgctccaggttggtttatttatttgtcttacaaaagagcaaaatcaaataattcctgacttgctttaagtgaaacagtttacttaaatcatggtattggtgttttattttcaaataccagcttgacaaagaattacagcttgtgtgtgcattttctggggaaaacaggacattgttaaaaacagactctaagatcgctctgcactcaaccctattcccaaacccttttagcccatatctcatcttatgttctgtcaatccctttgatttttcggtgccatatttaacacaatgaatgaatagagaacactggagcatacaaaatggacaagccatatgtgattctatagacatcaggtctgtggcttgggagtgaagactggtggagtgtgctttgaatattcaaaaaggttagttactaagtcactctggaagagggggacactttctatcattttaataaactggttatttaaagtagggttaagaatatgcagaatttatagaattggggctcaaatttagccattctagtcctcccaaattaggaacttgaataactttgaaagattcctcttgtttggtttgccacagccaatctacattatattgcccctggaaatcctaacagccatggtttctatgtctatggataactctgaggagacaagataaactggataggcccatcttcttccacatttgaataaactacacacatttaaatgtgaggttaagctcaaaataaaacactttggacatgaggatgagatccatgcagagaagatgatataattatgtcagataccaaagtggctgtctgtgggtgtggctttacatatacaccagataatttaatgcttccccctggggctttatcattactagattataaattcattgagggaaaatgagctgtcctattcatcataatgtcccctgcaggaccttgtgcaatgccttcatataggagacacttaaagtaggagctgaatgaataaatagcagcttgttaagagcatggaatctaaatcagatggatctggaattaaattctagcttagccaactagtagttctgtgatctccaaattgcttagcctttctcttttttaatctttttaaatatataaaatatatgaaacctacagacacttcaagaaaataaaacaaacattcatgtgttcacacagttttgtcaattcttaacatgatgttgatactttataattctttgctgtttttcaataaaacattaaagatagagttgaagcccaccatgtaactctgcctaatcttattttcttcctttccacaaatatgttattatcctgatgttagtatctttacacatatctatagccataaacaaccaacagtattattattattatttttgttattattattatttgagacagagtctcactctgtcacccagactggagtgcagtggcatgatctcaactcactgcaacctccgcctcccgggttcaagcgattcttgtgcctcagcctccggagtagctgggattacaagtgtgtgccacgcctggctaatttttgtgtttttagtagacatggggtttcatcatgttgaccaggctggtctcgaacttctgacctcaggtgatccgcccaccttggtctcccaaagtgctgggattacaggaatgagccactgcacctggccaactaacagtattattgagcatctttgtcaacttcgtataatgggaacatgctctgagccactatgctacactgttccaggtattctgtatttcccctttctcataccaaagaatttcagctccataaaagcagtgatttttgtctcctttgtttattgtatctccagggccaaggacagtgtctcagtgtctggatgttaatggtgctcatttgtatccaatgagtgaatacaactaagactcagatttgaaatgtatgaaactcttagtctctgttcaagttcatatggtgtcttggtttaagatattaagacattttaccacgtttttgggattgtacattcatattattgagttgctctgtgtaatgcaaaaaaattgggaattcattccttctaacaaggcactaatactgagattaagactatttattttaaccttagtaattgctacacataagcgaatttacgcctggatttcatctccttcatcccgtgccttttaggaacactatagctctctgaaaggtcttaccctcagctggatcggggatgggaacaatatcctgcactccatcatgatgagcgcagcgaaattcggaatgcaccttcaggcagctactccaaaggtagggaaactttttgccttgaaactaacccctctcttaaatcatcctcagatgcaattacccagtgacaaaaaaagctctcttccatttaagtatagcacaggtgaggccacagaatttaggttacgttaccagccctactattaaatagctatctggcctcttgagagtccaatttcccatctctacaataagagatagtcttggctgatgccttttattctatgagttagtgttaaaagcatgtctgaattattcctttgaataccctgctgtaggccattatgatgactggcattgtgcattaccaccacaaaggctgaagaaagcaataaaatccaggcagcatagaattctcaacccatgggaatgatactgtcatttttctaacactgcaatttggtagaaaaatgtgaatccaatgtgaggatcacagtgatggcatctacaccagcttagtatttcaaaactcaactctggggaccttttggcttagaaaatttgagccccacatggctatgaaaatgacccctgcatacttcctaccttgctgctctctcacagcatgtatggaatacatgacttctttcataggcccaatgtaaaccttttgatacacaagaaactggtaataattgttgcctctgaggagaggaactgggaggtttgaggatagaggtaggagggacactttattttgaccatacagtcatgtgtggcttcataacagggatatgttctgagaaatgggtccttcgatgactttgttgttgtgggaacatcataccgtgtacttacacaaacgtagatggtatatatttttatttatatatattctttcacatggaaaaataaatgttccagcaccattactaaatatcaaccttaggccaggcacaccaccacaggcacaccaccgtggggatttgtgtacaggtgatttattaaggaagtactgccaagggagatccctaagggattagggggagcaggacagggaaagggaagaatctaagcaaggatgccatttacagtgaccaaccatcctgatttgctcaagatcaagagatttctggggacatggggtttggggtgctaaaattgagagtccgggcaaaccaaggtgatttggtcaccctagtcccatgtcgtgcacagtcccacagaaagtagcttcagcctgatctcacaggtgagctctggagtgtaagttatgccctaaagttatcccagcattggtcaagggcagcagaagaggtggagtggtaaatcccctggcacttttgatgggaaaagcagcctggtagccagagagctgtcccctgaagacaaactgcacgcactaggtgttaaaaacactgaaactggggaagggagcagaagccatgaaaagggatcccccgggggcctctgagtagatcaccaacatcatctgctgcatccagccaaaacaaaactaaccaccaccaaatgcttcaccaggtgtttttatcttgctgtcttggattcttagggctgccataacaaattactacaaactacacagcttaaaacaatacaaatttactctttcacagttttggagactagaagtttgaaatcaaggtgttgacaggccacactccctcggaagcctctcagggaggatccttttttgcctcttcctgcttctggtagccccaggcattcccattttccctctgtgtctgtgtctctctgtacaaatccccctcttcttatagggacaccagacatattaaatttaggcccactctaatccagtatgaactcatcttaactaattacatctggaaagactctatttccacataaggtcacattctgagtttctgggtgggagtgaattttgaagaacactattcaaccaagtacacctgccatagaaaaaatgtactgcatgcagtggaagtcatcctattatagtaaatttgagggactcagagagatgacccttacaacagataattctcctcttttattcagcgtgaactgaaataagggtcagatccgatatgtgcttaaagcggcttttattcactttatgggaagggtgagtacactctctatacaaagctagtttgaagaaaggctctgtattaatgcaaactcttattgcatttggttcccacagatgaaacatacattaacaataattgctccctgctatgaagatcttttggaaggctttattctgttgaagaaatatatggtttaaacattttattgcatgccaaagatgttttattaacatcaaaggaaaaaattctaatattacagagtaattgcagtattgttcttaaggagaaactcatttaaatgataaagagtactaaaacctggttaaaccttggtgggagtaagagttttgcaaagtcttctggaaagtctgatagtgcaaaagtcattccatcaatttgtaagtcttcagttgttagtagacctgtttcctttaaagataaagctaggagatttattgtaaattttagaaacactgaaacgtttccaaggccatgattaatctatttccccattctttaaccaagaataacttacatgttcaagaaaaaataattttgtccatgattgtaaaattgctccataaactatcaatagtaatgattttaacattgttctaagtgaatacttagagtgaactgggtgtgttaatcaccttctttgtctggttttaaaatttatgtaaaggctagtgagtgatttagtattgaaagctgagatgtgagtaaagaattcctctctgtattctaagtcatgcctcagtgcatgcaaggttgggtgattttctaatttccagacctctctgttggttctctaagtacttattgattccttttctaagaattattgtacttagggagtataaaacctactctccaaagggaaggctaaattttcagggtaggaggcacctgggggaatatccaagtctcttcatttatgtttaccagtatggctgttcacaacattagttgctaaattagctagcctttattaattactttccccaaatctctataaacaaggctccagaattcatggctatatgagggtggtaaagctgctaaaatgtctgcaggcatcttcatcaacatctgagtagtttcttctttcaagaatgctttaatagaagaagaaactatggtagacaatcatgtgcaaataaacacaatttcacaaataaacctagacatgcctgtcacaggttgggtttcttgggaagcagactcagagtttagtgtgcaggacaggcaggatgcttattagcatgtgcccttgaaatcaacaactgtggaaaggaagggaaggaagcaggagtaagagggagaagctgagttgcgatgcagacccaacaacagccttggctgatcttatggaaagttctggatctgagatgtccattcatctgtctggagttgggcagaggagggtcaggttttcataccctcctgtcaatcagccattgaatgtgggttgccccaaaagggtgtgtgaccttgggtgcggctgctctctgcagcagaggcagtgcccaaagggggctgacagctgaaagccgtcttctggcagcactcccagcagctgggggaataagtcctttattcatgattattcctggagggggatctcgggagcataccacagcgttcaccacaatgcttcagtgaaaagtgataaaaatcaactcataatcaatgctaagaacttgggaaaatgagaaggatagaggaaggtgaggataattacagtgtttgaactgacaagacttccatatggagggtcttggaggtgaggctgggctagagttttgaggagctgacacattgtgatgaagaagcccaggaggggacaagagaggaggtgttcaagggtgaaaggctgtgatggcagaaaagggcaagatgtgtacagggatgacaataagattggctttcctgcagcaagatgttgagaagaattaaaagagacagaagcagaggatggaggtggggagccttgatgctcttaatcagctttgacttaagaaacaagtagtaaacatcagaggcttcagagaaaacagttcttgctgctgtgtacagaataggttggagagtgagggtagaggcagggaggctgcctgtgggaatctgggataccttggggagctttagctgttcccatgatgtctcctcacccagagtaggaactaggctgagcaagcgaggcacctagggtgcagaatttgtgcatgcatgaccctgagaatgtgtgtttctttacattttttctagcgcctccttaaatgttttgccctaggcacctcgcttgcctctccagagtctgactctgccctcaccaaaccatcccggacaaatatataatcttagcaaaaacaatgtatttgttctgtcaatgcctttcaaaacaagcaccctgccctcaaaaggcttgctggggaatgcaaaagaatgagaggtgtgtaatgggggagggggagctgttagtatttagctgggatggtcagggaaggtttttctgaggaggggacatttcaactgagacctgaaaaagttatccacatggaatgggtggaagaaagaatttcagacaagaaaggatagcatgtgcaaagatagacaaacatgcattcatttgcacacttctgaatataatcctcttaagccattatggaaaccggaagaggtgcttccaagagttagaaagcaccatgccttatgtttgcctttatgattaaagaagtcggagatagtgaaagctggggcaattggttgtctctttaaattccaaaaggcactattgagttttggaattctagatgtaaaaatcatattctactgaacatggtgggaccacatcttgaaaaagggaaggagacgcgatattgaaaagaaaataatatatatttaagaaaacatgtataataaaattacctaaataagatttaaattcttcctcctttagggttatgagccggatgctagtgtaaccaagttggcagagcagtatgccaaagaggtatgctctttacatgtaaagctattattgccttttactgtcccatgaagttatttaaccagcgtgtttatgtatgctagaatggtaccaagctgttgctgacaaatgatccattggaagcagcgcatggaggcaatgtattaattacagacacttggataagcatgggacaagaagaggagaagaaaaagcggctccaggctttccaaggttaccaggttacaatgaaggtacaaattgatgcctctctgaaggttcattaattccattcatgaaggccagaaccatctaatcacttattcactttagggggagcagactgtcctttcattccctataaaaggactcactgactgtatcccctagggacttctctccttccaaagattagctgtgtcctttggaaaggcatttttgtgctggatgaaggaatttgaaacccactgagaagagaggagcaggcttttccctctcacaagaatcgaggcattgcagtgttttactctttgtgtgtttagagaaattaggttacttctgatgcatgcagtttcttatgatttctcccctaagaaaagccccttaactatgctcctcaggctagtccttgcctctattttccaaggacctctaaatccagtttagttttgctaatgccctccagggcattcccaggggactcatctgtttggctgtcttccagtaagatctggaacaatgcttctcagtcttgagcaggtattagcatcaccagaggagttgttaatacacagctggctgggtcccacccccagggtttctgattcagtaggtcagggtgaaacctgagaatctgcatttctaccaagttcccaggtgatgcagtgctgctgcctccagggccacactttgagaagcaatgttctggaggaataccctgaaagccaaatgcacaggggttttgtcagcaaagcaacaaatctactttggtggagaaagggattaagcaagtacaattaatattatattgataaagtaatacataaatacaagttctttattgttatatataaaatagaacagaagtttgaaaaataaaaagtaaaaatgtctttctcccatctctttaacagagactattcctagaggtagcctctgtttaataatttgatgtgtctctttgcagaccttttctgtgcatttacatatgtatgcctcaatacacacataactattgatttttttgtaaatgatattttagacattacttatttatttattattattcttactttttccacttaacaaatcttagattttcttgctcactcatttagatattttttattctttttagttgctgcatagaattccaaaggataagtggaaccataatttacttaaaatgtttcctattgataaattaggctatttctgagaatgccgattacaaaaatgctgcaatgaacttgcttatccatatttctttgtgcaaatattactggagaataagatcctgaggagaggaattttggggtgaagtggtataaattttttaaaatatgagagtgctgctaaattgcttacccaaagaagattaaaaatgtatactgctgcagctgtatattatagttatttttccatatcctctccatgtttagcttttatttacatttttaatttttctaaatctggaggaaaaatggcacctcatctttgttaaaatttgcaattccttgattactaatgaagttaagcatctttttatgtttattgggcattgcccttttttctataaattgctattacattttttgcccattttctatttttttgccttttctattattggttataggagctctttatatattatggctaatcccttatcatgtggaatatattttcatggagatattttaaattatataaattgcttcatacttacacttgcttggccaatcttatatgtgttgctggtgctggaactgtaggattgaagaacagtcattttgttgatgtatggcatttataaatgttacttttttccatgtaattttgctggtattttagaaactcaaaatgtcctgaacctagagcttgggtgggaggtaaaacaaaattgtagtacaaaggcagtaattttgaggtaagaaagtatgaaggaatgtagttttgaatctgtatgtgaacaatagaaatatatagggaaatgtaactttcagcaattaactgttggagaaaattaaaactgctagtacatttgcattaagaatgaaaaatctaatgcatagtgcttataatcctgtttaattcacccctacctcattacctttatctaaattgttttaactagtgatggagtatgcttcaagtgctaaaaataataatttggagatcagctccaaatataatattatcacaccaaagcaactttttaaatatagtggactataattggtgacttttgctatcagccacatattacattagtagagttctttactgaaaggtctactgttccactaaatagaataacagaaaactgagttactggtgtaacttgaagtggtactctcttaaatttaaaaagaaaaaaaaaaaaaaaagacttgccagacacggtggctcatgcctgtaatcccagcactttgagaggcgaggcgggcggatcatttgaggtcaggagtttaaaaccagcctggccaatatggtgaaatcccgtctctactaaaaatacaaaaattcactgggcatggtggcacatgcctgtagtcccagctactcaggaagctgaggcaggagaattgcttgagctctggaggcggaggttgcagtcagccgagattttgccactgcactccagcctgggtgacagagcgagactctgtctcaaaaaaaaaaaaaaatttgaaagtaccatgtacatttctcctaggtgtcttgagataaaaccatcactctgctcctttgtctctccctttgcattgatgtctgactactggccatgtgtgtttttagatactgaagaaaacaaatatgactgccacatataatagtcaaaaagtggtcttatccccatctctttagactgctaaagttgctgcctctgactggacatttttacactgcttgcccagaaagccagaagaagtggatgatgaagtcttttattctcctcgatcactagtgttcccagaggcagaaaacagaaagtggacaatcatggtaagcaagaaacaaggaatggaggataagttctttgtgtggttccaacttggtcattcatgcctttggggaaataataagcaagtgagattatccaactacattacttgctcatgtaacatctatttttttccagaaactttataatacatcattagtgcttattagcatttatagtgtatttgcatggagtgagattaatctcctttcaaataaatccattttaaccaaaattcttaccacccttgatccgcctgagcaccagccaccagtttgccaaccattataagtcatataattcttattttagaatctctttgttcatgtttagagaagcccctaattcagttcctgtataaaatgggcattcaaaacatcttactttttcccttctctttttcctcattccatgccttactttatgactggactagatacttgttttcgttctttgagtttggccatagggatatatgtgtttttaggtatagaacatttccaaatttcatggcaaaacttatcttaaaaattaatggttcctttcagataaagccactagtttcatcttcatcactgtcattctaggaaatattaaccatatgtctactttacaatatcccaaatgtcacctgctctggaaaatagtactgacatgtctaacttagctccaccatttttttagcttttagtgacttaactggtctcaattactgtatcagccaggatcttacttgcaaacgggagtccactctaggtagataaatggaaagtaatgtattaagagacattaagcggctcccagaatcttttgggaaaggaagtgcagtgaataattcttggacaccatatagccagggacaacacaggcagaaaaattgcccaatgacactgtggttcttttgtagccagaacaccactgacacagcctggtacctgaggctcttgaaaccagatgtcagatactccattatagccaccacagctgaaatagatttctctacctgcatatgtagcagaagatccaatctctccgaagacggcttccactgcatgttgtttgcttctgcacccaagtctggagtagatgcagctgagtgggatgcctgtaccctagctgcaagggagtttgggaaaggcagtttttagctttcagcctctggagtagagaaaagcaagctggaaaggactagcttctaattatttatctaatctataaattggaataggtttattgtgaacattaaagtaatatgtgtaaagcttttagtatagtacataacacataacacatggtaaatattgttatcataattattaccctcattatcatcatcttcactattgatctgatacagaccctataaaataagcaggggttcaagctcaactatggctgcttggcagccaaccgtgactcccttttcaatagaagtttgtatattaggcctaaatttgtcatatctaataacagggatgattttttttcactgcatctttccagcttgccacctcaggacactaactttggccaaaatgtcaattgccttgttatctaggccagtacttctgaagccttaatgtgcatttaaattacctagggggtcttgttaaggtgcagatttgaattctgtaggtctaagatggagcttgagatttggcacatctattttttttttttgtttttttttgagatagagtctcgctctgttgcccaggctggagtgcagtggtgtgatctcggctcactgcaacctctgcctcccgggttcaagcaattttgctacctcagcctcacaagtagctgggattacaggcaggtgacaccatgcatagctaatttttgtatttttagtggcgggtaggggggtttcatcatgttgcccaggctggtctcgaactcctgacctcaaatgatccacccacctcagcctcgaaaagcactgggattacaggcgtgagccaccgtgccaggccggcacttctaataaggacccagttattgcaggtgccaccatcctgcagaccacattttgagtagcaaagatctagatgacaaagaaaatgtgagctctccaaccacatacctcaggaagagacacagcaaaacattttccttgagctctgtttttcatcagaagacaattgaagttacaaagatatatcaagtaaatccatcaaagtagatcctttgtagaaattcagtagggaaaactaaaaggaaactttccaaaacatcaattatggagatgctctgaacttcttatcttttaaagagcttattaaacaacgtctttaaaaccaatttacttgaaaaattaaatacgtaatgtattcacatggttgaaatatttatggtgaaatcttacatccacccatttttccatccatctagatcttaccgccatctccccattccccatacccctgagttacccactattattagaggaaaatattttaaagaaaccaagagacagaatcgtgttaaaatgaaagtagagagtctaaagtagaaagaatgctcacctgggagtgatgagacttgacttctgtaactggccttaatactagtcagctgtgccatcttagcgtctaagtattaactctctaggtcccagtgtcctctcccatgaaataagcagattgagccatagagatggcaaatgagttttaattcttagatccctaatctcatcaacaggctacaggaattctgttgagaaggattttgagcctgcctatggtgtgagacagaaagagtggcataactgattagcgtgccttacacggacgctagaaaggaggtggtgatacatgtgttgcgctctttatgtctctgagctagatgatttggaggtccctttgagttcagttcatttcagcagccatatagtgagcatctactctatgccaggtcctctgccaggcattggagattgaaaaaaagagaatagtatgcagccaccacacagcctgtacagttcatagaagcataacattttcaagtgggatgagaccttagagactatccacgctaaattcctattctataggcaaataaattattattattattttattattatttttattttttgagacagagtctcgctctgtcacccaggttggagtacaatggcacgatctcggctcactgcaacctccgcctcctgggttcaagtgattctcctgcctcagcctcccaagtagctgggattacaggtgcccgccactgtgcccggctaatttttgtatttttagtagaggcagggcttcaccatattggccaggctggtctcgaactcctgacctcaggagatccacctgcctcggcctcccaaagtgctgggattataggtgtgagccaccacagccggccgcaaataaattattcttatacagcttatttagaatggcctttaggttcagcactgccgtgatacatttttctaagatgttctaatacttgtcttcctccagactaccctatccaatacagtagccagtaggcacatatggctttttaaatttaaatctaagctaattaaaattttacaaaattgaagattcaggccaggcgcactggctcatgcctataatcccagcactttgggaggctgagacagggggattacttgaggtcaggagtttgagaccagcctggccaacatggtaaaactctgtctctactaaaaatacaaaaatattagcctggcatggtggcgcacatctgtaatcccagctactcaggaggctgaggcaggagaattgcttgaacctgggaggcagaggttgcagtgagccaagatcgtgccactgcactccagcctgggcgacagagcaagactccgtctcaaaacaaacaaacaagcaaacaaacaaaaaaagagaagattcagttcctcagttatactaaccaagttgttgaatgctcaatagccacatgtggctggtggctacactattggtattggacagcacagacatcgaacacttccatcactgccgagagctctattggacagcactactctagggaataatttccacgcatgcaacttgatttaaaatgaggatgaaataagaaaggaaagccacaatgtcgccctccagttctgagatgcctgtaatgactgatgtaaggtatacactaaaataggatgaagggctttttctttaatggtgtagcattttttaaagcagaagtgtcctctttcagcactcagagtagctttttaaggcctccatgctaagagatttccagtagtgctgttcagaacgcttcactaatcgcatcattctcttcatagtgcacaggtctttggacccctttgtttagaaacaaaaatcacacttttcctccccatgaagcttgcttttgtatttttcagtgattaataaggcagtaggactcacaaaaagtagatagatgttttccctctgcctataaattttacactggagctaaaataacctaaagggaccctgaaaaaaagaaaaaatgctgacacttcaaagcactgttatccacatatgactcttaagtccaaaacaccattgcaaatgtaattcacaatattttatagtcatttacttctccccaagttagagttgccagataaaatagaggacacccagttaaatttgaattttggataaacaatgaataatttttagtctaagtatgtctcatgtactatttagaacatacagtaaaatatatatttgttgttatctgaaattcttatttaactgtttgtccgtgtttatttaactgaatctgacaatcctaatccaagttgaatttgtaagtttttatttggaaataaggttgacacaatccatagacaattaaaaacaaagcaaaaatgagaggggctcccaggaacccattaagaagtttacagtgtcttttacctggtagacattcttatgccaaagtttgccctggctaaactagttccttcttgtcattcagacatcaccttaaatgttactgttgagcaagatcttcccacaccacccactcttaagtggttcccaaggctcctttatctcctttttacattttattttctaatggcactacttgatatttttatatttttttgtctgtttgttgcctgtccccctactataatgaaaacttctttatgaaggcagtaaacctgtctgtaacgttctttattatacctagaagtttgcctgacacatactttaaatatggactcaatacatttttgcagcctaaaggcaatatagggaattggttttagaacataagttttggaaatcaggttaaaattctggctctctctgtgatcttgggctcctaatcaacttaggcaagtaccttaacttcactaagaccagtttattcatatgaaaaatgaggataaaaaatagaaccaacctcttaaggttatgaggattcaatgagatcagagtcatgtgagcattgtagtcaggacccagggacaggtaggtgcagatccacctctcaccatcaccactcaggaaacttcctacatctcagtttctcgatctgtattttacatctcttaccatctcatacagtaggaaaggatattaaatggtatgatgtacatacagcactcagcaccgggcctggcatgtgataactttgataagtatattcagttaacacttttgaaatataagacctgcacttttgatataggctaggaacacatgtacagtgtggttgaagtgtaagaacaaggacctgagagaccacaaaactaccttttaagagtagagtcatccagattcacccatgttgtcacaaatgacaggatttccttttttaaggctgaatactattccattggatatatacaccacattttctctatccattcatccattgatggacacttaggttgattccatatcttagctattgtaaataatgctgcagtgaacatggaagtgcagatatccctgcaccagattggtttcagttcctttggatacatactaggaaatgggactgctggatcatatgggagttctagttttagttttttgaggaatctctatatcattttttataaaggctgtactaatttagattcccaccaacaatgcacaggagatccccccctctctgcattcctgtcaacacttatctttcatttttttaaaaataaaagccactctaataggtgtgtggtgatatctcattgtggtttaatttgcattgccctaatgattaatgatactcagcattttttcatgaacttgatgatttgtatgtcttctttggaaaaatgcctgttcaggtcctttgcccattttttaatcaggttgttttctttctctttagttgtttgagttccttatatattttggatattaatcccttaacagatgtatggtttacaaatattttgtcccattctgtggattgtctcttcactttattaattgtttcttttgctgtgcagaagctttgatgcaatttgatttgtctatgtttgtttctatcacttgtgttttcagggtcatatgtgaacaattacaagactcatgtcatagagcttgatatggtttggctgtgtccccacccaaatctcatattggattgtagctcccataattcccacatgttgtgggagggactggtgggagataattgaatcacaggggcagtttcccccatactgttcttatggtactgaataagtctcacgagatctgatggttttataagggaaaagccctgttgcttggttctcattctctctcttgcctgccaccatgtgaggcatgccttttgccttgtgcaatgattgtgaggcctccctagccattggaactgtgagtccattaaacctctttttctttataaatttcccagtctcgggtatgtctttatcagcagcgtgaaaaaggactaagacagagctttttccctatgttttcttttagtagtgttacagcttcagagcttatatttaagtctttaatccattttgagttgatttttatatggtgtgagacaagggtccaattttatttttctgcatgtggatatccagttttctcaacaccatttgctgaagagactgtcctttccccattatgtgttcttggcacctctgtcaaaaagcaattgaccataaatgcatgggttcatttctgggctttccttactgttttgttggttaatgtgtctgtttttatgacagtaccgtgtggtttttattaaaatgtctttataatatgttttaaaatcaaggagtgtgatgctgccagctttcttccttttgttcaagattgctttatctatgtgggttctttgtggttccctacaaacttaaggattgtatttttgatttatgtgaaaaatgacattggaattttgataggggttgcattgaatctgtagatcactttgggtggtgtggacatttttacattaattctttcaatccatgaacatgggatatcattccatttatttgtgtcttctttattttctttcatcagtgttttatagttttcagtaaacaggtcttttaccttcttgatacaatttatacctaagtaattttttgttgctgttgcaaatgtgattattttcttaattttcttttcagatagttcattattagtatattagaaatgttactgatttatgtatgtcgatttcattttctgcaattttactgaattcccttaccagttctaacagttttttggtggacattatgctaagtaaaataacccaggcacagaaagacaaatactacatgatctcacttatatgtggactctaaaaaagttgaactcatagaagtagagagtagaatgatgattaccagaggatgggggatgggaaggaaggcaatggggagttgttgatcaaagggtacaaagtttcaggtagacagggagaataggttttgagatctattatacagcagaatgattatagtcaataataatatatatctcaaaataacttagagaagaaatgtcaaatgtctctccataaaaaagataggtaagtaaggtgatggatatgttcattagcttgatttaatcattgcacattgtatacatatatcaaaacatcatgctgtactccataaatgtatacaattataatttatcaatcaaaaataataatttttaaaaagagtagagtcagagaaaaccagggttccaacccagttctgcactatctgtcatctcaaggattgatttcctcaactataaatgataataataaaagctaccttagaattttgttgtattaaatgagataatgcatgaacattttcctctagctcaccaaagctcctggcacagtgcttgaaaaatatttcttgaccaatacatgatatggtacttagtattctatctaatacctagtaagcactcagttaacattcaccatagtttctgatattattattgtcattcttgtggagattgagaaaagtaaaagtgaaaattaccatttgtgattgacagatcaaggggaagcggtatactcttggctatagagataatactctttcaggaatacccagcttcagagagcagacattgctcagattactctacatctgattcatcctaaacttctctaggctgcgagagatcaaaccacggtataaacacaaggatctggaataggagagatgatatttctctaaaactagccaatactatacttatgactggaaaattcagtcgtggctaccactgtagcatctcatttcaactctgtgacccactagtcctggaatgaggcctaattatgcagtgtttgtgtgtctagatcagtctgatctctgttgactttcatttataccctcctccaataaataaataaatattagttcagaactgttctcttaccattttcttgagaaaacacattttaactgtaaccctgcaaagctgaaacctaattcaccttctctaggtccctaagcagactgtcgctaatgtttatccatttctttctttctttgttgtgtcatcaggctgtcatggtgtccctgctgacagattactcacctcagctccagaagcctaaattttgatgttgtgttacttgtcaagaaagaagcaatgttcttcagtaacagaatgagttggtttatggggaaaagagaagagaatctaaaaaataaacaaatccctaacacgtggtatgggtgaaccgtatgatatgctttgccattgtgaaactttccttaagcctttaatttaagtgctgatgcactgtaatacgtgcttaactttgcttaaactctctaattcccaatttctgagttacatttagatatcatattaattatcatatacatttacttcaacataaaatactgtgttcataatgtataatgtctaagccattaagtgtaatctatgcttattacctaaataaattatcacccatgctaa

SEQ ID NO: 56 - DNA, 441342 bp, Homo sapiens
  source 1..441342: mol_type = genomic DNA
gcagaggggcggtctgcggggacaacaatggcggggttctgggtcgggacagcaccgctggtcgctgccggacggcgtgggcggtggccgccgcagcagctgatgctgagcgcggcgctgcggaccctgaaggtgaggagcaacggggcctcgcgggtccgggcttcactgggcttctagccgtgccgcctctgggcggctggcgccgggagagcgctggctgggtccggctgcccccgcgccccggttccgcatcagctacaccgcttgctttcctccctcccggagttcgcgtggcagcgggctcaggaggcatccctcgttgcagctgttcctcgcggggatcctgcggagcagagaggcctagggcagaggcagttgggtgcccgcacgccctccgaggcggctgatggctttgggcaggcatattgctcgaggtctgcttccagggccccgcggcattggctttgtcttaagctttccagggtgtctttttaggtgtccttatagtttccgtgttctgttgcctctttccagcatttttgaagggacactgtgaactgttgcttaagtagtgttagggttgtgagtttgtcttatcttttaaagtattataccatgtcaggactgccaatagattttacgtttcatttgaaagcctgttttaattgtatgacaccccagtctactgtgtaccaaatgcatcccgtgaacttactttccttttcggtatagtggtgagcctgattttggcactgttctaaacacatttcatgactgttctgtatacctaggctgtcatgatggcagattgacaaacaggttggagtgcttgtgtgtgcttctgagctctgtctccagtcaatgtcgagtctgtcgttaattctggggcacagaccacctaacctactttataaggtttgttgaggcacttgaacacattctttaaaatgaaggtcccctgaaaaccatctgtcagctggttcagtgtgcttgttaaacttccttttaaaaaataattattaaaacattgccacataacttgatttatagtcatttaattttagacgttgaagacactttagagacgacctgccccatcctactctttaaagaggagggaaccgagccccaggtgggcagtatgagagctggagcttatcgacatggaagtgagtggcacctatgtttgttttgtgtccaattcagcgtgcggactttcactgttttctgtgttcccatacagtttagtgttctttaatctttatcattctgttcatctgtgttggccacttcaattgcagctgtaagacttatgcatttacataggaggcaagttagtatggtgtaaagtgtgggctttggggtcaggcgcatgaggctttgtatattggacaggtctcttccttgggcgtcagcttcgtccttgtagctatttttttcaacaaatatttactgaatatctcctgtcttccacttctggggaatgaatatggtttctgctttcttagaaattttactctagtagggagactgtaacaagtgtaaaatggtattaggggagatgcccgggtgctataagaaaataaaatagagggatttgaccaagccaagattttgaattctgtgttctagatactgttctgttgctttgcttgaactaatttattcaatctcacaacagtcgtatgtcccccatttacagaagatgaaagtgaggcactgagtgttaatgtgacttgctcgaagctatagtgccaataagtggcaaacaggatttagaactccagaacctgtgctcttaatcatactatgctatctacggtaagggagtgttttcctttggaactgaaaattgagacaagttttgaaggatgaagtgaccttttctaacaaacagagatgaatgttataggtgagagagcagtgtatgcaaaggtcctgtggccagagggaatgacaggttagaagaactgaaaaaagcctacagaggctctgatgcagagagtagatggtgttggggaagctggcaggagtcagaccatctggctcttatagatcacattatgaggtttggtgtttgtcttagagcagtgggaagacattgatgttggaggtgggagggatgacactgacattttagattggagaggctgagaggaaggctgttactgtacttactgttgtacacttgttatacacttactgtgtaatacatacgctttgatgattcttacctggttttttccttttaatgtgttggcagagactgcatcttgtctatttctgtgttcttagtacaatgtttgacacaataggtgctgaatgtgtaacaatagagtagcattatgtttgtgccggtaaagaattcctccttggggtgggaagcatctctgaagttcactatcactctaggggaacttgagctgctgcttagcttctctctgcgcttctcttctatgaacttgaaatatgctctactgagtctgtttgaagctgaatcttttgaagattttaacccctcccatccctccctccacctctgcaaaccttttggttggttgaaaagcagccagctaactctagggtctagtctagagaattctgaccattcttttagccagtcaacagagtttatttatttttagggtatatgtagagttcaccttttagtcttatttgttttgtgtatcagctttttaagcacattctgttttaatgcctagttttttcttctgcgtaaatgttttcagtggctctaggatgttggttttatggtaattgctatagttattattgaactcttatatgccttgcatgatttttctttgcttttctttttttttgagatggggtctcgctctgttgccaggctggagtgcagtggcgcgatctcagctcactgtaacctccacctcctgggttcaagtgattcccttgcctcagcctcccaagtggctgggactacaggcgcacgccaccaccaccggctaatttttttttgtattttagtagagatggggtttcaccatgttggccacctcgatcttctgacctcttgatccactgccttggcctcccaaagtgcttggaattacaggcatgagccaccgagcccaatggtgtgatttttcatatatcttttatccttataacaactaggtaaaaaatcccaattttacagtagaggaaacaaagctcagggcagttaagtagttgcttaaaagcacaattggctgaagtagaatttgaaccttagataatatgattctgaaggctttcttttctttcttccttttttttttttgagatggggtctggctctgttggccaggctggagtgcagtggcatgatcttggcctactgcagcctctgcctcctgggctcaagccatcctcccatctcagcctcccaagtaggtgggaccacaggcacgtacgaccacacctggctattttttaattttaatttttattttttgtagagatggggttttgctatgttgcccaggctggtctcaaactcctgaactcaagcaatccacccacctcagcttgcttttctaattacaaattgtctcatttgaatcatggtctcattgtgtgatgcattcatgaaatttgaatgtttaagccctgtgttacttgacatccattattttcttttgtaatcagtaaatatggaaaagaatgtttaggcttatatgaatgctttagaattgcctggaggttaatgtttccaacatgctgataaatttctgacaaatcatttgggaaaagaaatttctgagattattacagaaactagtttctggtgtaaaaaaatgtttatagacatttatatatttatacatctaccatttggattttattctgttcctgagaggttcagaacagaggtaaaaactgctctagtccttttctaagaggaaaagatgtgacatttttgatgaagagtgagggaaaaggatttgtttaaatgattccaaactttaaaaaatgtaggtgggagaacaaggatgaaaaaggaatttgggaagaaacacttttttggtggggctggaaacatagtgtttcattgtaggtatctggagttagatgcccgcaggagccatgctgaggtgctgggtatcagtggctggcttttgggccagggatacgaggctagagttagagttagaactgtgagccctgacggatatagtgagtcagttaatatttaattgaataaatgcttcgttttataaccctaaattaggatttggaagaaggaagaagagacaagaggagttagaggtatggtttgagaggagccaatgtagtgtagtgttaccaaacctaggaaagaaatttcaagaagtagttagcattcattcattcatttgtctagagatctagctctttactcagaaagtgtttgtggagcattttctaagttccaggtactatggcacgtacagaggagagaaaaagaaattaaaacatattccctaactatgtcccaggtgcagagaggctaaggaataaaagattgatgaggccaggtgtggtagctcacgcctgcaatctcaaccctttgggaggccaaagtgggaggatttcttgagctcaggagtttgagaccagcctaggcaacataatgataccacccccacccccggctatctctacaaaataaaataaaataaaataaaaattagctgggtgtggtggcacgtgcctgtggttctaggtacttgggaggctgaggagggaggatcacttgagcccaggaggtcaaggctgcagtgagctgtgatcacaccaatgtactacagcctgggtgacacagcaagaccctgtctcaaaaaaaagtctgggcacgatggctcatgcctgtaatcccagcactttgggaggccgaggcaggcagatcacctgaggtcgggagttcaagaccagcctgaccaacatggagaaatcccgtctctactaaaaatacaaaattagccgggcatggtggcgcatgcctgtaatctcagctacttgggaggctgaggcaggagaatcacttgaacccaggaggtggaggttgcagtgagccgagattgcaccactgcactccagcctgggcaacaagagcgaaaatctgtctcaaaaaaaaaaaaaaaaaaaaaagattggtgaaagaatttgaaaagatctttgatctttaatgagaataattttagtagcatggtaaagtgttatatacaaaaaatactgcttttgacaacactcttgaatagttgaagcaaaattatattttttgaaagataagcatattgcataactttcaaaaattagtttctttattttaaatgcctattgacattttcgttagaaaaaaccccacaaactgatgggatcaacctaataagatcaaaataaaagtgaatttaaagaatgttggaagatacagttttgtgatttcattcacaaaacctaatacagcatccatgtggcatactctctttggtattgtttgtttgtttttgagatagagtctcatgttgtccaggctggagttcagtggtgtgatctccgctcacggcaacctccgcctccggggttcaagtgattctcctgcctcagcctcctgagtagctgggattacaggcatgtgccaccatgcccagctaatttttatatttttagtagagacggggtttcaccatgtcggcctggctggtcttgaactcttgacctcaattgatccgcctgcctcggcctcccaaagtgctgggattacagatgtgagccaccgtgcctgccctctctttggtattatttattcaagaaacctttggtttcctagagctgctgtacaaatgaccatggacctggtggcttaaaacaacaaattcattctcccacagtactaaaggcctgaagtctgaaatcaaggcatgagcagggccatgcttcgcctgaaggctctaggggagaatcctttcttgcctctttgagcttctggtggctgcattcattccttggcttgtggctgcatcactccagtctctgcctctgtcttcacatggctgccttctcctcctccttcttgtgcgtctttccctctcattcttttataaagacacttttcattggatttagggccatgacaagatctaggatgatttcatctcaagatccttcactttgttgtattggcaaagacactttatcacaggttccaggacgtggacacatcattttaggggctatcgttcaattcacctacacgtagtatgtgtcagacactacttagagctgggaatataattgtgactgtttctgctcccattgtggttacatttgagtaaggagactgtgctcgtataaatagaaaagttcagagagtgagaagtgctctcgaaggaaaaagataggttaatgggatagagagtggtagtggtgctgagttggggatgttacctaatgagaccatgggggacatttctgagcatgtggcatttggacaggaaactgagccagccagccatgtgactatatgggggcctagcattgcagaccaaggagtgccagggcaaaagctctgaggggagattgcatttggcataattaagggatgaatgtggctgctgtggttggagtgaactgaatgagggggtgatcttaggagatgagggaggaggagtgggtaggcgggacagagtcatcaggggcttgtatttggaatttagtaatgagagtccagttggaggcatttaagcacattgaatttatgtttggaaaagacgtttgtgactagtacgtagcgaatgtcttagtaggggtgggagtaggattggggactggggtgggaagagtggaaacagagagacccatcaggaagctgttgtagaagaccaagctagagatgatggtaacttgtgctagggcactggagttgctgagaactggtcagacttggaatgtattttggagctagagccagtatcttgctgtggggtttgaaggcagatacagatgtacctcatatcttggctttattgaccctgcagatactgctttttttttgttgtttttacagattgagggtttgtggcaaccctgctttgagcaactgtattggtgtcatctttccaatagcacatacttacttggtgtctctgtgaaacattttgataattttttcattattactatgtctgttatggtgatctgtgatcagtgatcttcgatattcttattgtaaatattttggggtgccgtgaaccacgcccatataagttggagaaacataattgataaatgtgtgagttttgacttctccaagcagttattcccctatgtctctccctctcctcaggcttccctaattctctgagatacaacaatattgaaattaggccaattaataatcttctaagcgttctagtgaaaggaagagtcacacatctctcactttgaatcaaaaactagaaatcattaagcttagtgaggaaggcctgtcaaaagccaagatagactgaaagttgggcctcttgtgccaaattgtaaatgcaaaggaaaagttctggaaggaaattagaagtgctactccagtgagcgcacaactgattaaaaaaagtgaaacagctttattgctgatatggcgaaagctttagtggtttggatagaagatcaaaccagccacaacatttccttaagccatagcctaatccagcgcaaggtcctcgcttcagttctgcgaaggctgagagaggtgaggatgctgcagaagaaaacttggaagcagaggttggttcatggggtttaagaaaagaagtgaggccgggcgcagtggttcacacctgtaatcccagtactttgggaggccgaggcgagtggatcacaaggtcaagagattgagaccattctggctaacatggtgaaggatcagatgattgttagcatttttgagcaataactgttttgaacaataattaattggacctgaacctacagtatctgtaaggtatgtacaaacagggaaaggaaggaattaagagtgacttttgaagggtagacacacaaggtcgctattgtgtgattttgtgtttatatgcagtctccagaatagactgatccatgaagacagaaagtagattagtggttgcccagggcctggaggagaggggatgggagtgactgcgaatagttaagggttgtctttttggggtgataaaaaatgtcctggaatcagtagccatcatggttccatgccttgtggatatactaaaaaccacggagttgtatacttttttaaaagggtgaattttatggtatgtgaattacatctcaattaaaaaataaaagaatggtccgggtgcagtggctcacacctgtaatcccagcactttgggaggccgaggcaggtggatcacctgaggtcgggagttcgagaccagcctgaccaacatgaagaaaccccatctctactaaaaatacaaaattagccaggcatggtggcacatgcctgtaatcccagctactcgggaggctgagacgggagaattgcttgaacctgggaggcagaggttgcagtgagccaagatggcaccactgcactccagcctggcgacagagtgagactccgtctcaaaaaacaaacaaacacaaatcttcgaatacttatgttaacaaagtaaagcaaagaggccaaggtgggaggatcacttgaggccagcagttcaagaccagcctggggaaaatagtgagaaccccccagccgcccagtctctacaaaaaataaaaaaattagtggggcatggtgacatgcatccatagtcccagctattcaggaggctgaggtgggaggattgcttgaatgcaggagttcaaggctgcagtgagctatgatcctatcactacacttcagtctgggcaacatagtgagatcctgtctcaaaaaaaaaaagtacaatgaagctaggtgtggtggcagggatgtgtagtctcagctacttaggaggctgaggtgggaagatcatttaagcctaggagttagaggctgccatgggctataattgtgcctgtgagtagtcactgcagtccagcctgggcaaacatagtgagacccccatctcttaaaaaaacaaaaaaagtaaaataaggtgaaattaatatattttacttaatatattcaaatattcaaagtattatttgaatatgtaaatgtaaaaattcactaatgaggtcttttacattttctgggtactaagttttcaaaatccagtgtgtagtttactcttagagcacatctgaatgtggctcgtggctgccatattggatggaacagctctagggcacagattgtgctactaatcaagtcccaccttgaggtgctgggactggccttttgaatgcagtgttagtcagcccttggccaggcagggtcgggggagctctcaggcttgatggagagctgtatagttgaggaacatggtcgagatgagggtgcaggtgtgagccgttagttgtcaacacagcagttagagaggatctgagtggccactgacaacatctgctacagcgggatggggaagaatggcctggcggaagagtcaagggtgggatgatggagctctagagttgacatgtatagtttcctggtgcttgagcttagtacagaggcagagcccagagaatcttgagtcttgaacatctctctcaaatattaggtgttcaacttggcttttggcagacactgaagattggaatggtctctaagatcctgaagactaaatagtctatttgaaagaaaagctgtgcttccaggaaaaagccagacctaattaagtgtcttcagagaagggcatgggctctgttacaatgcatgatgaaataccgtgtcataatacatggataagaccttcacctggaattttagagatgaagcaagatgaagtaaactaatgtttactttgaccttggtgagatcattttatagctccattaacccagttttgaggatagtttcttctttgaagcagaatgcattctgataatgaatttatctcataatgagttatttagtattattcatctgaatgctactgcgggtatgttaacaacagtagttttggttttggcagaaatagtgttcagattgttctttaagatatttgccagtggatttaccagttttaactgccacgtgaggccacatcttgcttatgaaagtaggtgctatctaatcttttttttttttttttttttgagatggagtcttgctctgtcacccagactggagtgcagtggcgtgatctcggctcactacaacctctgcctcccgggttcacgccattctcccgcctcagtctcccgagtagctgggactacaggcgcctgccaccacacccggctaattttttgtatttttcgtagagacagggtttcactgtgttagccaggatggtctcaatctcctgaccttgtgatccacctgcctcggcctctcaaagtgctgggattacaggcgtgagccactgtgcccagctggtgctatctaatcttaagaaaggatttttttccagccactgcaaacaggatttgtttccctgtttgcagtggctggaaggcatgcatccagtttgtctaaaagcctaccatttcccccgctttttgtgtaagttattgtgtgctgatgataatatatgcaagactgtgctagccatgttagacattctcatttaatcctcatagcagcattatgacctagataagtactattattatccccagtgtacaaatgaagaaactttctatatatctaggaaatgtcagagccaagatttgaatccaggtcagaatctgagtctagaccagaactcttattgactatattattctctaatggtaattcccaagtggttctggtataattttaagaaagaaggtgacagttacatatttggatttagttttcatgtaaaaccttacattttttggcactttactgtttataaaaactcatttgatccttttaataactccctaggaaatcagggaggtgtcatcacctacattttgtagatggaaacgggggcccagagaaatgattagctcaatgactcacagctgagagttgacccaagtcttgtgactctgagggtcaatgccacttcctatgtgccaagccattttcaggcatttcttttctatgtgtggaaaatacaggaaatcattattcctgtgggagagaaccagtggcaatatgttactggggagtcattttgcacacgctgacctctctcattttggctgtgattggctagcctttataaacagaattgattaaagttctttctcagaacctttgttgctaggaaataccttacaaagaattttggactgggcgtgtagccagtttgttacatgcttaacaaaaacaacaaacgttaaaattctgtgtagaggtccaaattagcagacttcttcaaacgttttccttcatttagaaaataaactttatgttgtggctttacacaaatggtctgagtgttgacctgattcttcatttttgaccttccatgaatgtctcccaggaggaaacaggaacagagcctttatggggctcattccaaaccagttcagacttgtcgtgggaatggttcacattggtagttgttctgttatagttgtgtttgcttgtacgagttctacttcttcttttttttttttttgttgagacagtgtttcgctctttttgcccaggctggagtgcaacggtacaaacttggctcactgcaacctcggctcactgcaacctccgcctcccgggttcaagcgattctcctgcctcagccatccgagtagctgggattacgggcatgcaccaccatgcccagctaattttgtatttttagtagagatggggtttctccatgttggtcaggctggtctcgaactcccaacctcaagtgatctgcccgcctcagcctcccaaagtgttgggattacaggcatgagccaccgtgcccggcccgagttctacttctagttactgggtaaccgggaggcatctatgctttttacagctttaggccacattattacaagttcacatgtgtgcaagctctgtggaacaatatcatatctttgagtagatattagtgtttatctgggaattgccactgtttttcttatctagaaataaaaaatttcagaaagctcttgaccaatctgtggttaaatcttataaccattacagcctcagcctgtgacctttgaaaagttaaagtccttgggactcaactttgtcataaaattggggataatactcttgtaactcacagttatgcttgaaggaatatatgagagatagtcttgatctttaatagggacacagtaataatttcccgttcacagttccttcttgttcttggtcttttacttggtaaaggttttattttataaactatatctttttgtatcttttacctccacttttatacagagattacattttttaaattaattaaataattaattaattttttctgaggagtttcgctcttgttgcccaggctggagtgcaatggcaggatctaggctcacagcaacctccacctcctgggttcaagcaattctacctcagcctcctgagtagctgggactacaggtgtgtgccaccatgccccgctaatttttttgtgtgtgtttttagtagagacgggatttcgccattttggccagtctggtcgcaaactcctgacctcaggtgatccacctgccttgacctcccaaagtgctaggattacaggcatgagccatggtgcccgactctttaaaaaatagttgtacaaatttttcagttcatttaaaaatgttgctataagaacattttgtttcttatttgagtcgttatcatcttagaaagttctaagaggtggtacctgttggttgccttttgctggtttttttcctccatttttttccttctagctttaacagtgactactgggaagttctctctctgtctctgtctgtctctctgtatctctctatctcttttctttttctcctttcttttctctcttttcagtggggtcttgctctgttgcctaggctggagtacagtggtgtgatcttggctcactgccacctcaaactctggggctcaagtaatactcccacctctgcctcctgagtagctgggattccaggctgtaccaccgtgcctggcttagtcacttttcttaatgtttttaagcattaagatacgctttcttcacaaacagttcaatgaatgagaaatatccttgattactgatattgctttttcatatttatcagccaaaccacttctgtaccagaaaatgtgaaataagaaatcatgctgaagacatcagcaaatataaaaagaatattttattatgttctggccactgttaaatttgaagctccttgagaccaagactctcgttttgtgtttttaaaagttctgtgtggtctgtgacatttctgaccctgctctatccttttgaatgatcagaaaggctttcttcaaatttgcttggcccctcgacaattcttgttttgcttttctggagatcgttttgatgcttttggtttctcttacataccaaggggctgtgtctgtagatatgatttcccttttgtaattatatttatggtatattgcctagaactacatttattgatcagacacgttcgctagaacctaactggaagaaatatcctgaaaaaatgttctaaagcccatcaagtatttgcaatttattttgctttcctttttttgtagcatgttctgtactattcaagacagtgcttaatggtgtcccgtaatcttggttcagtgggatatgatcctaatgaaaaagtaagtatttaaaagatattctcaacaactaaattaaacttatcatggttttactttctcgtctccacactgtgttcagtggacagatgagattttgttaaggctgtgtggtcattgatcactctagcattgtgtgtttctataggtgctcagtctttaggtattctgtttttcattgtgggccacagtctgaatctttttaattttgtatttatatctttagcaaaaattgaatgcatttacaatgtgtttcctttgtttccagcagaataactaagaaaacatttgttcttaaagactgggcatttgagagatttaattaaactattgagtttttctttcatttacttaatacttttttttttttttgagatggagtcatgctctatcacccaggctggagtgcagtggtgtgatctaggctcactgcaacctacgcctctggggttcaaacaattctcccacctcagcctcctgagtagctgggattacaggcgcccaccactgcacctggctaacatttatatttttagtagagatggggtttcaccatgttggccaggatggtctcgaactcctgacctcaggtgatccacctgcctcagcctcccaaagtgctgggatttcaggcatgagccaccgtgcacctggcctcatttacttaatatttatattatttatttatttatttgtgagatggagtcttgctcttttgcccaggctggagtacagtggtgtgatcttagctcactgcaacctccgcctcccggcttcaagagattctcctgtctcagcctcctgagtagctgggattacaggtgcgccccaccacgcccgtctaatttttgtgtttgtagtagagacagggtttcaccatgttggccaggctggtctcaaactcctgacctcaggtcatccgcctgcctcgagctcccaaagtgctgggattacaggcgtgagccactgtgcccggcctatatgattcatttagattgaaggtaattttgtgtattataaatttcaggacaaggggtttctaattaaaatgctattacaataatgtttgagccttgtagggactagaagaagtgattggaaataaaatatggtttcatgccttcatggcaatgaaggcatcgaagtgggcgggagttttggttaagaagggattgttcaaggtgagtgtcatcaaaatacaactgacaggaatgattatttgagaatgacatgtctgaggtatcttctgaatcatgtgctgaagtgcgcaatactgctttccagattcttttgaatctggaggcctggaggaagaaagagtctacatatcttcagttcagtagaaatacaatgtgaaacacagttgcagggtgatatggtttggctctgtccccatccaaatctcatctcgacctgtaatccccatgtgttgagggagggaggtgattggatcatgggggcagtttcttccatgtttttctcatgacagtgagttggttctcacaggatcttaagatcttacaagtgtttggaagttcctcctttgcactactctcccctgctgccttgtgaagaagggtcctgctttccttctgccatgattgtaagtttcctgaagtctccccagccatgcggaactgggagtcaattaaacctttgtttataaattacctagtcttgggtagtatcttcatagcaatgtaaaaaccaattaatacacagggcaaatgtgattttcaattttcctttttattttttatttttgagatggagtcttgctctgtcacccaggctgtagtgcagtggtgtgatcttggctcactgcaacctccacctcccaggttcaagcaattctcttgcctcagcctcccgagtagctgggattacaggtgtacgtcaccatgcccggctaatttttgtatttttagtagagacagggtttcaccatgttgggcaggctggtctcgaactcctgacctcaaatgtcttcctgcctcagcctcccaaagtgttgggattacaggcatgagccactgcacttggccaattttcaattttctaatagccacattaaaaaaaagtaaacaggcaaaattaataatatctcaatatctaaaatgttatttaagtacataatcagtataaaaagtattaacaagacaccttagattcttttttttgggccctaagtcttctaaatccagtgtatattttatacctctggcatatctcagtttgattagccacatttgaagagcccaataacctcatgtggccagtggctactatattggatagtgcaggtctattgaattagttatgataaactccctgttatgaaagctgtagtttaatttaaaatcttcatcataggtgatatgctttggggttcatgtatccatgtgttgcattccaatctcgaagtaatcagctatcctaagtggctacactcttaagagtaattaactaacatttgttgaagaggacacattatagaggggtggaatactacaaacggttcagccatctttctccttatacactggtagccttcctcattagcgtaataactgttagaagtgggctatcagccaggtgtgatggcccacgcctgtaatcccagcactttgggagtttgaggccagtggattgcttgaggtcaggaacttgagaccagcctggcgaaaccctgtctctaccaaaaaaaaaaaaaaaaaaaaaacaccccacaaaaattagctgggtgtggtggcgtgcaccagtagttccagctacacaggaagctaagttgggaggatcacttgagcccaggaggtcagggcttcagtgagccatgattgcaccactgtactccagactgctaggctaaagggcaagatcctgtctcaaaaaaaaaaaaaaaaaaaaaaaaaaaaaaaaagaaaagaaaaggaaaaaaagaaacgggctgtcattgaggaagtttgtggtattcgtcaatatatgttattggctattgctttagggaaattctgtgcctttgtactattagaatgtaataatgtagttggcctttaattctttacctttaaggataatactcgggcccgatccctaaatgaatagttctgtgttcagccacttgtctggtggattcttgatggcttagtctgacagtatggttagccaaagcagaatattgtttttttttgcctatggtgagcctttcttgcagtcttttggagccttacaaagtacaggaagttaagattccactgaacttatcaagcaggttttatgattctttttatgtcttaataaatgtttgtatgtgtggacagagtttggtctggtacttgctttcattataacctcatagtgaagttacagaaatagctaactgacctcccacattggtgaccactggtaattactaaaaataaataaatgtatgtaactgtctgggtttagcacatttatttatttatttttgagacagagtctcgctctgtcacccaggctggagtgcagtggcatgatcttggctcactgcaacctccaccttccgagttcaagcgattctcctgcctcagcctcccgagtagctgggattacaggcacacaccaccacatccggctaatttttttttgtatttttagtagagatggagtttcaccatgttggccaggctggtctcgaactcctgacctcaggtgatccacctgtctccacctcccaaagtgctggcattgtaggcatgagcgaccgtgcctggcccaggtttagcacatttaaagagatacgagggataaaggtgtagaagtggaatctccttggaattcacttagcatgtttcgtcataaatcctgaaatcaattctgctccctgctatctttgccatctcctttgctgtgcccttgcctaaggtgactgtggagaaactgtgtttccctcagtgagtgatgaatattctttggcacctattcatagtacaggtacatgttcagactaagttggtcgcttcacccttcacttgagggctgcacttaatcagacctttctccttcccggattcctgctgtccttgtaaccattcattaaatactgacctggtttgtttatacctactgtcccaagtgcaagtagacttggtctttggtgtaatacatatttgttaaataaattgattctcgtttgaatctgttattaactcatttcttattccacattttatcagtgacttacatcatgtgcaaattatccgggtgaaatttaatcattactgaaaacgttattttttttaacttgagttttaacaagctaacttgttgtcttatgtatgttcatgagaataaggaagatttaacttatggtagcttgcttggatcaagaccattaagtttcagttggccttaagttagtgtgagccagtacagtactgtgttgttcctgtcacactgatgtgagctggctgggctcagtggcttacgcctacagtccctgcgctctgggaggccgagacacgggattccttgagaccgagagttccatatcaacctgggtaacagagcaaaaccccgtctcttaagaaaaaaaaaagtgatcttaggtgttattaataacatagtgtttagagcttgcattgttatactctgattacattatatcatgatatttctgacatgaatacctggatgtgaactctctgactttgccactagtgaactttgtaagtgatttaaggcaagtgatttggcctcatcaagccttagttttcttatttgtaaaacggagatattatcagaactgacttcgtgggattattatgctaaatattgtcatcatagccattacctgatagatgagataatgcacagaagagattcatcacagtgcctgctgtatacaaaacgtgtcctaagtgtcggctgcttaatgtccttaactgaattttgcacatttggaaagcaagactcaaagcccatggatagtgagtagctgggtgtaaactcatgcctgtccttttccagagctggtggacttacccattgtgctgtatcctttctcagaagagttgggcaagtgacccagtgtccagagttctgccgtcattccaacaagtacccagtgcagggccagctcagtcctcttggtctctgaatggagtgtggtgctagctatggagttagagcctgggagagagcatctaaacctagggaagggaaaggaagaaggagggatagagagagaatgggttaagagaaaaataacaacagcaaaaaagatccttaggaaatcttttacttcagatgacattattagtacagttatagagcagctactgccaaagttcttcattatctcttctggtacctgaattctcatctatcttcaaggatccaggatcctaatttatagttgttttttcctgagtgtcttcagggtgccttatgagtgactctccacatataggatcaagtcccagttccttgaatggcatatgagtccttccatcatctggacttttttttatcctagctttatttgctacaactctcctaagcataccatgcgcttcagtcatattgagaattccttgtagttgcttagtgctaccctcttcttccagtgtcacggcctttacacatgctgttcatgtgctcccttctctgtgtgtagcatcctgcacaaagccttattagagcatttaacacaatttgttgtgtttgtgccatattttactttgaagttgccaaatgcacttgatatttacctgtaattgttgatgcagaggggcagttttaaggttgggtttaattgatttgtatgcatattcttttataggcatagcctacctggaagaatatataggagaccagtaacagtggttgccttttgggcagggacttgggtgtctcttcagtgtatccccttttgtactttaaaaattctgaattatatgcatctatgatttatttagaagaaaattttatgtatggaagattaattgatatgattagttttattgggttttatgcgctaattggtaatacattaatagcccttaacagagaagatgtgtcaggtgcaggtatttgttttgttatagcttttccccagttagacagataggggcacactcctaaattcataacagtctggcatgtagcccaaaggggtgaagaacagtagccatagctaatgctgaatgagtatatattacatgctagacattattctaaacactttaagagtgttaattcaaatcattctcacaacctcttgtggcaggtgctgtttttacccttattttacataccaggaaatgagaggcaagaagggtgacttgttcatagcaggacacacaggaggagaacatagaatgttgggagttcagcctgggtggcttggctgcagactgactcgtaatgaccattctgctgcctgaacagaaattagaatggggattcttgcttaattcttccattgttatcatgatttgttgtattcgctgtaacaattgcttaatatgtaatttctaggagtggtgtttgtggtgattatcagatgtggtctgtttcacagttaatattaacatcatattttaaaacccatttaagaaagtgtaaacattgtgttctcaggatatgcttactgtttaagaggggtttaccatgaccatttaaatacagaaaagtagatgattatgcattctcagacctgagatgtgagcaaggctctgagtggcttcgagttttatcacattagaagtttacctatttttaaggcaggggcttggctcgggttggaggagttaagacatatatgatgtaaaggttaaaccaagacctagcaagcttttttcacttctgagattctggactttttcctgtatgttaaaatactgctctaggccgggtgtggtggctcaggcttgtaatcccagcactttgggaggccgaggcaggcggatcacctgaagtcaggagttcgaggccggcctgaccaacatggggaaaccccatctctactaaaaatacaaagaaattagccgggcttggtggtgcgcacctgtaatcccagctattaggaggctgaggcaggagaatatgttgaacctgggagacggaggttactgtgagctgagatcgtaccactgcactccagcctgggcgacagagtgagactccatctcaaaaaacaaacaaacaaacaaactgctctaggttatataagagtactttttaaaaggtcatttataactctaactcttcttttagaaatataactgacactttttttctgtagttccgttgaacttaaaaataattcacaaatacagaaattaccgtgtgctaatgtgtattacatccaaattacttggaatggtgtgttttgaaaaacgattagcttgtacaattttagagtaggaagaaaaccttactaaatagctttccatttgagtgctaccagtttatgtggaaatcaaggcctacagagattgatttacttaaagttaaataggtcattagtggcaaagctggacttgggtttaggtctctagataaacacaggatacacaacttctctactgtttggtctcagctgcttcaaaatttggtggttattcaaacttaacattggattcaaatggtgtaatctgcttagtctgggcatttttggatatatgcacaattaggtacctattctgagttactgaaaatatgccctgtcccaacagagatagcagataaattatacttacttagtatcagacttccctttgaaaacaactcatgacacttagaatttcccagaatttagaaaataaattgtcaagtaattttggccaaagtgttttttttgtttatttatttatttattttttgagacggaatcttgctctgtcacccaggctggagtgcagtggcacgattttagctcactgcaacctccgcctcccaggttcaagtgattcctgcctcagcctcccaagtagctgggattacttgggattaccagcacttgggattacgggcatgcaccatcacgccggctaatttttgtatttaaattatttatttatttatttagagatggagactcgctttgtcaccagacaggagtgcagtggcgtgatctcagctcactgcagtctccgcctcccgggttcaagccattctcctgcctcagcctcccgagtagctgagattagaggcgcgtaccactagacccagctccttttttttttttttttttttttttttgtatttttagtagagacagggtttcaccatattggtcaggatggtctcgatctcctgacctcgtgatccacccaccttggcctcccaaagtgctggattacaggcgtgagccaccgtgcccagcctttttgtatttttagtagagatggggttttaccgtgttggtcaggctggtctcgagctcctgacctcgtgatccacctgccttggcctcccaaagtgctgggattacaggcgtgagccactgcacccgggcttgaccaaagtcttttagtgtctgaaatatcatttgaagattttcttttggctacagaatatgtagatacccccattgtgaatacattaacctactatgctttaacaaagtaattatagaacccgatcatatcagatgaattttgtagttccctggttgtaaacggttatactatttaataacctattttaatattaccctaagtatttatagtacatttaatattactgtaagtaatatagtatttaatgttactctaggaagtaatgtttattagggttatattcagtgttgatgttggaaaaacttggtgttttttggtcttaaaccatcggtttaaaagtaacaatttctaatgaatgtgttttttctctcttcagacttttgataaaattcttgttgctaatagaggagaaattgcatgtcgggtgagtagaattttcgtcttattttccattttactctgaaattatttattaaacccctttaagtgtgaatcactattaatagacattaatatattttaaaataggttattagaacttgcaagaagatgggcattaagacagttgccatccacagtgatgttgatgctagttctgtaagtatatttttgctttgtttaaatcaggacttaattttgggtcaagcagaaaaagtgagacatacaggctttttttcttggcctgcacaagatacattcaagtttaaaaactgtttacttgttcactgttgtgttaagcaaaacgacagtatcacagtatcttctatatgtgccgtaagtattttcttttcatagctttaaaaacttagacagaaaaattgccaggctgattgctggtcaccaagtagatttaagcaaagcatgagaaaatttgagtcaaagattaatgaaatgtttacacagtgctcccttatgagagcactttcccccagcatagcttcagtatcactaagggaatgctacaattgtttaacctttcctaaatgcttcaacgtgttcagctgaaagtttgacaaaaatgaaaggtaggctaatgctaattggatacaaacaaaagaaggtttagcataaagcagatatacttttatttggtacttttaacacagcaggccttttttttttttttttttgggacagagtcttgctttgttgtccaggctggagtgcagtggtgtgatctcacctcactacaacctctgcctcctgggttcaagcgattctcccgcctcagcctccggagtagctgggattacaagcacctgccatcatgcctggctgatttttgtatttttgtagagacagggtttcaccaagttggccaggctggtgttgaactcctgaccttaggtgatctgcctgccccggcctcccaaagtgctgggattacaggcttgagccaccacacccggcccacagcagggattttttttagtagtaatgttatgaatgagtagaaaaaaatcccatggggaaagaatgtaaattattaaatctttatggcatgaaatataagtagttgaatactaatgcaagcattgtttctcattgtctcatactacttttgataatgggaccctttggtagggtccatcagttaatgacagggatatgttctgagaaatgcatcgttaggtgaattcaatattgtgtgaccatcacagaatgtacttacacaaaccttgatgatacagcctagtacacacctatatagtatagcctattcctcctgtgctacaaacctgtgcagcacgtgactgtactaaatactgtaggcaattgtaacacaatggtaagtatttgtgtatataagtgtatctaaacacagaaaaggtacagtaaaaatatagtataaaagataaaaaatggtacacttgtatagggcacttactgtgaatggagcttgcaggactggaagctggtctggatgagtcagggagtgatcaaaggcctaggacattaccgtcactactatagacttcataaacactgtatacttaggctacacgacatttatagaaaaatagttttctttcttcaataataaattaaccttagcataccataacttttttaaattataaacttttaaattttgtctttactctttgactctttcttttttttttttttttgagacagagtcttgctctgttggccaagctagagtgcagtggtgcagtcttggctcactgcaacctctgtctcccgggttcaagccattctcctgcctcatcctctccagtagctgggattacaggcatgtgtcaccacgctcggctaatttttgtatttttagtagagacggggtttcaccatgttggccaggctggtcttgaactcctgacctcaggtaatccacctgctttggcctcccaacgtgctgggattacaagcgtgagccaccacgcccggtttactctttgactctttcataataaaacagcataaaatgcaaacactgtataactgtacaaaaatgttttctttatatccttattttataagcttttttctgtttttaaagttttttatttttcatttatttttgactttttgaacttttttggtaaaaacgaagactcaaatgcacacattagcctagacctgcagaggatcaggctcatcaagacatcagtaggcatgggatcacatcaagttagaaagcttctacacagccaaggaaacaacaaaatgaagagacaacccacagaatgggagaagatatttgcaaactacccatctgatgagggattagtaactagaatgtataaggagctcaaacaactctataggaaaaaaatctagtaatttgattaaaaaatgggcaaaatggccaggtgtggtggttcacacctgtaatcccagcactttgggaggccaagcgggcagatcacttgaggtcatgagtttgagacctagaataaataaatggatgtttaaccagcctggctaagatggtgaaaccctgtctctactaaaaatacaaaaattagccgcgtgtggtggcacacatctgtagtcccagctacttggagactggggcaagaagcttgaacctgggaggtggaggttgctgtgagccaagatcgtgccactgcgctgtagcgtgggcgaccaggcgagactatgtccaaaggaaaataaaaaggggcaaaagatctgaatagtcatttctcaaaagaagacatacaaatcacaaacaggtatatgtaaaggtgctcgacattactgatcattacggaaatgcaaatcaaaagtacaatgagataaaatcttaccccggttaaaacggcttttatccaaaagacataacgagtactggcgaggatgtagagaaagaaccctcatatgctgttggtgggaatgtaaattaatacaaccactataaagaacagtatggaggtttctcaaaaaactaaaactatcatatgatccggctgctagatgtacatctgcttctaggtgtacacctagcaccagggaaatcagtatatggaggagatatctgcactcccatgtttattgtagcatttttcacaatagccaagatttggaggcaacttaagtatccatcaacagatgaatggataaagaaaatgtacatatgtacggtaccattcagccatagaaaagaatgagatcttgtcatttgcaatagcatggatggaactggtggaggacatgttaagtgaaataagccaggcacagaaagacaagttttgcatgtactcactcatttgtgggagctaaaaatgaaaacaattggactcatagagagagagtagaaggatggttaccagaggcttggcagggtgtatggagcgggaggggtggggatgattaatgagtacaagaatatagttagatggaataaataagatcttgtatttgatagcacaacagggtgactacagtctgcagtaatttgtggtacattttagaataatttagggaatagaattgggatgcttgtaacacaaataaatgaatgatttagatgatggctaccccatttatcctgatgtgattattatacattgtatgcttgtatcaaaatatttcatgtactccataaacatatacacctcctgtatacccacaaaaataaaaaaagacatcactaggcaaataggaatttttcagctccattattggagctgaaatgtagatgcagtacattaccgaccaagctgtcatatggcgcatgattgaattctgatctacaggtagacttttcagactttgcaaaagtggtttcaaaagaattgttgttaggtttttctcatttgtaccttccctgaagcagatgtggtagttttacattttagagacttttcaccacttctggctgaaagcagtagggaatataccagagattatgatacataatttataataaaatttaccagaccccacaatggaagcaattgcacactcagtcaaaactttctcttactatgacctactttaggtcaatttctagaaagatactataagtaaaagcaggataatgatggtgggaatgtcaaaagtttcatttaaacctcaacagtagggtcaaatctgctatgtggtttctgtttcagtctcaaggaggctgaaaaggtgaattcctgtaacagcatcttttgcatcctcagcacgtgatcacagaggttactatcatagctaatcagctttataatatcagtaatatgaaaaagccatgctattcagatgtattaatttttgcatgtttgttttcaagaggtgagcattttaaatgtaacttggagtaaaaaactttataggctttgtatgttaatttcacatgtggaaatgtaaatactattccagtaggaaaatactgcaacaattgattgcaaaagctattcattgtctattataaacaactaatttttaaggtaattatgcaaggaaaaagatgaatggatactgcacatatcaactaataagtcacacaaggaaggaaagccagctaacttgcaaacaattaatgtttgatagaaaaatgttggcttttagagatgattatgcagtttacctctgttggtcccttccctccaacatgttcttcaaaattgtcttcagtattcttggtccttcgctcttccatgtgaattttaggatgagctggccaattaccccccttccccaatttttagataccatgaacaagatttttataagtataacttttgcatgtctttttgtgaacataattttgattttttttgggtaaatatctaggagtggagtagctgggtcttagggtagataaggagttggcaacctttttttgtttgaaagtaaatacatttttgtctggatagcaaatatattttagattttgcaggcccctgtggtcgctgttacatatgcttctttttgttttgttttgttttgttttaacaacactttaaaaatgtgaaaactattgttagcttgagagctgtgcaaaaacagcccttggatcagatttggccagtgggtagacagtattttgctgatgcctagaataaatacatgcatgtttaaatttataagaagctgctaaatagttctccttcatggttgtatcatattttactccctccagaaatgtctaggtcagggtgcttttgtgtccttgccaacacttggtgttttcagtccatttgattttgtgttttatttttaagtggttgtgaagcagtatgtcattgtgtttttaattttagattttcctgatgaatactgatgttgagtacttttttgtgttattggtcattcatttatatttttttctgaagcatttcttcaaacataatgaaaaaaattagaaaagtagtaccagtatattggtatcagtttactgttatataccagtataacggtatctgtatacccttcacctagattcagcaattgttaacattttggcttgtttgctttatatttgtatccatatgtacattgtgtgtgtgcattttttttttttttggctaaacaatttgaaaataagttacaggacatggatgaagctggaaaccatcattctcagcaaactatcacagggacagaaaacaaaacactgcacgttctcactcataggtgggaattgaacaatgaagacacttggacacagggtagggaacatcacacactgtgtcctgttgtggggttgggggatgggggagggatagcattaggggaaatacctaatgtaaatgacgagttgatgggtgcagcaaaacaacatgagacatgtatacctatgtaacaaacctgcacgttgtgcacatgtaccctagaacttaaagtatatatatatatgtaaaaaaagcagcattaaaaagaatcccctggacaggaaaaagaaaaaaaaagaggccgggcgtagtggctcacgcctgtaatcccagcactttgggaggctgaggcgggcagatcatgagggcaggagatcgagaccatcctggctaacacggtgaaaccctgtctctactaaaaatacaaaaaattagccaggcgtggtggcaggctcctgtggtcccagctacttgggaggctgaggcaggagaatggtgtgaacccgggaggcggagcttgcagtgagctgagatcgtgccactgcagtccagcctgggcgacagagcaagactccatctcaaaaaaaaagaaaaaaaaaaaaaaagaaaataagttacagacattgtggcattttacccgtaaatactattcatctcgcagtaataagtatggttttctacatatctataataccttatgaaacctaagaaaataactcattattctataatatcatgtaatatgcctaccacattcaggtttttccagttgaccccagttgtcctttttaatatttttctttgatccacagttcaatcaaggttcatgagttacatttgtttattatacctctttagtctcttaatctaaaatagtgcccctattctccctctttttttgtttgatttttattatgttggcttttagatattttggctttgtatggaatctattttctcatgaatagattcagattaaatatttgacaagactacttcataagtgatgttctttctttttttcttttttttgtgacagagtctctctcagttgcccgggctggagtgcagtggtgagattataactcactgcagcctgacttcctgggcacaagcgatcctcccaccttagtttcccaagtagttgtgactacaggtgcatgccaccacgcctggctgatttttgtattttttgtaaagatggggtttcaccatctttcccaggctggtcttgaactcctgggctcaagagatcctcttgccttggcctcccaaagtgctaggattacaggcgtgagccaccgtaccccagccagtaatgttattttttttaatagtaatatcataacaagaggttcttaatgttgaattgttctgttgttatgctaagtatgatcatttggtttcatcaggtcttcccattataatggtacattttctttttttttattaaataatttttggggtgagtttttgaatccttgtgaatattttgtccctcaaccacctctcatctaatgtttttgcatcgataatgaaaattgcctgagcctgattactttggttacatttgtcttgtttgctgtctgtggagtaagctgttgattttctgctcctttttgaatctgcctgtttttatgtattatcttttttcttatgtatttgaggcctttagtatatttatttttagcatatttaatttaaagaatctatcatattattgtattatttcaagtttgtgggtgtttatttctattcctgactcttcctcataacatattgtttcctcgcatgtttaaattttggtgtgtgattctatgtttggtgcttttgttgttgaatttcaagatggtttgggttatggatttggccaggtaggataggtggtatatttgtttccatcacaccctccagggtatcactcatctgggactaatttttatattaaatttttggcataaagattgtcaaattttgaagataatgggaagaacaaaatgagattgcacacacacagatacacacctgttgaataggctcatggtttctaatatctagagacattttcgtttactttgaaccacagagatacgagcatagggtttatcctctctatttcgtaggttgattcctcccccacaacctttcactgagaatgtaatctttgagcctcctggctttagacagaagggtttccttcaaacctccaactcacacgggatctgtttcctttctctgatcgttaaaacccaatcttctagattattgagattcccaccttcactctccaagactggctcttgtggatgcagactgattttcatttttatattatttatttatttatttatttgagccggagttttgctcttgttgtccaggctggaatgcaatggcgcaatctcagctcactgcaacctccatctcctgggttcaagcgattctcctgcctcagcctcccgagtagctgggcttacaggcatgcatcaccaaactactgaattttcagtagagacagggtttcaccatgttggccaggctggtctcgaactcctgacctcaagtgatccacccgcctcagcctcccaaagtgctgggattacaggtttgagccaccatgcccagccagattttcagattactttttttttttttttttttgagacagagccttactctgttgcccaggctggagtgcagtggtgtgatcatagcaaactacagccatgaactcctgggctcaagtgattgtcctgcttcagcctcctgagtagctgggactacatgcacatgccgttgtgccctgcttcctttttctttttcatcccttgtagtttttttgtgagccaagctcttcatttgaaggatgtttgttatatttaatctaggtctttagatgtttctaaggaggatttgcaggttatttagttggcttattgttggtttgtcttaaaacaatatgacatcctattctttgttgaggaaattcccttaatttctttgagaaataaagactgatctagagcagtcttaaagtcaggctttccctaggaaaacaattcatttataatgatgagattaatgtgcctgaatccaggggatgaggctatagggaagcagtataaaatactccaatgggaattggtcagggcaggagaaagcaaaatgggagttaagcctcttattaagtcatgaatttttttttatgtttcattttccaggccctaggaaagcacgcttattattctctgggaagatttgtggagaatagtttatgaagagaagacaattctagtgcaagaatgtaaccagctgggattttgattgatattgcattgtgtctgtagatcattttggagtgtatagctatctcaacgtttttaagtcttcctatccatgaacatgtgatattcttccatatttaggtcacttggatttctttcagcaatgttttgtagtttcatactactataagtgtaattagttttttaatttcaattttttaaattagttgcaagtctgtagaaatacaaatgattttcatataatgattttgattcctgtaaacttgctgaactcttttattagttctaatagttttttagtggatttcttaggttttttttttttttttttttttttaaagatggagtttctgtcacccaggctggagtgtcgtggcatgatcttggcccactgcaacctccacctcccgggggtcaagtgattctcctgcctcagcctcctgcgtagctggggttacaggcatgcgccaccacgcacagctaatttttttgtacttttagtagagatggggtttcaccatgttggccaggctggtctcgaactcctgacctcaagtgatcctcccgctgtggcctcccaaagtgctgggattacaggtgtgagccactgcgtctgggccttaggattcttttttttttttttttctctcttgagaccgagtctcattctgttgcccaggctggagtgcaatggtgcgatcttggctcactgtaacctccgcctcccaggttcaagcaattctcctgcttcagcctccggaatagctgggactacaggcatctgccaccacacccggctaattttttgtatttttagtagaggtggagtttcaccacgttgaccaggctgggctcaaactcctgaccttgtgatctgcccacctcagcctcccaaagtgctgggattacaggcatgagctactgtgcccggccaggattctttatataagatcatgtcatgtgtgaatagagatagttttacttctttccatctggatgctttttatttcatattcttgcctgatttctctggctttaacttccagaacaatgttgaagaggtgagaggaggcatccttgtcttgttcttcatcttagggggaaagcattcagcatttcacccttaaatttgatttaggctctggtattttcatagactttcattatcaggtggaagaagttaattgctattcctagtttactgagggatttttatcaagaacaggtgttgcattttttcaaatgctttttctgtgtttactgagatgatcatgtggtttttgtcctttatttatatggtgtattgttacattaattgatttttttgggtgttaaaccagccttgaattcctgagattaatcccacttggtcatgctgtgtaatcctttgtatatattgctggattcagtttgttagtattttattaattttgtgttcatatttacaagagatattgtctgcagttttcttatgatgtctttgcttggttttggtgttagtgtgatcctggcctcatgaattggaaacctttctctcatcttctagtttttttggaagaattggtattaacttttctttaaatgtctggtagaaatcaccagtgaagccatctgaatctgggcttctctttggttagtttttgattgttaaatctacctttttacttattgtaggttttttcagatattctgtttctttaatcagtgtctgtagtttatgtctttctacaaatgtgtccatttcatcaaagtttctagcttattggtatagtattttcttatttttattttataaggtcagtagtaatgtctcctctttcattcctaaatttagacatttgagccttcccttttttcttggtcactggcctagtctgttcaggcttgttatggattgtcatagtctgggtggcttataaacaacaggaatttatttctcatagttctggaggctgataagtcaagattgaggcactgttagatgttgtccctggtgagggctcctttcttagtttcttagtggagccttcttgctgtgtcctcacatggtggaaggagcaagggaaggatctcattcatgaggtctctgccacaagtgttctgaaatagcattccagaagtacaaggtgatacagttagtcaagagctataaattggtggataggaaaggcaaaaataagaagattgtattgagtttctagttatacaatgaactgaataactccttttcttttgagacaaattctcactctgtcgtccaggctggagtgcaatggcaccatcttggttcattgcaacctccgcctcacaggttcaagcattctcatgcctcagcctcccgagtagctaggattacaggtgcctgccaccatgcctggctaggatttgtattttagtagagttggggtttcaccatattggccaggctggtctcaaactactgacctcaggtgatccaccctcctcggcttcccaaagtgctgggattacaggcgtgagccactgcacctggccctgaataactctttagaaacagaaaaaatctctggtggttggttaaatagtaaatataaataaatctataaatttcctatatatcaataaggtagaaaatacaacaagaaatgtaacctcgtagaagcaatggaaatgataaaacactgtatgatgtgaatttaaaatgaaatttttaggacttacatgaggacttcttatttttgtatagggaaaccgatttttaaaaatgctcttttctgtacattttctattaaatcctaatataacaacataatggggggggattgacaaagagtaaatatgcaagaatagcctagataattctgaggaaaattgatggggagtagcctaacatattaaaatacattttaatacattgtaagtcagcaagaagacataggtctatggaatacatttgttagattttaggcagtgggatgatgtgggaggatttttgagttgttaaagagggtctcatgaatattatgtggatttagaagacaaggtaattctaggattgcttgcctctaatttactgagatttttaggtatctcagagaagataagaaatataaggaatgagaaatgtttaatggctttagtgactaggagtttctaaatggacacatgggcccatttcattagtttggtgaatagtgagagcaaagaatttgggaatttaagattgttgtacttctccaaatgaatgttttaagtataaagactagtatgtctttccacaaaaatggtaaaatatattgtcacatttatatcaaactgctaaaataagttttgatattttttaaaaaatgagatctcatcaggttaaatgaaaagagttgagaatcttcattcccaaagaggaaaatgattctgtatatcaacagaatcattcaacctttgactgtattctctatctacgttcctaaattgaacctatctatacatattttgttgctttgtctgtgtacagtcatgttggatttaaatgagaaatatctgattttaccacgttgaaacaagaacctaaaattagggaagtattcactgtgactcacatcttacccaggcagcctgctgttgaaaggatgatccctggtgcgcactgtagtctcagcctcaggattctataatgagattgagtggggtttcctgtgagcactctggggtgattgacagtaaggtgagggcagtcatcactttttatgcctacccttgatgatatgtccctgctgtctggggagggaccgaggacgaataggacttggtgatgtctaagtaattagtgtatgttggttccagctgaacaaactggagggtaatgatcaggtaaatggaaatggaacacattaatgcagactaaggtataaaagaccttagggttaaacttttcaacattttatgggattattagaatatctttatttcattttttatatttacatgtctctgtatatacatacacttatttatatttttgtcagtgtatcttcagttttaccttagatgtatatagagatgaaagcaacttaaatgtgaaaacctcaaacgcattttttctcctttacatgatttcagaatattttcaaactttttctgtttggaaaggagttaaggttcttaattaaacattttctttttaatttcacaaaaattgttaatggacttgtttggagctgatgcctatcactgatcctcaaataggagcaaatgactaaagtcaggcttggaaaacttttttggggtgttaactgaaaagtatcaggtgaccttttatttgtgtgtgtgtgtgtgtgtgtgtgtgtacttgagaatgttatatttcagtaacattttcttaaactgccttttcttagtaaaggatattttaagatgatggctgtcctggtccatgtttcacagttggtcttaattagatcagaaatatttccagacatttaggttgcaataggaaatctataggattcttaatttattcttacaaaaggtatttatagttgccattcttcaatattaactttccttatcaacagcaaaaagtcttacggcaaagcctctggagagtgactgcagtactgcatttaatgggaagggaggaattgtttgccttagtatatggttttgaatctgggagtctggtaattaggtaatcaaagggtttaaaaaatggcataatggctttaaaacttgctattgctcacttttcttataaaacttagctttcagaaatctttttagattaagaatacaatgtacctactatgcaaatttaaaacaatagacttttcattaaagaactaaccaggagaagaaagcatttaagatgtgtagacatttcttttccttttctttttttcttttattgtctttggaaaaacttattttgcagaaacagtatactgtatcaattttaagtgttttgattatctttgacttggctaaattattttctctgcatttttgggtaaaatggaataggatgggattcctggtaggtatttgttcacattaatactatatttaattggagatcctgcagaatagtagcaggaggctgaagagaattatttagcattagcaatggctcgtctgggagttgtggactaatcaaggcgctgtagtgttagtggtggggatgatgggaattatgacgattatgacatgtaagcatgtctgtgtacgaattggacaggcaatgagttaatcaagaagtatgttaaatggctcccatgctgattcattattatctaccatagtgcctgtcaggttgtgtatttaaaaaacacaatcattgccaaattcaatatgtatatgagctgaattcagccattgtttgcttttccataaaataacctcagatttccttatatgtataaaaatagaaaattgtgtcaactgtgctgtgatttgtgtttatagtatggtatcttttttttttaacagagtcatttaaacctatgtttgctttgccctttcatatattcgtgtaaatattctctggcttgttttctatgcataaagggtttgggtttgaaagtgaaatttatgtgtctttacttttcaagatgaaaaaataattccagtatttcagagacaaattaatatttaacacatgaactatggacaaatcaaagcatgaatcttttccaccatcaaaatgcttgaatttaaattgggggtgggggtggaaacctcctttgctgtagcggggggtctctttgtgccaggtagacagacccattctgtgcccagcatggttggggttatctgtcaggaaactatctattagaaatgctagaaatgtatgtattttgggggaatggaactaataaattgaattccttttagaaaataaattgaaatgcagcataaatccatgagcaaactggattatatctctaggcaaatttaaagagttattgtacagatgaacaccatttttttttattattgtgagcactgccaaatttaataaaactttctaccaaactgtgactttcatgtattaacttaattaaagcagtgttatgggtaatactcagtgttaacctgtggatggctgttattgaaatccattatcaatggagtcagtattagtggtcagcagcatcagaagtaaaacttgcaaccaagaccctcccatgggtgctgtgagctcagcaggttaaattgtcaaaaaccagtaaagcttcttaaaggactgatagcttaagccacccggagttaaaggtaaactagtcattccagtcaagatggactatgactttatttagcagtcaggcaaaaattatatttgggcaggatttatatcagtatcttcatgtatgacttattcatttgtatgttcatgtaccttgctatttaaattcaataaaaccatccagctttttttaatctgtgggaagtgacttgtggatattttcttttataaaacgttaaggagatgtcttaagactttctgaattttttgttaataacttatactgaagttactttttacttatactaaaattttaaattaagaaaaaagtgaaatattgtattaatatatctttttggttttgtttattttataatttctggtaaacttaaacaacatggttttaaagggaatttatgtatttcagtgtaattagtacctgctgttatgaaaaagcacctaatcatggatttatttttctctaagcagctatttgggaaggatcagaagtcctatcttactgaaaaagcatacatataataaaagatttgagggccgggcgtggtggctcacgcccgtaatcccagcactttgggaggccgaggcaggcggatcatgaggtcaggagatcgagaccatcctggctaacacagtgaaaccccgtctctactaaaaatacaaaaagttagccgggcgtggtggtgggtgcgtgtagtcccagcttctcgggaggctgaggcaggagaatggcgtgaacctgagaagcagagcttgcactgagccgagatcgcgccactgcacttcagcctgggcgacagagctagactccgtctcaaaaaacaaaaaacaaaaaaaaagatttgatatacagtttaccttattctatgttccagtgtttctaaggccatgacttaactcatttttacagcctccctcattcagactccttagtggagggaaaggacatgattattccaaataatgcctctcactcattcagaatctatggtgtactggaaaagcacataattacataaggattgaattactgttactgttttaaattgagaaaattggggcttcaagtataaagccaatcttcgggttgccaaagatcactgggctagtaagtagtggagctgagattcaaattatgtgtaacttctaagttgtactgtttccactgtgcatgttgcttctcatactaagtatgaggaaaagtcccctcccaccacaaaacgaagtgaagtttattactttgaaggcagagtttttattagtgcctgttggaggctgggtactatgataggtactggaactagaagagtgactggaagtgataggattgctgctttagagatgggtatagagaaataaaacataaataattacaaattgtgataagtgttatgagggaaacaagttgttgagagagaatcatggttcccttcagtaatagggtgctcagggaaagtcttgctgaggggtaaaatgtaagctgagaatgatggatgagaaggagtcagccagctaggcagacaagaccgcgtgcgcaaaggctctgagtcaccccagtctgcttctgtcctcagtactctactatagagttcttgctagtgtgaccaccagttttctcatgttaagtccagtggacatttttcagtcctcttctgtttgacttcccagaatcttttaacactattaccctttttcagacactctcatcctctggctttggtgccattttaatctcctagttttctctctacttctgtggccctcctctgtgtcccctctacaggaatcactcaaggtttgattggtgggctcttcttaaaattgttttattttttgtactttctctacccttaccctgaaagatggcattctcttccacttctgtttctgtggttttaatcaaccctagactccaactctgttttctctctctctgtgacgtctctagttgaatgttttaccactacctcaaacccagcattacccaaactgaactttgatccttcgggcttcttgtatctgaatcctcctgcagaagcacaagatgtaggaatttatgttcaccatcattctttctttcatttctcatttccaatttatgagcaagtccttttcataaataattttggaatctagtcacctatcttcacttcgttattgcttctttagcaaggtcttttaaaatcttctagtgaatcttttaatcttttagactgataaaattaatttcatctggggcagtttatctaatgtgaactgtttcagtttctgaagttttgtttgatagcgaatgctttcttactctgttttggaattttagttcataggctcttttttctggtgaaagttaaaaatgtttattgctcttcatgcttcatcttctcccttccctttgcttccttgaccttcctcttcctctctctttcctagtttctctctcaccccggccattgctgcctcccaccttctccctgaccagtagttttgtgggtgcccccccgccggcattttggattcctaatctacatccaggtcttatggtgatagtttggacacatggcagattagtcccagcagcttgttcagattttgaccctgaagctgtggttctgcctccctaggtccacagtctccaggagttgtagtgagctgtagttgcagacaatacttggtggcctcctcttcaggccaagggcagttcctctttggcctggtcttcaccagtggctctggctctcttctcagtcttgtgagaacattctcgccatctgtactttgcatttggcacttcctgcttctgaggaaccagccagtggttagcattgttatgcgtttttctcctgttttgagtttgtgaaatgtttaccatttatttctgcttacctgttttcttagttttcctttctgggttttattgtcattgttgtacatttgaagtagagagagcttttgaaatatgaactcactgtgccatcctttttttgtgctaaatttattgaagtccacaaaaaccagagaaaaatgtcagatctcaaaattgtgtttttgctcaatttcaagcatcaatttatccaagttacccacttgatacctgacttgccctacttagcaagtcgaggcattgttttgctggctctggcactctggctatagccagtcactcaccccacttgggattgcttcctttgctgcttgttcctgctgctgctcagtggcagctgccaagttggagtagcaaagggaaaagtttagtaggcatcttttaggaagacagaatgctgtctggagatggcagtggtggatttatatctgagtcattcatctgaattggaacctgtacaaaggaaaagaggttctagctcagataaatagatataaattcattgttgctatcttcaggcattcatttatttaattagatgcactgaaaagcactctcgaggtgtggggacagggtgtggtgtatccaatggagagtttgtagaaattgttaagttgaggtacaactgcttataaatagtatttgaaaatgtcttattttgtaaacaactgagtatttagttgattgcaaatcttcctgtaaatcaatgatagattagtttagtttccgggtctatagtatattcctcaaatggatagtaggtatttttgtaaaggggactttataattaaatatagcaaagtgtcttccgtggactgtattaattaaatgttacagatccccaggctgcactgatgaaactcagctgggatgctctacatgtgatagggaaatttggtttcaaaattacacaacctatttgtgaaggtttcgtgtaatttttcttttcagtaagaagtgtttccatgtatcagtttttttacatttaaaaaagtaatttattttcaattgtggtaaagtatacataacataaaagtttaccattttaaccatttgttatcaaaagatgatgagatctgtggaggaaaaaatggagagctttattttctatagaaaaaacttgcagactggggaggcatagttttcactagtgaaaatgttgctctaaagagaaaaaaaaaggggcttggcttaagtagggaaagttcttgccctcattctctgtgaggtctgtgcaaacgaaggattcaagcttgttcggttcagattgaaccctaatctggtgccagaagtgtctctgtcagatgttccttcgaaaggctggtgcaggggaggtttctgctgcaattcttcttggccccagtcacaggaactgttctggcttaagaacagttcttaatcaagagccgtgatttccaagaacgaagggtggtgaccactcttctctcactctgctatggccgcttggacccattgtctaaatgtgggtatattagccacagggagtgcatctcatctggagagcttgcagttttatttacaattttatttcacacatttttaagcatacagttcagtaacattaagcacattcacattgttttgcaggatgaaaagttctggaaacgggtggtggcgatggtttcgcattatcaatttttacctagtatgcttttttttatacagtgttttaaagtgttggaaaaaacttatgcctttacagtattttattatattagcttatgttcattgtatggggttgtaggcagtgacagatactcaacctttaacaaataccgttgagcacttgttatgtgaagatgctccacatcttttgaactaggcagttgtggttcctgcactcttgtggcttccagttcagtggaagaagcagacattttataattacatacatttatgacattagtgtaatgaaaaattatagggtgttttgtaagtgtggaacaggaggatctgaaccagcctggggagtcagggaatgcttttttgaggaattcacattttggcagagacctgaagggggtgacaagagttaggtgaagctgggagaggacaatactagggcagaatagagcttggtaatttccagaaagttagatagggctaatgtactcttaaacaggaggcctgcagtgttgttcacaatgttcacctatatgtagttgtgtttgttttttaaatttttaaaaattatcctatagtaataggatacccatctttcatacccttctgtggatatcagcacatgtgtagattatgtcactactagcacaatcagaatgcagagtagttccattacccctcagactcccttgtgagtcattacccctcagactcccttgtgtatcccattagtgtcacatccttttccaccctgacactggcaaccacggatgtgtttcccatcactatagcattgtcatttccacacagcgtgtaaccttttgagactggctactttcactcagaatatgtttttgtgattcatccaaactgttgtgtgtatcaatagaatgttccttttttattaccgagtagtgttgcattgtgtggatgcacaggtttttttaaatccatttacctgttgaaggacatttgggttgtttccagcttttgacaattatgaatagaactgttgtaaacatttgtgtacagattctgtttctctagtataaatatctaggagtgggattgctggtcatatggtaagtataagaaactgctagacttttccagagttgctataccagaatacaatgagagttgtagtggttcttcatccacttcagcagtcttgtcagtatttttttttttgagacagagtctcactctgtcaccggggctagagtgtagtggcaccatcttggctcactgcaacctccacctcccgggttcaagcgattctcctgcctcagcgtcctgagtagctgtagctggcattacaggcacctgtcactatgcccagctaactttttgtatttttactagagacggggtttcaccatgttggccaggctggtcttgaactcctgacctcgtgattcacctgcctcagcctcccaaactgctaggattatagacatgagccaccatgcccggcctcattttaaccactctaatatggtttggaagtagtatctcattgtggttttaatttgcatttgcctaatggttaatgatgatgaccttcttctcatgtgcttatttgccatccatgtatccttttcagtgaataagctttgcctgttttttaattcatttgtttgtttgtttttctgttgttgagtttagagtgttctttatgtattccgaatacaggtcctttgttggatgtatgattggcaaatagtttcttccagttggtaggttgtcttttttgtcctcttgacagtgtctactgcagatcacttgtttttaattttgataaagtcagctgatcacttttttcatctataggttgtgttttactgtcatgtctaagaactctttacctaacttcaggccacgaagattttcttcaagatttttgtagttttgccctttattgttagatatgtgatccatcttgagttaattctctgtaagatttgcagtcggtttttttgttttttgtttttttgcatatagatgttgaattatttcaacaccattcattgaaaatagtatttctctattgtgatggttaatattgagtgtcaacttgattgggttgaaggatgcaaagtattgtgtgtctgcaagggtgttaccaaaggaggttgacatttgagtcagtggactgagagaggcagacccacccccaatctgggtgggcaccctctaatcagctgccagcgtggctagaatgaagcaggcagaagagtgtggaaggacttgacttgctgagtcttccggccttcatctttctcttgtgctgcatgcttcctgacctcgaacatcagactccaagttcttcagcctttggactcttggacttaactggtttgccaggggctctgaggccttcagccacagactgaaggctgtactgtcggctttcctacttttgaggttttgggactcagactggcttccctgctcttagcttgcagatggcctgttgtggtacttcaccttgtgatcatgcgagtcaatactctttaataaactccccttcatatgtacatccatactgttagttctgtccctttagagaaccctgactaatacaattacttttgcacctctgtcaaaaatcaaatggggtgatatttggatgggtttcttgactctgttctttttcattcatctgtgtctattcccttgtcagtactacatagtgttaaaattggattcctctacctttctttttctccccccatttttccaaaactgcttcagctattctggttcatttgccttttcgtatacattttagaatcagcttatgtttatgtacacacacaaaaaaaatcctgctgagattttgattagaattttgttgaatctacatcagtttgggaagaattgacattttccactgtgttgagtcttccaatccatgaacatggcatgtctcttaatttatttaggttttctttgttggtggtggtattcttagacagggtcttgctctgttgcccaggctggagtgcagttgtgtgatcatagctcactgtaggcttgaccacctgggctcaaacctcccacctcagcctcctgagtagctgggattacaggcttgtgccaccatgcccagctaggtttttaatttttttgtagagacagggtctccctatattgtcaaggctggtcctgaactcctgtgctcaagcagttctcttgctttgggattacaggtgtgagccaccatgcctagcctgtttaggtctgctttgatttctttcattagcatttcatagttttcaatatgcagatcctgcacatgctttgttttgtttgttttttgtagacagggtcttactgtgttgcccaggctggcctcaaactcctgggctcaagtgatcctcccaccacagcctcccaaatagctcccaactgtaggtacatgccaccatgcccagcttgtactgttttgttagatttttaacctaagtgtaatttttttttggagactcttaaaattgtattgtttggccaggcgtggtggctcgcatctgtaatcctagcactttgggaggctgaggtgggaggatcattgagccaggagtttgagaccagcctgggcaacatagccagaccctgtctctacaaacaaacaaaaatatagtagggtgtaggggcacatacctgtagtcctagctgctctggaggctgagagggagaattgcttgagcccaggagtttaaggctgcaatgagttatgatcacaacacttacattccagcctgggtgacagagtgagactctgtctctttaaaaaaattattgtttaggccggtgacagagtgagactccgttattgtttaaaaaattttggtttccagttgtacattgctagtagtagaagtatgattaatgtttgaatgttgaccttgcattctgtgatcttgctaaactcattagttctaggagtattttcgtaggttccttggggttgtctatgtagataatcatgttgtctgtgaacagagacagttcgatttttttttctttataatttgtatgtcttttattttatttttttctgttgctctagttaggaattccagtatgaagaggaagaggagtagcagtggtgcacattcttgccttattcccaatcttagtggaaaagtgttcagtcattcagaattaagtatggtattagctgtgggttttttgtggttgctttttatcaggttgaggaagatcctgtctactcctaatctgccaatgaatgttgaatgttgtcttacacttttcctaaatcaattgatatgatcatgtggggtttttttccttttgattgtaatatgctattttacgctgagcgattgatttttttagtatgaagctacttttgcattttggttgtggtgtattgttttttatatattgctggattggacttcttaattttttgttaaggattttttacatcattattatgagggacattggtctgcagttttctttttgtgtactgtctttggtattagcataatgttgtccttataaaattaattgggaaatgtttcttctctgaatgagagtgtataaaattgtttttttttttttttttttgagatggagtttcactcttgttgcccaggctggagtgcaatggtgtgatctcggctcactgcaacctccacctcccgggttcaagtgattctcctgcctcagcatctcaagtagctggggttacaggcgtgcaccaccacgcctggctaatttttgtatttttagtagaggtggggtttctccatgttggtcaggctggtctcaaactcccaacctcaggtgatccacctgtcttggcctcccaaagtgctgggattacaggtgtgagccacgcgcccggcctataaaattgttcagaattctccagtgaaaccatctgggcctggagatttcttcttcagaaggttttaaatgacgtattcaagttctttaatagttattggagtattcaggttatctatcttattttgagtgtgttttgttagctttgtgttttgccatttttgaggaattggttcatttcatctaaattgtccaatttatgcacatagaattattcttagaaaccttttattatccttttaatatctgcatagtttgtagtgataacctctttcctttcttattttggatgtcgtttttttcttcttttcttagtctttttagagatttatcagttttattgatgctttagaataactagcttaggttgcattgatgtcttttttctctattttctcttttaaaaattattgatatctcctctgttgtgttcttccttctactttaggtttattttgcttttctttttctggtttgtaaggtaggagcttagattattgatttgagatatatcttcttatttaatactataattttctctctaagcactctaagtgcatctaatatttttttttatatattgtgttttcatttttgttaagaatgttttctgagacttccttttttgcacataggttatttaaaattgtttaatttccaagcatttggagatttttctactgtctttctgttatttatttctaatactaattctctttgttcagagatcatattttgtattattatagtttttttcagtgtgttaagttcattttctgatccaggtatgacctgttttgttgcatgtttcatgtgcacttgtaaagattgtgtcttctgttgttagacttcagtactgtataaatgtcagtgagatacaactggtttgtggtattgtccagttcctctatatccatgccaattttctactacttgtctttcttttgagagtcttgatgtttccaacgatgactgggttattgtctgtttctcctctcagttctgccagtttttgctttatgaagcactgttgttaggaacatacacattaaggattattgtatctttttggtgaattgaccctgttactattaggtaatgttcttctctatcccttgtaaatttctttgctctgaagcctactttttctgatactaacctaggcattccagcctttatttgcttgatgtttgcatcgtattttttcccatcattttacctttaaactacatatgtcattatatttgatgtgactctcttgtacacagcatatacttgggtcatattttgacaatctcttttaatttgtatgtttaagtcttttttttttttttatttttttcgagacagggtctcactctgtcatccaggctggagtgcagtggcgcgattatggcccactgcagcctcagcctcctgggcccaagtgatcctttcacctcagcctcctgagtaactgggaacacctctagctaattttctttcgtggagtcgtggtctccctatgttgtccaggctggtcttgaactcctggactcaagcattcctctcatttcagcctcccaaagtgttgggattaaggcatgaaccaccacacctggccacttttatgtttaatgtagttattgaaatgtttggcttttgggctactgttttattattttgtttttctatctagtttttttcactgtttcactctttgtgtcttcttttgcattatttgaactttttaaaagtattcctttgaaatttattgtgtttatgactatctcgtgtagtttttcttcaaattaatactttattgattataatatacatacttaacttcctatggtctattgaaaattcatattttaccaccttaattggaatatgtcagtcttaccatcatgcaggtatctacattctcttcttatgttatggttttcttacgtgttatatctgcatgcattgaaaaccccatcagacaatgttaaaatttttgctttcaacagttaaacgtatttcaaaagcaatgttatcatttctgttgctcttccttcattccttatgttccagatttccttctaatgttattttccttctgtctgaagaacttccttaagcagttttagagctgatctgctagcaactaatgctcttagttttcctttatttgaaaatgtcttggctgggtgcaatagctcacgcctgtaatcacagcactttgggaggccgaagcgggtggatcacgaggtcaggagttcaagaccagcctggccaagatggtgaaactctgtctctaccaaaactacaaaaaaattagccaggcgcagtggtaggcgtctgtaatcccagctacttgggaggctgaggcaggagaaaggcttgaaccaggacagtagaggttgcagtgagccaagatcacaccactgcactccagcctgggagacagagcaaaactccatctcaaaaaaaaaaaaaaaaaaaaaaagaaagaaagaaaatgtctttatttcgccttcattcttagaggatatttgcactgaatatagagtactgagttgacagttctttctttccagcacttgaaaaacattatgtcacttccttctggtctttgtggcttctgatgtgaaatccatagtagtttgagtatcattcctttatagttaatgtgttgtttttctttgtttactttcaggaattttgtctttaattttcagtggtttgattatgttttctgatttctttttgttaccctgtttgagattcactgaccttcttgaatatgtaggtttatgtcttttaccaaacttgggaagttttcagtccttattaaaaaaaatattttctcagcatggtgctgagaacattttttttcttcttttctctgatagacatgtatgttagacctttaagtattgttccatagtctcttgttaattttttctactctttttttctctcttgtttcagattgtataatttctgttgatcagtcttcagatttattgactctttcctttgtcatctgtagtctacccttgagcccatccagtatgttttttttaatttgattattgcatattttagtttaaaattttccattggtttctttttacaaattctgtttcttttctgatactttcaaagtttccatttgtttcaagagtgttcataattgcttgttggaaaactttaataataacttccttaaaatctttgtgagataatttcaacatttttgttactttggtcttggtatttgatttttccttccctgtaagagatttacttggttcttgggttaattttagatattttgagtatgatgttatgagacataatcctctgaatttagttcatttctttttaggatgttaatatttttgtttcagtagcaattaacttggttggcttcagagtgcacattccagtttttttttgtttttttttttcctgtgggcggtgggtctttgtactcctatacagatccaccccacatatgtgtcaacaactcatcagtctgggatctgtggttagttcagtgtttaaattctttggtatacttattagaattacatccatacatgcccaacctagggatgagctcagaagttcataaacaactttattgtgtcacttctccatgctagcttctcccattctggttctttaggccttcacttttcagtcttcttacttagaaatctgaggttttattaccttgctctgctgttcaaattttgtgtttgtgtccaggacgtgtaaagagcacagagagagcagaaaaaaccttggggttttacctgccctcttgagactgcagtttcactgattgaagaagaatgtttcttctctcattgttttggctcttgctggcatctatgtctgcctctggtaccacagccacaaaattacttgggggttggggcaaaaaagaatagagcaaaaggaaaaaaaatatgggaattgagatttccataatgttgtaagtatcaggagctccctttcctgccttttgagtgagatgaataggggttctcctggagttctctccatcagtgtccccatgcctactttgcatttcaggcttttccaaggtcggtcagggagatcatgggaggaaaagaaaatgataaaactcaccacttgtttatagtaatttgaattcttttcttccttgatctgcctgctactgtttgcttttccaagtctataaatacttgattcgtgcattcttttgaggtttcatagttgaattcagtgggatagttggggtggagcatgcttagtccatcttacctgcagttagaatggccaggggtgtttcttgaaagctacttagaaaacaaatgtgggaaggaattagcagaatgcatctttgcatcctgtatactatgttgtgtatcctatattatggtaaaagtttggttagataacagaggaaaataaaggaggttttcattgttgatagcactatgtcctaaccttcatctgaggttactgggagagaaaggaaagtgttacagctaattgcttgaatgactcaactgcagtaatatatagtaagctgctattaatgatgcagtatagcttgcctcctgtggatgttattttctttccataggagataaacattgagaatcacagacttcccaaaatccaaacactttaccgtgacattcaagatccattcaagttcctactgatttttcttctaccatcctttcccatcagtcccttttcatacactttattttcaagccatctcacagatttctatactggcacctttcacatttccaccatttcgaatgtactctttctctgttagttctctctcactttttttcatttattagaaatccagttttattgttcaatagccaattctctgtgaaaccatttgtacatgttattttttattacatttatttatttatgtatttatttatttatcagacagagtctcactctgtctcccaggctggagtgcagtggcgtgatctcggctcactgcaacctccacctcccaggttcaagtgattattatgcctcagcctcccgagtagctgggattacaggcatgcaccaccatgtccagctgatttttttgtatttttaatagagacagtgtttcaccatgttggccaggctggtttcaaactactgacctcaagtgatctgcccgccttggcctcccaaagtgctaagtttacaggcgtgaaccaccacacccagcctttattactcttaattgcagttggtgtataagtctttcataccagaccaaactcctggaggggtagaggactgtgatttatcatctttttataccttgctgtaataaagtatacctgtaataaatttttgagtggatcagggaaaagaaaggaagtgttcatgatttagttaatgttaaagggatatgatgggtggaacatcaaatagttgaattacataagagagtggaaaacaaaggcaagtactgtttaaatggaattaggaactaatgttttgggaaatatgtttcgatgactttgagtgttggcaataatacttggaaattcattttttctgatctttttattatatacagtttttcttccagtagggcagattttttttttctctagtcttttctcttctgagggccagctgccacctcctataaggtagagtttttctaccttgtgctgtccagatgtttctttttatttgaatttatttatttactcttttacacaaaagaggcatgccaacagctgcactaagtgttctttcctaagccagccagatgtttggacttggagaaaagttagattttgaaataaaagacaggtggattatagcccttcattcaaccattcagtttttccttgcctattgctgctgccaggtagggtgtctttaacccgtctttatagtacctcttgtcacaaatttagttccagaaattaaaggactaactcctcctgaaatctctatgagatgaaatgagccttctttttttttttttttttgagatggagtcttgctctgtctcccaggctggcgtgcagtggcatgatctcggctcatgcaacctccgcctcctgggttcaagtgattctcctacctcagcctcccgagtagttaggattacaagtgcgtgccacgacatccagctaatttttatatttttagtagagatggggttttgccatgttggccaggctggtctcaaactgctgacctcaggtgatccacccgcctcggcctcccaaagtgctgggattacaggcatgagccaccacacccagctgaaatgaaccttcttacagactagattctatgtggttgtcctagtatgaggctggtaagcttgctgacatcatgcttgggttttcatctgatgaggttcagctggtggcccagcatagcgtatcaggctccctgtgtatgacagtgccgctggagatgggtcattcttcgactagtaggtgatttgatctcccctgatacatttatgttttttcacattttgggctctgattctcccccttacatgggcttcaattccaaggaaggtaggagttgagatacaggtacccttctgtttttcaatcctgctactcttgctgtgtttatctgagtgtggttctcttatactctgtaaactaagtccctaaagaggaacttctgttcctggtagctggacctacttaaggagttgcaggtaaattcagtgaatggcatagtcactttgggtctttaactattgagttaaaatatctttggccaggtgcggtggctcatgcctgtaatcccagcattttgggatgctgaggtgggtggatcatttgagggtcaggagtttgagactagcctgaccaacatggtgaaaccccgtctctactaaaaatacaaaaaaaaattagctagctgtggtggtgcacgcctgtagtcccagctacttgggaggctgaggcatgagaattgtttgcacgtgggaggcagagattgcagtgagctgagattgcgccactgtactccagcctgggtgacagagcgagactctgcatccacaaaaaaaaaaaaataaaaaaaaaaaataaaaatctttattaattattagtcttggatgaataggaagaaataaaaattgtttcttgagctccttcaaagtacttattctgtcttcgggtatagaatgattttcttttttgggaaatggggagaaagaatatttatttttgaagagaaaataaaacacttctagacatttttgttttctttttgttgttgttgtttgtttggttttgagtcagggtcttgctctgtcacccaggctaaagtgtagtggcacgaccatagctcactgcaacttccaactcatgggctcatgcaatcattctgcctcagcctcccaagcagctgggattacaggtgccagccaccatgtctggctaattaagagaaatttttttttttttttgtagagatggggcctctgtgttgcccaagctggtctggaactcctgggctcaaatgatcctcccatcttggcctccgaaagtgttgggtttacaggcatgagccaccatgcccggccccagatatttctgatgtctttaaatttcataccactgcttggtgaaaaatgactgtgctaaggaaaacttcttgagctccgtaactgcttttcatgattaccttcaatgtctgggagctaactataccaggaagcttttgagtggttgattttgctgctatttgtaatactcatctgatagtttttggtaagaaactaaacagccatataccgtaaatcaagagctgtcctgtcttttgggatcccagcaaaaatattggataatgtgggaaatggaatctgagcccagaaagccagcttttagagtttctaggaatgccatgatgtctgcatagatactaggagaaagatactcaccattaagatacataaatagaggaatggctgtagtaatttaggactggtatgatcactttcatgtactcatttttatatcatattagatgctcactagattagttgatgcttttcatgacagtcttaaaaataagttttaactgattaattgtagaaaactatgttcttgtttataatctttgatttttaaattaaaaatacatacactatatatttcctatgttaagaaatgaaaaaatttaaaagtcctgacttataattaaggctgttgggatgagccagacttcatcttcctgtcccaaattcccagggatgagaaaaagttgaagagaaaagacctaaagataaacaacaaaccagaattttgatggaaaatggtaaagagtactcatgggatcctggaaatgctggtcctggaaacagtgaggaattttgcaagagagatggctgatgggatcatgccccaggaaaccccagtctgaaacacagataggagaggatggctgcaaagatgggagcagctccagaggagacagccttgagcacaagaagtgacatccagctaggtgattcttccacactcagtgtccatgagggagcagatgattcgtaaacaggtagagccatatcttggaattctttagtagttaaaaagactgaggtggatctctgtatatcaacagagaacatctctaagacattaaaaatggaaagagaacttgtgtaaggacacatatggtataatgataccattaatggtaaaagaatcccaacctaaaatatctttatagttacctatgtaaaagcatacagcataggttctcaacagtggcattgttcacattatgggttagaggactctgtcatgggcgactgtcctgcacactagagggtttttagcagcatccctggcgtcttaccctctagatactagtcgtgtcccctcaggccccagtagtgacagccaaaactatctacagacattgccaactgtgtcctgggggacaaaattgctccaagttgggatcccttggcatatattgaagtctaataatgcatattcacctgttaagtgattaccggagagagacattgtaatggggacaggtgtggtcagtggagttgttagctttattttgaataagaatgtttaggtataacggtagggcgcagtggctcacgcctgtaatcccagcactttggaaggccaaggcaggcagatcatgaggttaggagatggagaccatcctggctaagatggtgaaacccatctctactaaaaatacaaaaaaatagctgggcatggtgacatacacctgtagtccctgcgactcaggaggctgaggcaggagaatcgcttgaacccaggaggtggaggttgcggtgagccaagattgcaccattgcactccagcctgggcgacagagtgagactccgtctcaaaaaaaaaaaaaaagtttagctattacatatatttacatatattacatgtaattaaaaacaaaacaaaagatagttttgcttttttttttttgagacagagtctcactctatcgcccaggctggagtgcgctggtgcaatctcggcagctcgctgcaatctctgcctcctgggttcaagtgattcttgtgcctcagtctcccaagcagctgggaccatagatatgcgccaccacactcggctaattttttgtatttttagcagagatggggttttgccatgctggccaggctgatctcaaactcctggcctcaagcgatctgcctgcctccacctcccaaagtgctgggattacaggcgtgagccaccgcaccggccagctttgcttttttataagatatctgttgtattaaatttaaaaatggttaatggtggctgggcgcggtggctcatgcctgtaatcccagcactttgggaggccgaggcagacggatcacggggtcaggagtttgagaccagcctgaccaacatggtgaaaccccgtctccactaaaactacaaaaattagccaggtgttgtggcacatgcctgtaatcccagctactcaggaggctgaggcaggagaatcacttgaacccaagaggcggaggttgcagtgagccaagatcgtgccactgcactccagcctaggcaacagagtgagactctgtctcaaaaaaaaaaaaaaatggttaatagttagaagaaatacaggtagcttacaaacgtgcaaatgtgcccaaactcactaataaccaggaaaatgcgaattaaaaaaatgaatcatttttctccattacattaataaaattagaaagataaatcatgttcagtgatggtgtagtgttgggaaattaatctctaatagtagtgtaagttgacctaagattttaaatgtgtagtttgtggtatttgtatttaaattaaatatttttcttatagaaatatacatatgtatgcagattggcatgtttagggaagcttattgcagcgcacaatacctgcaaattggaaccatgtccaatactaggagaatggttaaataagttatggttcatctagattactagaaatactgggtagcagttaaaaattatgaggtagaattctaaaaaaaaaaaaaactgagtgataaaattagttgtagaataaaatgtagtgtgattcagtttataccaagaaaaatcttaaacatgaaataaaactctgcacctttatttctgcatatccatatgaaaatgcttaggtaagtttggaaggacacatgcaaaactgatcatggctggataacaggaaatgggactaggagcctttaaaacggggcagggaataatggttatctggtatctatactgcttaagctttttttctttttaaccaaaggagtaactcatacattacttgggtaattacaataaaattgaaaaatgtaagaacatctaaatgacttgctttatatgcatagtgtcatcatttagtggcctgtgttgagcagtgatagctgctgctggggctctggtagggctttaagatcccatgacttttggtggctctccatattttgtggaattggcattagctgttcatatggtttggaaacacttttttaaaaatattgatttcagtggagattatttcccaaccctattcctagaatttcactctgttattgcttcagaaagatgtattcagaaatatatgcctgtgtatttatgacttcatcactagactttgaatgcatgtgtgatagctttctctttagtaagtggaaattaatcttaaagattgcaagctagagctgagcccacactcttactggtattttcttgtttcctcccctaacctaacttgtcatagtttttcttaggtagtattatttatttctttttttactacgtagtgacattcttcaaatgtatactttcactctggcttgtccgtaattggctggaaattgtgatggatctatatagttttttttgtgtttttaataaaatctgtataacataaagtttactattttgctcattttatttcatttatttaattattattttatatttttacagatggggtcacactgtgttgcccaggttggactcgaactcctgggcttgagtgatcctcctgcctcagcctcctaagccgtggggactacaggaactgggccactgcacacggcagttttagtctttttattttttattttttgagacagggtctcactctgttagccaggatggagtgcagtggtggaatcacagctcactgccaccttagcctccacttgggaagcctcttgggtctgccactgcttgtcagaaactttttactctgaattatgtcatatctcaggtgtttttacctagttattttgcacattacccttctcaaaggcatttgttcaagtttttcctaagctaatgaaggaaaacaaacctgagtcatctcttggctgtcactctgcctctcctactctttacatccagccatatgtacagtcctcaccccacccaccccacccctactctactttttcctctgctttattccgcagtcctttcatttgtggtctggtacccaccagctacactgacatgactcttgctaaggttttgcttgaatacttgatgtctcctttctctctgtcattcctccccttctcccttgatgcttctactaaggggtcagtggtatgagaagatagttctcctcctgctggttttcattattttgttgtttactgtatcgtcaggaatgcatgcttgcaagacaaagactaaaacaaaaaacaaaaaacccaaacagcaaaaaaaccccaaaacacctttgttttggttccgagatcgattcagtattagttcccttttgtgaaatgaaaacaggattgtagaaaatgggctgggaattttgcaactggcaaaaacgtattctctttttttcctgtagtttaaaattttaccactttgaaaatcatgtaagttatcttagaagaaaaatagtagtccactaattctaccatccaaaataaccatgaataaatatgtcttggtgctacacatgtagtttttcaaaatggaatcaaagcgaatctttaaaaaaaatcattttgttttctatgatcaaattgcctttctgggaaaggacatgccagaatgttagttttttaaaacttataaaagtatctttagatactttgaatgaaatagaaagagttctattctttttttttttagaaataggattttatctggttgtttgattttttttttttttttcagttattcaaatgaagattgatgcagttggctttcctttaaccttttagtctttcagggtaattttctttctttttttttttgagactcccaacaagtttattattttttaaattgtggtaaaatgcttataaggaaacttgccatcttaactatttttaagtgtacagttcagtggcattaagtacattcacattgttgtgcagccatcactataatctatctccagaactctcttcatattccaaactgaaactctgtacccatttaacagtaactccccattccaggctcgccacagtctctggcaaccactattctactttcaggataattttcattggttagtaatgtttggataatttgattagatttggtggatactgaagactggccgggttatgtaagctgttgctactttcagccaaggagtgcatctagtccgtattacatcatccttggagtgttctacccagtgtcttgcattgaaggacatcagaaggaaaactcctgtattctcagtcgtggtaaatagtgtccacttcattacagatctccttgagtgataggtttcaaaatatctctaggcatgaagaaacatttccaaacctgcttgtcttctctacctttctcagtatgtactagtttagaaggtattcaaaatgtttcactgagaccattgagttttatgctaaatataacatctggcctagcactttttatcactcatatgcaatctatttgataaggacagggaccaaatagaatgtctttttcaatgtattttaggcatctaattgactaatatgaaattttctattaatccagagtttttaaatgcaggcataattcccccccaccccgcccgcaaagattcagtcttgctctgttgcccaggctggagtgcagtggcctgatcggctcactgcaacctctgcctcccaggttcagcaattctcctgcctcagcctcccgagtagctgggattacaggcatgcaccattacgcccaggtaatttttcttttgtattttttggtagagacagggtttcaccatgttggtcaggctggtcttgaacccctgaccttgtgatccacccgcctcggcctcccaaagtgctgggattgcaggcgtgagctactgcacctggctgcaggcatactttttaacctatttatatccaaacatttaaatttattttttatttttattatttttaatatttttatcattgtatatgtttatttatattattatttcaaattgtttattaggtatgaattttacaaactttacttatattagcggtaacggtggagcgggagagtattgcgccttctccaagctccccggcgagaaccaccaatagtgtggtggaacttacggccgtttccaagggccagggctcttttggcctgcagatgtcagcccacacatctccctgtgctgtggactgatttggtgatccattaggtgtcaggatttcttctgatagctttatggaatggatcagtgaggataacctcaaaaaatttgtatgtggaatcttcaccaacccagtaagaattcaggactctcaaagccccacagtggcgtccagcttgctcctctgcaacggactgaaggcttggagcaaactttagctggttaacaccatgatggacaggcttgccataagttgcacccttaggaactgggcgttttcggccaccacggcaaacacgaatcctatatataacgtaaccttgcttggcctcgcagcccagtcagcgcgctttatcaggctgggtggggcggagagccctgtggagagcagagagctggcggtactgccagcagcggaccctcagaagaaagcgcatgacatcagactgctgctttctccgtagctcctggatgtactcgtatgcacccatcttggcttacctgatggctgctgccagacggaagaaaagaagtttaatttattttttaaaagttaataaagaagatgatttttctcagtcctgtaagatgaaaaacacatctgttgttctagttatttggaaattaggctcatacgggtaatagttgatgctagtaatttttctctgaagaataaaataattcaaaatagaaaactaaatgcttggctgggcgcggtggctcacacctgtaatcccagcactttgggaggctgaggtaggcggatcacctgaggtcgggagttcgagaccagcctgacccacatggagaaaccctatctctactaaaaatacaaagttagccggggttggtggcgcatgcctgtaatcccagctacttgggaaggctgaggcaggagaatcgcttgaacctgggaggtggaggttgcgatgagccgagatcgcgccattgcactccagcctgggcaagagcaaaaactctgtctcaaaaaaaaaaccaaacaaacagaaaacaaaacaaaacaaaaaaaaccctaaatgcttgatgggaaagctaataatctgctttaaaaatctctattggttttctgagaacggagaagtttatgaagacaaactatacttagtgttagtatttaaaatgctttacttttctttttgaaacatatagccagtaaatcctgcttagttgattagtgtacctcagtttaaactttccatggttgttatgtatttcctttgccattaaaatatataaaaaggaatttatatttttcaagatgttgaaatttttgaaacaaatatatctactcagcctatgcaatattaagtcattctgcagaatagcatctgcattgcttgaatattgtttgtttgttttgtattattaagccaaaaaaaacacctcacacatttcatacaacaatgacaacaaaattgaaatagagtttcaaaagtttgttagattgttctttccaggttgactcttaagtgtctctttaactaaggcagtagagaattcaaatgttttcttttgcatggccttttgctactagtgaccctgggctagactgtgggcttgttgagatgtgaatgtaccctgccccctgaagtaagatttgttcctgcaaatggaggaaaagaagccaaccaatcctttataaacaatttgtgtttagtccttctttgtaaagtccatagcagttttgacctgcttttaatgcatgatttattcaattgtttattggagcactcttttttttttttttttaaactggaacaatcttaatcacccagtaaaatatattaggctctgagctagttcttgataggtttattttatttatttatttatttttttgagacagagtctcactctgttgcccaggctggagtgcagtggcgcaatctcggctcactgcaagctccgcctcccgggttcacgccattctcctgcctcagcctcccgagtagctgggactacaggcgtccgccaccacgcctggctaattttttgtgtttttagtagaaacggggtttcaccatgttagccaggatggtctcggtctcctgacctcgtgatccgcccacctcagcctcccaaagtgctgggattacaggcatgagccaccgcgcccggcctagttcttggtatgtttataaaacgtttgtgataacataggaaaaatgtctattatgctagttaaaaaacaaaagggtgaaaattatatatgcggtatcattacgaaagtgtatttagagaaaagactaaaaatgtcaatactattaggattctctctctcctttttacttttgaatgcatgttcattatagaaattttggacacataaacacatgtgcctatgtgtatcttttaatttcttttccttgataaaccaccaattgccatatgtattgccaagattaagaagactttatgtaggtgtagatttttaccttaaacataatgaaaaaaaaataataaaagttgcaactttttgtacctcaaagacaatggcttttaacatttgataatgaaagttattaagcaagctgctatccaagtgtatctatgagtaaatagctttaatcacataacattgggctaggggagattaaaaaaagaatttaaggcgtaaccttatgatctggtggaggagaaattgtaactgtgcaaagcagttaaaatgagattgttgggtagatgagattatatgctaaaatctgcactaactactctcagagtttagattagaggagattcatcctaaattgaagtacttgggaaagatccagtggtagatgtgaaacttggagtccatcttctataataggtggtatctgaggacaataaaacaagtgtggatttaagtttaaacaaagacttaaatgtattctttttaaaggattgtgaagtactcaatttctttcttacagaagaaaactacaatcacaattacaacaacaaaattgacagtaacaggatctgaagtggacagagggcaatagggcaatagaggagggggcatcctggtctgagggcagaagagcaacttgaggttgggggcataccaggcaacgataaccacgaggaaggccttgctttgaacacagggatatttagaagccctttgcaagcagggctgcttttccctacaattggtattattaaataattaccgaatgtatatatttggatattttatagtaagatattgacctgaaaatcccttgggcatttacctgatcttttacctttcaatactcaatataattttttactaaagtggaaaatatttattgaattgacaaagagaattcttagctttctaaaagactacttttttagttttttaagatctcatttaaaacaaagtatttaaaaattatttcataactgaagactctaacagaaatactcaggtatttgccacctttgacttttttttttggtagaaggtgggtcataaatgtttaggtatatgtttgtgttccagtttttatatctgccttgcaaaataattgtaatctggaagtttctgaaactggaaagccattaggaaattaggaaaagtcatttaaaaagatagtaatcctttcatcagttaaaaagaatagactccttttagaactaagcagtttactctttttcatattgaatgcttagcttctattatgcaaaataaatagatttaaacattatagagtgagtagtcttaaaaatggagcatacattcctgaattttgagtagctttagaacttaatacacatatcatttcttttaggaataaatgtaaaatggatgaagattgaatgtgagagtatttaaatgattctcaagattttctggttcatgtgttgtgatattgaactctttctttcgtcttaggctttaatttgtgcctggtgctgacctgatgctgtgcagggacactcactgcatccctccattcagtccctctaattatcccaacttcctggggagcttgcttagaactgggcatgagtgctctttattaaaatattgggctaccctggctacatgtaacaaggtagtttttgatatcaaatttatgtattgatgaacggaataggaagctaaaattgtttgctgtgattttacataaagagataggggatattatggaaattatttggttagacaatgaattaggctgtaataaatgaaatcatggttaatagagttcctgagtttatttgttgcattgttgctttttagtgcatactcaaaaagaaatacgactctataaatgataggcagaacaatcagatttgcaattttgtgtgtatttgcagatgatggtaattctttttgctgggcgcatctgttaatgcagaaatttgtctcctcaggttcatgtgaaaatggcggatgaggctgtctgtgttggcccagctcccaccagtaaaagctacctcaacatggatgccatcatggaagccattaagaaaaccagggcccaagctgtgagtctgaatgaatctatctactgcagctgtttcatatgtagtgagcagaaagctagagtttgtatttaaaaaaaaaaataggaaagaatgattgaaaatgctgttgcagttagttcatgtcacatgagttaaatgtggtcgaattcgctactggaaatcaaaggctttgtagcatctggcagtgttggttgctgatcctgcaggtggctgctggattcagctttcacaccagggagcagtttcagttcatttccaaatttgctaggaaaaaagaaatcccaattagttttgagtattaaccctttccgtgtaataagagcattttaaaaaattctgtgttataaacaggatccaaagactgtgttcaaattccattttaataatttaaaaattacttatacctagtacacttccagaaataaaaacagcacatttggtaattattttagtttgttaatgtcagtagaatgctcataatttacaaggataaatcattctctccacccccagttctgtttgaatagagtggaatccaaggaaaaaaatgatttctgatatcagaaacagtgttttttcttctattttcttttttctttttttaattatcagaactaattatatatagtgttaaaaactatgcaaagttatctctaaaactggatggaaacatccaacaccagcaattaagcctggagcgcttcaattagcgctcacatttcttttgaaagaaatgttttagtaagatgaatgtttaaataaaaagcctaattcgtgaacccatattatagatgtttacagtttattagcacagttagtgaaggtaaaacactttaaccttttaactatagcttgccaaaataaatatgtagttgagtgttgataaaatgaagttggtggaatgaaaactcttcttctctgatacagtagtttaaattcttctgtaccatgctcataaagcttagttcagctttttttttgttttgttttttgagatggagtttcgctcttgttgcccaggccagagtgcgatggcgtgatcttggctcactgcaacctctgtcccgccaggttcaagcgattctcttgcctcagcctcccaagtagctgggattacaggtgcctgccaccatgcccagctaattttgtatttttagtagagaaggggtttcaccatgttggtcaggctggtcttgaactcctgacctcaggtgatctgcctgcctcagccttctaaactgctgggattacaggcaggagccactgtgcccagcccgagttcagcatttaaaagtcgctgatacgtagctatttctggattatgatactggttcctttagaaatttgactctctttttagcagaattattttactagaagtatgttcaacactggctgatactgaagtggcgaaatttatgtttggccagtctgggagagccaaaaattacttgattggatcaggctggtagattgtagcaatgtggcttgtgggtgaggatagtataaagtagttgtggatggcaaagtttggggtgaggaaggaaagaagagtagacattagaagaaaaaaaattcagagcacaaaataaaagtaaaaccacacctccattttagttcagtttgatagaaacggcttgttggtagttgccgagtattattaatgccatcaggaataaaatgtgttagctgtcctagtagtctgggttttggaaattaccagttcgtgagtactgtaaagaaaggagaatttagagtttttcatccatctttgccaaggttccttttacataattctttgatgcaccagccattgtgaaattctccagaattgtgggcaaagttagcctcaggaaaaggagagagagttttgttgaatagtgtagacaaatgccagtgggcaggaagctatgtgggcatatactccccattgtggttaggacaaaggtagtgtgtggaaaatgaatcagttaggacaaagggagtgtggagaaagtaaatataagaggcagtttcttggaatttgattctgatcctagaaatgtgagttagaactgatcagtgtataagagaagtgtacttattcaagggctcttgaacagtaaatattaatacataaatgcactgtacattttgcttataaagcttttgcaatatgataaaattgaaagtgctttttgctttcatttctaaggtacatccaggttatggattcctttcagaaaacaaagaatttgccagatgtttggtaagttggtaatgaaccagaaactgttcatttctttttcagaaagcagtgtggtagcatggctttgtaaatgtgggtagtgatggattatagaattttaattaacccagcagttctttgaaaattgtgacaagtgaagtggttttagtctgaaactcaactgtttatttgaagagtaattataaaaacagaaaagtttacaaaatcaccattacactgaatgaatgatacctggtttattatatactgcatgatatttgaattaaagttaaaaacttcagatttttaactgtaaatatgttagggagtttagtgagttattgtagtgatttaattattttgtggcatttaatatcaaatcttaccaatgcctctattttgggtgaagttgtttttaatgatctaaatgtccccttccagctaggtgaattaacgtatgtttgttattaaattgatttttccaggtatatttataacttcattcaagatggtactgaaaccttattttttaggtactagaatatgattttgattaatgtttgtacatatgtttgttattagatcaattatgccaggtactatcttaatttattctaatatgttatacttgtttctgtggcatacagtcatgtgttgcttaacagcgtgaatacattctgagaaatgcatcattaggcgagttcatccttgtgtgaacatcacagagtctacttacagaaatctacatggtagagtctcccacacacttaggctaagtgtgttatagcctattgctcctaggctacaaacctatacgtgttgctgtactggatcctgtaggctgttgtaatacagtggtagatatttgtgtatctaaacatgtaaacagggaagatacagttaaaaatacagtattagaatctatggaaccactgtcatacgtgtggtgcctcattgaaatattctgtggagcataactgtactcgtattctgttcttccacggattggaaattatttgtgaatgttgttattttctagatggaatttccacttaaaatctataactttaacttgaaacaattattaagatcacagaattgtctatttgaaccaccttgctttgtgggtccaaaactaaggcctaaagagatatcctgagggggcaaattacatggacacatccagaggttccagtttcccaggttttatgcagcatatctacatttttttgtttatatccctttttattttttatcttccttggaattttgaccaagattctgttattataaaaactatttgaatataatacttaaatttagatgtgtatgtgtgtatatatataatgtaatgtattacatttaagtccgtatagatgagaggtcggcacactacagtccacaggacaaatgcagcctgctgcctgtttttgtcaataaaattttattgaaacacagccatgctctttcatttatgcattgtctatgctgcttttgtcctgtgacagcagagttgagtagttgtgacagagaccatttggcctatcaagcctaaaatactttttctatggtcctttatacaaaaagtttgggaactcctgctataaatgaatatccaaatccaaattatatgagtaggataagtgatgtggtgccagtattatacatttattcctatacagttaatacatttatttattttatatattatatataatattatatacagtttatgcattttttcagttattaaaaaaatgctgcctttttttttttttttttttttttttttgagacatagccttgctctgtcacccaggctggaatgtagtggcatgatctcggctcactgcaacctctgtctcctgggttcaagctattctgcctcagcctcctgagtagctgggattacaggcacacaccaccacgcctggctaatttttgtatttttagtagagacggggtttcaccattttagtcaggctggtcttgaactcctgatgtcgtgatccgcccacctcagcttcccaaagtgctgggattacaggcgtgagccactgtgtctggccaaaaaatgcttctttaaagtctgtttaaggcctttgagaaggatatattaataaaaatgaatccaatctggttcccgcgcagaatgctgcagtccatgggtgctatgagtcctgggtgctcatagtcatgttacggaaaataagttgatacacaaataacttcacttcagggaagaaaatactgtgagataagatcaatatctttgtaaatgaaagtaagaaggatgatttccatctggggttctacattagagaaaaacctgtagaatatacaacctcctcctttctttcacacgagttttctttccaaacctatttccccatttcccttttatcagtgctgtgcctccacccagcctgactgtgcgctgctcccatgcgtggctggctctgccctcagtgctttcctcactctctctgggtgggtgtgcctggcctcccacccaccgtgtctaactgctgcctgcccttgaaggcacagttcatatgcagcctctgcggggaaagggttctagatccttctgttgagaagtaatttctttccttggactttttgtttcagtttgattggaatgtttttgtttttggaaaaatgatttgtgctttatctgatacattgtttttacttaatatccaggactaaaatgattttttgattttttttgcataactgctgtgtatttgctttagaaagtgtacaataggccaaattcccccaatgtaaaaacacaccaaactttacaagactgataattttttatgctgagtttacgcgaagtgggattggattttatacagtccctgctgtccatgacttgaaaaagatcatgtgggccgggcgcggtggctcatgcctgtaatccctgcactttgggaggctgaggtgggcagatcacttgaggtcaggaattcgagaccagcttggacaacatggcgaaaccccatctctactaaaaacataaaaattggccaggtatggtggcacgagcctttgatcccagctacgtgggtggctgaggcaggagaatcgtttgagcccgggaggtggaggttgcagtgagctgagatcacgctactgcactccagcctaggcaacagagcgagactctgtctaaaaaagaaaaaaaaaaaaagatcatgtctttttgttattgcttagatagttcatagaaaaaacaaagctacacataatcctcataaaaatagcaattttcaataattttaatgtgctgagctaacagattttatttccaagctgttttctattctgtattttccctgcaggcttcttttattatgagcattaaaggaccatccatgggagactatgaggattgttaggatgaggcaaagacatcttaacagagtttacaaagagctttgaaacgtgaaactaccttctctggaaaaatgggatgttggcttgaagatatttcttagtattctgtgttttctttctggtttttctatgttgttttaatcatattatcataccttgtcatttcaggtaacatagcataagttatagtaattagtttcaagagaaacatatgttagaatttgtgttttgtgtttggatcctatctgtgtacttgaaagatacacgtatatgtagatggatagtgagttccatcaggatgctcagcgttgaaagcataggagggaactgtgctgagcgtgtgaggtttggcgattgtgctcttttatcttctttctttcttgagtttttagcaagataagacatgtaactactgtaaaatgagaggtaatttttaaaatagccactgggttaaccaaaaaccttttaaatagctgtggcatccagtgtgggcaagggtcacatagttttgttcctggaagtgtaaattgtttcagacctcccccggcccccagaaatttgctagtatttatcaaaatttaaaacatctatatgttctttaatttaacagttccacccttaagaatctcacttacaaagatatacttgagaaaatgttcatggtaaggtgtttcataatagcaaaatttagaaagtgttcaaaagtaaaatgtggagaatggtggcttccctgcagggtcattggtcctcagttacaaggctgcagtccatgatgtgttatagtttaaagtgtgttgtaagcactttgtaactaatactaaaattctgaagttagcaagtttgccagtgactttgtttaacaatttttttgtttataaaataaagtggattaaaaatgatccatatgatactctactcattcatatttggactttttttttatttgagtaggaaaaaataggagagacttagaccttgcaagcccagggttgtttataactcttattttcactatatgggctataatctgcatagctcatggaaatacattatttttatatatcgcagcttaagaagggttgagaattgttactgtagtgtattttgtgtagacatcattttaatgacataaattttcttattaacattattatattttccattttggacacagacctttgattttagtatcttaaaatttttaatttttgagaatgtaaaatgctaagaaatttaagcacatgaaaacattgaaaattaggatttctttccatctttgaaccttcgaaacaagaccccaatttaagtctttagaggtcaccactgttaccttctggagcatgtgtgtctgtatgtgtgtgtgtgtgtgtgtgtgtgtgtgtgtctgtctgtctgcgtgtgctagaattttgctatcatttgttttgtaagatactcttagttgcttaagtaggacttactttttttatatgaaaagaagtggcatagaacttttcttatataagaaaacagtggtccctaggcttttaaaaataagtatggaatacctacctgcaggtaagttatttaatctttatgacaacttatgatgtattcttatttttattcttggttttatggaagagagaacaatctctgaaagtttaaataaatgccttgtccagtgtcacatagctggtaaatgagagagtatggatccgttgtttagtatatgttccagactgactctcagatgcattggaactgggctgggccgttagtggtatttgtttttgatcgatagctttagctggcatctgttcttgctgttggtggaggcttctctctttctgcttccttcccctcttccccattggtgtatcatcatagagatctaaaaagtagagttgtttcttttgtttttctcatcttgtaacttggatgccagtgaaggcaaatcctcacttggatttgctaacttactaagtaaggtaactgagtgagctttgctcagttaactgagtgccagagctacagcatagagatattgatgcctttaaccactcgttgatattcttaagtggaactaataaagtctccctggatttggaggagaaagttctgtgactcctttttccttttcataataattttataatatttttctagttgtgacttgtacatatgtgatgttcaaaagaattgataagaactaatgaatgcaacttcataaaacccttattatgacagaatatcttttgaaatgtttgagaacgtttcctttcctatatgttggcttaaggtcagcttttagaatatttgaagattttgaatgcgatgtggaatactaaatgctctaaagtgaatgcctgaaaaaggaaaactctccctttacagttagggagtcttttaaggatgtagataggtcagatacttttagggcttgtgggattttggggagtggtttcaataggaaaagtctgggatttgatgaggctgggatttttttccctttgcttgaggttaaaacagattgaagtgttacgttctagttttcctattacgctctctccttactgccctatgtatctattagctcattctggagtcagaatgacagctaaattctttctctgccacttagtagctgtgtgatcttggacaggttgtttaatgtcggcctctgaagattgtgttttattcttactatttgcatgatatgtatttctccatctgtgattttatgttgaaaatactgtgtgtttcttgtagccaggatgtagttgtgtcatgcttttgaaataattctgatggtctctatttttaaattgtagtgtttagactatgaagttttttcttctttagtttgccttagtgtattttcttaaatagcagctttattgagatttaattcatgtgtcatcaggctcaccctttaaaagtatacaattgagtgatttgtagtatagtcacagagttatgtaaccatcactgctatgcaatgtcagtaaaatccattaacatttaataaatgatcaaggtggttggatttatgtctagcattttattatttgttttctctcagtctcccctttttttccttctgttttccttttctgacttggattattttagtaatttttgaaattccattaaaatttatctattggatctatctatttttcagtgttttttctaggattgcaatatccatcctaacatttcatattctagttagagctaatatgataccatttcaagtaaaatgtagaaattttgcgatcatatagtccatcctccttctcttcccatcactatcctctatgttatagttgtcatatgtatttcatctgcatgtattataaattctatgtgaaaatgttataattttgttataaacatgttgaggtgagttaggacatttctttaaattgatctgtcaaatttaaaatatagagacaaatctctagattaaatattttatttgagaatcacagaattggaatttgagacatacacatggggtcttcagtatatccaaggaacaaagagaaggttgaaggttttattagatagaaaaaaaatgttactgattattttgaaagaaagttcattggtacttgaaaagctttgggagctggcaggctcggataggagagtggcagtggtagtttaaaaactagtcttagagtgatagcaggttgtttcagcagttactaggtaaagctggtcttagggttacagcaggctgtttcagcaactgggcctctggatagttcagttcttggagcctgtgctatgtgccctgagtgcttttttcccctgactccttgactcttatgtagttgggtatacaagaatgacccaattcatgtaatcaactttcacagatccaaatatcattcagttgaaattaagactcattttattttggtccatttaaaaaatgttgtcttttaaaattacatatgtatttttattgtggtaaagcagacataacataaaatttaccctttcaccaattttaagagtgtggctcagtggctttaattttattcacaatgttttgcaatcatcagctccagaactttataatcaccccaaactgaaactgtacatattaaacactaattccccatttcccacctactcctagcccctggtaaccttccttttactttctgtctctgtgagtttacctattctaggtacctcacataagtggaatcatataagatttgttcttttatgtctggcttatttcactcagcataatattttcaaggttcatccaagttccttcctctttaagactgaataatagtctactctgtggatataccatattttgtttcttcatcacctgttgatggacatttgggctgtttgtaccttttggctgttgtgaataatgctgctatgaacactggtgtataagtatctgtttgggtccctgcttttgcttctttttagtatatagctaggagaggaattgctgggtcctatggtaattctatgtttaactttttgaggttctgccctactgttttccatagtggctgtaccatttctcattcccattgttttattgtttttaataaccaccaaatcatgcctttccttaatgcaagctctgggtaattagttgactcattggatatttgtaatgtccgctttacataagtttaagaggtttaatttgacagtatcttcctaaccaatatgtttatgcttgttagtctagtgttactgccagagacctattgcacagacttgtgggagtattaatattttttcccctcacattttctttaatgaaaaatttaagaaatacagaaaagtttgaagaattgtactactacaaatgccagtagattctataattaacattttcttatttgtttttaacatatttattcatttgtgttttcctctactcatctatcaatctcattttcattttgcacgtcaacttaagttgtagataatagtacaattcactctcctgtacacttcagcatgcagtttttaaagcagagttcaggccaggtgtggtatcttacacctataatcccatcactttgggaggccgagataggaggatcacttgaggccagaagtttgagggtgtagcgagctatgaatccagcctgggtgacagagcaagaccctgtctcaaaaaaataaataagtaaataagtacaataaaaaaataaaccagagttcattattcatttacagcttttccaagaaagccttattgaaatataattgctattcaataaagtgcacatatataagaaattaattgtacacttatatgtgtacacttatgaaatcataatcacaatcagaataaagaatgtatccttcaactccaaagacttcctggtgctccttcgctggctctttcggccacttcctagccttcctcttcccctttaggcaactactgatctgttttcttatcatagattattttgcatttactagaattttatataggtggaataacacaagttatgctgttttttggatttttttttcacccagcaaaattattttgaaattgatgcatgtaattgtgtcagtacttcattccctgttttgttttgttttgttttggagacagagtttcccctcttttgcccaggctagagtgcagtggcacaacttccgcctcctgggctcaagtaattcttgtgcctcagcttcccaagtagctgggattacaggtgtgcaccaccatgcccagctaatttttgtatttttagtagagacgggattttgtcatgttggccaggctggtttcgaactcctggcctcaagtgagctgcctgcctcagcctcccaaagtgctgggattacaggtgtgagccaccgtgcctagcctgcattcctttttattgctgcattcatttctttttattccattgtatgggtttaccaccatatttttagtagccattcatctgttggtggacatgtgagttgtttccagcttttaactacaactagaggtgctatgaacaagtagttatgtgggcatatgctttcatttttttttggtaaatgcctaggagtggaatggctagatcatttgtatgttttatcttcttagaatctgcaaactcgttggtacaattttacatttccgccaacaatgtatgagtgtactagttgctccacattcttaccaccctttaaatttaactgttatactatgtagtgatgtcttattgtggttttgatttgcatttgtctgatgattaataatgttgagctcatttgctttatatctttgtcgatgtgtttgtgaagtcttttgtccatttttaaattgagttgcttgtcttatttagacatattagggttctttattctaggaaaaatcttttgtctggtacatgtcattgcaaatattttctcccatgatgtggttctgttttcatttactcagcagtatcttttgaagagcaacagcttttagtcttgttgaagtccaggttattaatttttttttcttttatagtttgaaccttttgagtcttaaaaatatgggccaggtgcagtggctcacacctgtaattctagcactttgggagactgaggtaggtggatctcttgagtccaagagttccagactagcctgggcaacatggtgaaaccccatctctacaaaaagtaacaaaaattagatgggcttggtggcatgcagctgtagtcctagctgcttgggaggctgaggtgggaggatcacttgagccttggagtttgaggctgcagtgagctgtggagtgttactgcagtccagcctgggtgacaaaagaagaatgtgtctcaaaataatgaattatttaaaaaaatagatatatgtaatttcttgccaaactcaaggtcactgagactttcttgttttttgttttgtatttttaatgttttatagttttagatctctgatcaattttgagttaatttttatatgtggtgtgaagtagggtctaaattaatcttttttgcatgtggctattcagtttgctatacaatctcttgaagaggttatcccttcctctttgaattgccttggcacccttgcagaaaaagtaatgggacatacatgtgcgatctcggctctctgcaagctctgcctcccgggttcatgccattctcctgcctcagcctcctgagtagctgggattataggcgcccaccaccacaactggctagataatgaactcttaaaaatactttgtccacaccccctttcatttactcccatgtattactaatcctgctgaggccgtcttggtgtgacctccttcctcaccactgaccccctcttttctctctcagaacttccttactttaacaatccagttgaacacatatgccaccttattcagcagttgaatctcaacctgagagattctagtgttcattcttcagttccacacataaccatcgtgagtaagagaggctcattcccatagaaggatgaggtttaagattgctccagtcattaacagtatacaagatgtcagatagcgttttactgggtctaagataaattaggctgtaaccaagaatatttatatatcaaaccagcctctccacacatcccaattataaattctggacaaaatagaaaaagctacataatacctatgggtaccagagagcagccacaattagacagaaataggaaggcgactacccttggaaggaggaaatggcatgggggcagtttccttttttggccttttttgaacagttcctggaatgaattctggagtgttccatgtatgcatgggtcagattccaagcactccagctgaggctaaaagaaccaaagagaattattagctgttacttatgctagtattgggggaaaatattcaagttctacctaggtgactcttgaaccccttttgaaatgtgacaacgtagcagatgctgttgatgctgctgtccaccctttctgcccggttgttagcgtcaccttaggtgaccatcccttccctgtgagtctcagtggtaaattctgactagtgaaatcctgaccaggattcattctcttccttaccaatgaccagtttatgggaggctcatggtccagtttgattcctggcaagtgaggggacctttcaagaaaaggtttcttttcattgtgtgaaataagcctttttaaaattattttaagccattgtaaactgagggtttttattgttgttgggatttttgttttgttattttaattttggccaaaactaccgggttgaaagaccagtgttttacagactgacattctattgaatcttaaaatagaatatagcttctgattcttgtgttaagctttctgaagtaatttagaaacaaaaccctctatggattacatggcaaaaaaggcatgtttcaaccataaagtaaattgttttaaaaatttcccttaatttggccaggcgcagtggctcacgcttgtaatcccagcactttcggaggccgaggtgggcggatcacctgaggtcagcagtttgagaccaacctggccaacatggtgaaaccccgtctctactaataatacaaaaattagccaggttggtggcgggtgcctgtaatcccagctactcaggaagctgaggtaggagaatcgctggaacccaggaggcagaggttgcagtgagctgagatcgtgccactacactccagcctgggcgacagagcgagactgtctcaaaaaaaaaaaaaaaaatcccttgatttatgtaaggattagtcacttttgtatgcaagtagaaggctgaactcatgctttttattttttattttattattattttttgagacggagtcttgctctgttgcccaggctagggtgcagtggcacgatcttggctcactgcaatctccgtctcccaggttcaagtgattctcctgcctcaggctcctgagtagctggaactacaggtgagcgccaccatgcctggctaatttctgtatttttttttttttttgagatggagtttcgctcttgttgcccagctggagtgcaatggtgcgatctcagttcgctacagactccgcctcccaggttcaagcaattctcctgcctcagcctcctgagtagctgggattacagatgcctaccaccttgcctggctaatttttgtatttttagtagagacggagtttcaccttgttgaccaggctggtctcaaactgctgacctcaggtgatcctcccacctcagcctccggaagtgctgggattataggcatgagccaccacacccagcctgaactcatgctttttgattcttctgtatcactcaggctttctggaggtgcttattaactctttgctagattagataagttgctgaattcaaatttagaattctggaaataaatgtagaagggatgctttgagaagcatccttgtgctttcattgtgttatgctattttaaacttacggtaacttcgtgatgtcttaaaatttattttcattgatttatttgtatgtgactcctaagcttagaattcagttggaaagatttttgtttttgttctagtgaaggaagtacattgctcgaggatttttttgggttaactgaagtaatgctagttatctctgttacatgtagttaatgattcttgttgcccccagatttgttctaaacttaaacttttaaatgcatgctttctaaaacaggcaaagaagcagaaataatgaaatgatcactggggctttgtttctgtactggtccttatttaaggatattacaatgttcctaagttaccattttgactcataatatgtgatatgctaatgttccaagcacagagtattcttttctgtatgtttccacttcccaacctacctatggtgtagcgcctgtctgtaccactacgtgtgtgcatgtgtacatgttcctagctttttattcagtcctttatgtgctagttgattgttgagtgcagataaaaataatgtgttgtatttcttaaccacaatatttgatttataaggaaatattttgataacagcatttatagtaatatatgctcttactgattagaatgccacaattgatagaaaatatattggatgtaaattagttacatatttacataatctatacacaagtaacagcatattttgtcagcatagcgtacagtagccataaaataagagtgggtgatacaatagagcattggttcccagtatgttctgtggtacctggggactcttgagaccctttcagacactctgaagtaaacaattttccataatagtttttcctgctctcattctctgaggattgtgcagtagagttttccatgtaacagtagagttatatgatatatgttatcacagcagattgaatgcaggaaccagatttgagaatccagctgtcttaagccacatgttaaagagatttgtgaaaatgtaaaacatttctactctaatgaatttgtcataaaaatgttacttctaattgttaacattaaatgggctattcttttgaaatacatttttaaaaatttcttaattttaacatggtaaatattgatatatacaacatgtataagccaaagctccttgagattgtcaatatttaaaactgtaaagcccagaaaatttgataggcactgtcctgaaaggtgactgggtagcctcttgagatagggtgatgacagtcttctctgagagtgtggcctttaagctgagattctagacagaatgagcatgcctcctctgactactatgccccactccacttccacattcttttttagccttagtataattacttccatgtcaagtcaaggacttttactcattcatttctgaattcctgttgcttaccactttacttactagtcattaataattctttacggccagacgcagtggcctacgcctgtaatcctagcagttcgggaggctgaagccagaggatcacttgagtccaggagttcaagaccagcctgggcacataggaaaaccccatctctacaaataatttaaaaattagctgggtgtggctgggcgcggtggctcacgcctgtaatctcagcactttgggaagccaaggtggacagatcacgaggtcaggagatggagaccatcctggctaacacggtgaaaccctgtctctactacaagtacaaaaaattagccgggcgtggtggcaggcacctgtagtcccagctactcgggaggctgaggcaggagaatggcgtgaacacaggaggcagagcttgcagtgagcggagttctcgccactgcattccagcttgggtgacagagtgagactctgtctcaaaaaaaaaaaaaaaaaatattagctgggtgtgttggcatgcgcctctggtcccagctgcttgggaagctgaggtgggaggattgcttgagcccaggagatggaggctgcagtgagctgagattgcaccactacactccagcctgggtgacagagcaaaaccctgtctcaaaaaaaaaaaaaaaatttacctttcagtggaattatttatatacatttctacacatgagacaaacttttgaaggaagtttaatgtctttggtattcacatcaaactaatttgacatatatttttatttagttttttttaaaaacaaatattttttaggatctgttatttcctattaaattccttttacatgaaagatcataaattgatttttaaaaatgacttctaatgttaatagggctttgtcttttagacatatttgttaatgataaatttgtttctgtaatttttatgctttgtagctttaatttgggcccatacgtaaagactatgtagttttattatcattcctgccgtcatcatccttgatcataccatttaaaagcaatagaagttttaaatggagtagtagagaaagacaatcaggaattaatgagtttagataaaataagagtacaagcaaacaaagttgattgtggccatgttatgaatgcgtgagatttcaacttttaacaaattaataactttttttgaacacttagtgtgtgccaggcactattcccacccctctgcatgtactaactcatttgctcttcctagcagccctatagacaggtactattatttctgcttttcaggcgaagaagcagaagttgctcaggatcacacagctgttagtgccagggcaaggatttgaaccccgtcattaccatgctcataactaccggactatgctacctctgaagaagagattatacagcttgttgtggcacaacacaaaaccttaaaatgttttcagctcttttttttttacccatccttattttttccccatatgactattatttattcagccttttggtatctagcttgcagaatatttcagggtcccaaagggactatataaagagctgtctgtaaaagttctgctttcctcccaaaagctagcagtgggaaaaacaggcaggagagataaggtgcaaagcacagggaggaagaaagagaatagtggaagcagcagtggtgatctgtagtggtgtctacagtgtgctggttctggttgagttggtacgggcagccatgtcagcaaccaagtcttcacttgttggaggactcgctttttacatgctctggctgggatggttttagttactaggatgtaggggacaggaataacggcatttggtagagattcaaaacagcaaccagggatgacgagctgcagacattgatcgatatcaagtaaataataagagatagaagataaaacagctctcaggtgccagaaagcaacttggtaatggagaaatacatatcctagagaaaggtagacaagtgtatttatcctctcaggaaattacctggataagtgtacatttctgcaaagcaaaatagagtcaagctcctgaactcctgctgcataggctggtaggtgttaatgggtgtctgaatggagaaggatgaggacttcaggtttctagtaaacttaaatgtgatatggtttggctgtgtccccacccaaatctcatcttgaattgtagctcctctaatccccacgtgttgtgggaggaacctggtggaaggtaattgaatcatggggggcaggtttctcctgtgttgttcttgtgatagtgaatcagtttcatgaaatctgatggttttataaatggcagttcccctgcacaagctctcttgcctgctgccatgtaagacatgcctttactccgccttcacttgccaccatgattgtggggcctccccagccatgtggagctgtaagtcaattaaacctttttctttataaattacccagttgtgggtatttcttcatagcagtatgaaaatggactaatacataatgattcccttgtttggaggattgtcagatactatatgaaaagcggtttcacatgtgcttaaaaaaacctgtatatgtgccttatggtgtcattatttctaatttatagatgtagaaataataatatttagagaaataaaatgctttttctaatcacatgccagtaggagatcagcaagctgggactagaactcaggttattttgattgaaattcttttttacgaagccctgagggttctaaaaagctcgagtttcactgtgaaccattgtatggaaaacttaaatgtagccagaaaccacatagagaaaataaccaggttttaaatgttttatagtataatatttgttgtggtactcttttatgggctttaagaatctagtatgctggagggctggggtggctcacgcctgtaatcccagcactttggggaggccaaatcaggcagatcacttgaggtcaggagttcaagatcagcctggccaacatggcgaaaccccgtccctactaaaaacacaaaaattagccaggcatggtggcgcatgcctgtagtcttagctactcaggaggctgaggcaggagaattgcttggacctggaaggtggaggttgcagtgagccaagattgcaccattgcactccagcctgggcaacaaagcaagaccccatctcaaaaaaaaaaaaaagaaaaaaaaagaaagagaatttagcatgcatttaggtaaccacagagataaaatcatattcaaatgtgcttgtattatgagtattactcttctttatgagtattctttggaaaaactattgtcacacaataacatattaattatatctttattcatttaccatatttgaaattctcattaaagttttaaaatgtattttaattataaaaataatttacttaaaaagttaataaatactagatgtctgttcacacttcatttttccactgtaagttgcagattagattatgatgaacagactataatcttctaatattctgtgccctagtaaatgagtccttgcttatgtaagtcagatattttgttattttgatatctaagtaattggttattatgatttatttttttcttgacaagcttctgagctttgttcagtcttgtcaagtccctggtgagttttagatctctgagtctagagtttgttgatcgaattaatgaataaaccaatagattagtacattgttgatttttttttcccccaaaccttagatcctatttgctctcttaggaaactgtttgaaagtattgcaacttttagagaagttttgcaaatcttagccacatgtctactaatgttttgcacactatttttagttgatgaaatgtaagcaatttatatttgtcttaactttccatctataaggtagtgagagtggtgacaggctgctctgttttgcagctagcatctttaattgatgttgaattgtggctttccgtgcacacagggttaagtgaaaaggttgcagtcatctagtgagcattttcctttaatgtgctcattagtggtggcaagtccaggtttcagcacatgtcagtaatttacatttcattgtggagaggctgcccttgttcaagagttgtttctaagcctgatgaatatatattgggaataaacagagtagaagaattgaaagccaaataccctgccaggcctttcagttggttctgaagcttccagtggatctctgattagcaatgcataaagcaggatgaaaatgcaaagatgaggcctacaaaagttgtcgcaggtagcttctccccttaaatcctctttttgtgactgcttttccatttcatcttctccaaattcttttttcatggcagacttcgttaaagtgaaaatactctgtgttagacgtaagatgtgaatactacaggatctacctggttcctgtaccccttctaactatgaagccaagtctgatcgttatgcaatgagttttcagaagcaaagggcttgataggcctcggttcttagggatcagatgattgtgattggaatctttgtgatgattccttctgggactcattttttccatctttgcctgattggtaggtaccagcttgttctggcttttgaaagcttgcatagatcagtaaagaataactgtggaggctgtggtcagtgttgttggggatagagacaggactctgaaattgtggtgtttgggaaaatccagaaattttctttttgtagaaaaacttcatatattaaaatgaagcatttttggaacttgggatttgattacaagttacttcatgcatagatggtgtagctttagaaaactcaggcctagctgtttttagaagaaaatgttataattctttatacattttaagtttaattatttacatgtgtataaaaatttgggtttattgcaagaaggtacgttttgatattgctgtttctgtgtgtttgtatgatacatctacccatgtatctgtctacttatttatctttgtggtgctagtcaaaacttgcagcttaagagaatttgttcagaattggtggttagaatcaaaagtgagtgaatttatgacttacattattgaaaaacattgacaaatgtcaggactcaagtccgatttttattattttactgtaaatccagttagatgtgatttagcacttggatcatttaaatataaaggcatgttagtcacagtttaagtctttatattagtttttttaattaggtagagttttaacagaggagcaacatggaaaatgtttatgtgtatgaggataaaaatgcaagtcttgagaatattagtttagtaatgttctgattagtgtttgtagcctttgtaaaaaatgtaaatttaccttctagatgactacttgaaactgttgtttttggatgcttgccagataaaagccctgtgggattaagttctggtaaatcgcttgcaaatttgtgagggatatcagtgactttgagtgtttaactgtccaagctgtcatctacatgcgtcctatcactgcattgggtgaaaaaattaagtttctcagccagttagaattaaaggtgacatctgcttttaattggtgttttattttcttccaagtcagtaaaaattcagtaagacatgaattatcaaattttgcaatgctaagcaacttgtcaagtgacagtaagcactaccttgagcagttgtacagatgggaagtgttaaaatgttgattaatcttccagagttctgattatgagaagactaaagcttatatcatcattgccagctttctagtgtcagagtagtatttatttgttaattttgtagacctttttcaattactgacaaattgtgtcttgcataatgaaaattttactagttttaataagacttggtctattagactaagggtcatagatggcaatgtagaattcatgtttctgttgtctattatttagtaaacatattagattctttttagtaaaaaactgaaaaaaatctaaacgtgagctttaagttttattctgttatacacattcatcctgtgttgagaagggagtatctgtttgaatcttggcaaaggaagtcttgcctgggccccctgttgaaaaagaaaatggattatttctgtttttaccatttataaaacattttaagatgtaaaacataaggacgaaaaaaatcatcaccttcaagtagtccatgtaaaaataactcaagtcttcaaacattctcagaactaaaaaagaccaaagaaaatattcccatcatactgattatgtttcaattttctagttactaaaaattagaacatggcactaagtagactatataaagtatgtctttaaaaattcaactgtgaaggagatcttttttttttgataatcattaatatgaaagtgaagtttctcttttccctgttataacagttctatgtagtagtagaggtagaattctgaattgaaggtggttaggacttatagcaacatttctgggatgagtttttcagtattcccagacttcaatttaattcagggtttcttttttgctctccacttatgaatatgtgataaatattttatgtagtcgtgtacttttgctatagaaaatcagtggattatttaatttgattcaggaaatctaccctgtatggttatttcgatgttgggtagattttatttcaacttaaaacgtagaaaagatgcttaggcaaatgatctaatagttttagatacatttggtaacttgtatcttaaaccccagggccaagtttagcagtcttacacatgtttagaaaatagttgaaaaatagaaaatttaggtctttttaggtaaactatacaaaacacttttatagtcattttgatgcctgataacttcagggttcattgcccctgtacatttttcaaattatttgcttctcaatccataaggctttaatttaccccctactgacaaatcccaaatgggtttttaagaattttgagagtggtctgctgtagttgtgcttcagcactggcttcaattgctgacacagaatctcttaagatgcaccaaatttagaaggataggaggttcaggcagcatttcctctggcaaatactaagattttatttgcggagggtggggacggagatacagaattactgttttctgtaatatttttctttctttgatcctgttttaatgcctgtttattaaaaaaaaataatttagacacaagatttagccacatttttttaattaattaaaatgtgtgggccgggcgcggtggctcatgcctgtaatcccagcactttgggaggctgaggcgggcggatcacaaggtcaggagatcgagaccatcttggctaacactgtgaaaccccatctctactaaaaatacaaaatattagctgggcgtggtggcaggcgcctgtaatcccagctactcgggaggctgaggcaggagaatggcatgaacccgggaggtggagcttgcagtgagccgagatcgtgccactgcactccagcctgggtgacagagcgagactccttctcaaaaaaaaaaaaaaaatatatatatatatatatttgtgcttgtttggatgggcttttttaatcttgaattttatagaataataaagttaagtatttgtaccttgacataccctaacacaattaagtattgcttccataaataattttgatcttataataaacataccttacatactgacgaataatattaacacaaatgtatactcccttagaggtgctcaaaatgactttcatgccacccttcatgcctgctgggttttaaggcataagagaaacagatgatttctgcattttactggaaaaaaaagactaaaatgtacagctagtattgaattggggtaataatctgccacttttttgcccttcaatgctgtcgtgatcttttagggaagtgaggtcatggtagacccgcttgttaatcatttctgcgttttcagctcagtttggtcatgaatacttgacttgctacctatagtcttgcttctgtttgcctctttgcatgcagctccttaaattgtttaaattaccatgctttctttatcatgtgatcctgtcatctattgacaattgattggatcaaggattagtgcctgacccaaggcagacatctacagaagggtcatcctcttcccacaatggtttattttcctgtctgtgtgtgtgtgtgtttgtgtgtgtgtgtacgtgtgtgtgtggtggtcatgaatggtggtggtgccaagaaggttgtgacatttgactaataactgatgatgagagaagcagccagcacttggagatctagagtaagagctctccaggcagagggaatagcaggtttaaatgttctgaggctggaatgagatttgagacatagaatatagagattggatatagagaaaggaactggtgtggcaggagaatcatgaatgagaaaacacgtggtacaagatgaggttgaaagggtaggtggctcagggcagatcagttagggtcattctaagaagctgggatttaggtctgagtgcattggggagctgctggaggagttttaagcatgtggtgcacttctgtatcacttctgacctaatgtgatgcacttctgtatcactgtaacaacagtgcatatcagactgaagaactatgtgattaagaacactttgctacataggagcagaaaaatttaaagaagaaacagtgccctagaagaagttaaattctcttgggcatccacctgtagacgtcctcactccttaatttgtcctgctgttcttagcatcatagctctctgtgaaaacaaagctatcttctaatttatactttgcaaatcatttgcttttccgtaaaccccattcttgcctattggggttaatctaataccaagatccaagattcctcttcccacaatggtttattttcctcaggctggattattcagtattgaaaaacagccccataagacaacccatgggaaccattgaccattcaggtcctaagaacagttagagttagggggtaggtgtggatacagaggttgtatgtatgtggtattccagtttaaggtggccactctcttctgatttctttctcctctgattttgtctcctccgatttctttcccctggtattaattactaatacgcttctttgactttctgtctggctagtaggtgaggttacgttgcacaaatgcttaaatgaatgcatgtatattggcatccttgtatatgggcttatgtttgcacacaaatactcaaattccagtgaagtttgctttgccaacatcctttccaccacaggtgatttgtggaagccagtcaggatcattttatcttccctgacaattattgattcagggattaatcaaggcttaagccattgtgggccactgaaacatgatgaaaggctttcctgggattcctggaaaaggaacctccttattcttaagagaaagacattggaagccaggttctcttgcattctcccccacccaccaccttgtgaatgagagagcttagttgctgctggcagccatattgtgaccatgagggtagctagcctgagggtaaagctgacttacagaataaggcagatctgagagaatggcagagaaatccagaattgggagatatatttttggaagaatttctgtctaaaagtgttggtggggtatgtgttatggcaagaagagagctgggatgtttaatgggttaacagcattttgttctttatcatatatttattgaaaaattttcctatcccattgtgctaggcactgaggaaattatttaaaaaataaagtagggcacagaacttgcctttccaggaaactcatttacaggtattgggttttgattctttctttctttcttctttggaaacagggtgttgctctgccgcctagccggccaggctagagtgtggtagggtgctcatggctcactgcaccttctgcctcctgggctcaagcaatcctcccaccgtagcctcctgagtaactgggactacaggcgtgcaccaccatgcctggctaatttttgtattttttgtagagatgtggtctcgccatgttactcaggctggtctcgaactcctgggctcaagtgatccgcttgtcttgattccttgtataactgccccttgtattggatttggggactgaaagaacacttagttactaatattcttttttttgtttttctttttctttttttctttttttttttttgagatggaatctcgctctgtcgcccaggctggagtgcagtggcgtgatcttggcttactgcaacctctgcctctgtgttcaagcgattctcctgcctcagcctcctgagtagctgggattacaggcacgcgccaccacacctggctaatttttgtatttttttgtagagatggggtctcgccatgtttctcaggctggtcttgaactccagggctcaagtgatctgcttgtcttgattccttctataactgccccttgtattagatttggggactgaaagaacacttagttactaatattgtttttttctttttctttttttttttttttttgagatggagtcttgctctgttgcccaggctggagtgcagtggcttgatcttggcttactgcaacctccacctccccgttcaagcgattctcctgcctcagcctcctgagtagctggaattacaggtgtgcgccaccacacctggctcatttttgtatttttagtagagacggggtttcaccatgttggccaggctgatctcaaactcctgacctcaggtgatcctcctgcctcggcctcccaaagtgctaggattacagcactgtgcctggccagttactaatattcagttttaaattttagaaacctagtacttaaagcacattaaactttgcttactgtggaaccagtgtcagggctgtgagttgccttcagtgatgttgctgggtagccaggcttatctgtgcgttatacgtgggtgctttgaggaatccaacaatgagaagatagctagccttgaagacagcactggaagcagagagtagccagcagtcagtcagtcttctctctgagtttatgctccattctttgaggtgtttctgcaagcctctctgctttccacctctgcttgtctggcttgcggccctgttggaacatgctgacttcattgctcctaagcctacatgatatagaccagggatcctgaaaagaggaaagcctctttttctctctgtccccatgccccattcctaggaaagggaccctgataggtctagtttgggccagctgccttttgccactcccgtctgttcagagagcaagattatgccattcacaaggtctacaactgaagaggtcttttgctgagtttgggaaaagggcagttcaggaaaatcagactaactctgccaccaaatgtctcttaaaccacataattatgggacagtatgataattgcagcaatcaaaggctgttgagtgttgtgtacaggaaggtagtggttaactctggtaggttgggggttgggtacagctgaagagaagattgtcaaacttcacataaagggtctgtgtgtgtgcgtgtgggtgcatgcatgcgtgtgtacgaaggattcatgagggggagtattttatattggtgtaggtgttggtttcctccccaagaatttattcctatcataaatactctctgtgcccctgtgacagtttcataactgtggtatcattagcgttacaaagtacagaagacagaataaaatcatggactttttgagctggaaagaccttgaaacttatctaatttgtttgacatacatcttttgatgtggcagattctggtaaatataaagacaaagcaggttccctaccctgaagaagtttatagggggactacagcagggaagaaatactgggaggagtttctctgattcccaggagaggatagctggccatcgggggaagtcagatgacgaagtcatccattttgatggaggagatgtgcccagaaaggcttcatgacgaaggtggcatttgaagtaggtcttgaagataggtagtgtttaggcaggggagatgatagaggagaagaatgggacacacaggtggaggggacattccaggaaggggctgtagtgtcgggatggcagaaaaaggggtgctgcattgagccatgagctgtgacagacctttgagtgtaagagtgtaagagtaagcccggaaggcgaggggccctgggtactgggcttgaatttgtttataccattcaagctttccagaaaacccctgtgagctttgaaatgcttcaggggagcattctgtgtgaggctggctttttctgcccttttcctcaattcagcaaatggcaagaaacttggtatcatctttgcccacctttgctgttaggccgtgtgctagtctgttcttgccttgctataaagaaatgcctgagactgggtaatttataagaaaagaggtttaattggctcacgattctacaggctgtacaagaagcgtggtgtcatctgcttctgaggaggcctcaggaaacttacagtcatggtggagggcaaagaggaagcaggcacgtcttacatgaacagagcaggactaagagagagagggggaaggttataactatagtagttattgcttcctgatagataatttgtttgtttctctttctcctctgctgaaatacagcctacacaaccataggagttcctgtctcttgattgttgctgtttcctcagtacctaggacagtgtctggctcatatatatttgtttaatgaacaaatgaataagagatgggttatttagctttaggccattcatggaaagtttaataccataaattctctgttaagtaggcagatatttataaatacagaaatggcttctaaggtgtctccgtaagatagctattcaactgttgcacgagcttatgatgactggaatcgtacgccctttcatcatatagaccagcatttggcaggctttttttctgtaaagggccagataataagtgttttaggctttgtgggccatactgtcacaaccattcaactccattctaaatactcagctcttctgttgtagtgtgaaagcagccctagactataggtaaatgaatgggtatggctgtgtttcaatacaactttcattatgaatacttaaatgggaatttcatgtaattttaacatgtcacgaagtattactctgcttttgatttttttcaactatttaaaaacataaaaaacctttcttagctcatagactacaaacgtggtgggctggatttggcctgtaggctgtaattggccagtacttgttatagagctttctgtcttcctcatctttaatggttagaaaattcttcattgtattaactgaaatctatctgtttagaatatttacctattttttcagtagtgaaataggacatatataccgaaaaatgcacataatgtaaatgtacagctttacaaattattgtgggcacccacataatattacctaggtcaaaaagtaagacaaatgtctgcaccctagaagccctttgcatgttcccttcaaatgatgctccttcctcccatcccaggaacactgtcctaactattatgggaatcattttcttgcttctctttatactttcacctccttaatatgcatcctatgaccctggagtttagttttgcctatttttttgaactttctatagatagaatcatatagttaaaaaaatttgctttctgtctttgtttctttctctctttttatcttttctttctttctaatattttctttttttctttcttttgacagttttgctctgtctcccaggctggagtgcagtggtatgatcatggctcactgcagcctcaccctcttgggctcaggtgattctcccacctcagcctcccgggtagctgggaccacaggcacaagccaccgtgcctggctaattttatgttttgcagagacaaggtctcaccatgttgcccaggctggtcttgaactcctgggctcaagtaatatgcctgccttggcgcctcccaaagtgttgggattacaagttttcttaaatttctttttctttttttttttttttgtgagacggagttttgctcttgttgcccacgctggagtgcaatggtgcgatctcggctcaccgcagcctccacctccgaggttcaagtggttctcctgcctcagccgctcaagtagctgggattacaggcatgtgccaccccgcctgactaattttgtatttttagtagagatggggtttctccatgttggtgaggctcgtctcgaactcccgacctcaggcgatccacccgccttggcctcccaaagtgctgggattacaggcgtaagccactgtgcccggctaaatttctttcagtaacatttattagtttcctgcttagaagtattgtgcattttcactgtatttattattagaagtttgagtcttaaaaattattcagttttctctttgatttcagtcttaccattccatctagttaaaatagctttgaatcaatattttatcattctttttcagcattggttcatcattgaattaggcaatcagtgtctttgtgtggcgttatacaagtatttagtaaaaatatccattagggaagggccaaaagtagagtagggctttttagttagacaaaaatggactattcaatgatctggatatggcgtttgaaacaattgtgtatctgtacaaatatatttagtttaatacacacttgtctgtgttgtccataagcacacatttgaatatggccacgagaaagattttgggtgaccatgtggataaaaaaattatttggtacagttatttctgctaatggatggggaatgtatagtaatatggaaagtacaaaataggggccgggcgtggtggctcatgcctgtaatccagcactctgggaggttgaggtgggtggatcacttgaggccaggagtttgagacctccctgggcaaaatgacgaaaccctgtctctactaaaaatacaaaaatggttcaggtgtggtggcacgtgcctgtagtcccagctactcaggaggctgaggcaggagaatcacttgaacagggaggtggaggttgcagtgagccaagatcgcatcactgcactccagcctgggtgagagtgagattccatctcaaaaaaaaaacaaaaaaaaaaagaaaatacaaaatagggatagtgtagaagaaatctgagaatgttttctacaatttaatgtgtatcacctagtaactatatttaataatactagatttatattctcttaagtatatgccaattgagaattgtgcagtgagttcagggatgctgtgaaggaattattttcagaattcaaaattttcaatggataattgagaattaattgcaatgatgaaacatatgtaacatgtagtagcttatgtaaacattagtgttagattagatttgtaaaattcctagttttcccaaaatatttgaattatgctgtagaaaagtccagggactcactcctgcaaccctaaatgtagctatactgatacaggatttggcagcctaatagatgtagggttggagcacaaagaagtttaaaaatactccattccatggatgtttaatagatttatacctgttgattattaatttttgagtttgtggattaggtattatcctccatgattaaaaaaattggagaaagaggataatcactgtaagaacgaatcaagattatgactttgtatgttcagaccaacatgggaagaagaaattcttggtaatacgtcaattgggatctgcgataggctggagaggtttttgggcagatatgggaaataatgctatttttagtctgttcactttcatcaagctgaccacaaggtggggaataatacattatatgaggtctggatgacctgcgatatcatccagagttataatagagaattatattactttaaagaatgtattttttaaatttggatatttacacatgagttagagtcaaacagtgtttttatagctatatcttgactagttatgccaacaataattattttttaaaattgtttctcagtactgtaaggttcttattttattgttgaaaaaaacttattttaagttcaggggtacatgtgcaagttcgttacataggtaaatgtgtgtcatgggggtggcactctttttatttcagtaaatttttgggaaacaggtggtatttgattacatgaataagttctttagtggcgatttctgagattttggtgcaccagccacccaagcagtgtacactgtacccaaggtgtagtcttttatcccccgcccccttcccaccctttcccccaagtccccaaagtccattgtatcattcctatacctttgcctcctcgtagcttagctcctacttatgggtgagaacatacgatgtttggttttccattcctgagttacttcacttagaataatggtctccactttgggaggccgaggtgggcggatcacgaggtcaagagatcgagaccaccctggccaacatggtgaaaccccgtctctactaaaaatacaaaaaatagctggatgtggtggcacatgcctgtaatcccagctacttgggaggctgaggcaggagaatcgcttgaagccgggaggtggaggttgcagtgagccgagatcgtgccactgcactccagcctggcgacagagcaagactctgtctcaaaaaaacaaaacaaaacaaaacaaaacaaaacaaaaacacaaagaaagaaagaaagaataatgaattccatctggattgctgcaaatgccattttttcattcctttttatggctgagtggtcgtattccatggtgtagatataccagtatttatctactcgtcaattgatgggtatttgggctggctccatatttttgcaattgcaaattgtgctgctataaacatgcatatgcaagtatcttttttgtataatgatttattttcctctgggtagacacccaataatgggattgctggatcacatggtagttctacttttagttctttaaggaatctccacactgttttccatagtggttgtactagcttacattcccaatagcagtgtaaaagtgttcccttttcaccacatccacgccaacatctaatattttttgattttttgattatggccattcttgcaggagtaaggtggtatctattgtattgtggttttgaattgcatttccctgatctttagtgagcatatattgaagtttgttggccatctgtatatcttcttttgagaattgtctgtacatgtccttagcccactttttttttttaaattatactttaagttctggggtacatgtgcagaatgtgcagttttgttatataggtatacatgtgccatggtggtttgctgcacccatcaacccgtcagctacattaggtatttctcgtaatcctatccatctcctagccccccaccccctgacaggccccggtgtgtgatgttcccctccctgtgtccatgtcttctcattgttcaactcccacttatgagtgaaaacatgcggtgtttggttttctgatcttgtgatagtttgctgagaatgatggtttccagcttcatccatgtccctgcaaaggacatgaactcgtctttcttatggttgcatagtattccatggtatatgtatgtgccacattttcttaatccattctatcattgatggacatttcggttggttccatgtctttgctactgtgaatagtgccgtagtaaacatacgtgtgcatgtgtgtttatcgtagaacgatttataatcctttgagtatatgcccagtaatggaattgctgcttagcctactttttgatgggattgttcatttttttattgctgatttgtttgagttcgttgtacattctggatattagtcgtttgttggatgtttagattgcgaaggttttctcccactctgtgggttttctgtttgctgattgtttattttgctgtacagaagctttttagtttaattaagtcgcatcttttatctttgtttttgttgcattttcttttgggttcttggtcttgaagtctttgcttaagctctttgcctaagactttgtctctatatttaaaaaaatatatgttgcccaggctgctcttgaactcctgaactcaagcaatccccttgctttggcctcccaaagtgctgggattacaggcatgaggcactgtgcctggctgcattattattttaaatccataaaatcacacctttttcagcttaagatcatttctagactgtcctctcactaaaaataccctggaatcaatatacatgttgttagtttgaaaattctttgctaggttgaacagccatattggaaaagtaccaaatccctttagggttttgttattggtaatataaagaggacagagaatgtatttcaaattagttgtcatttcatgaggtgttgcccttcatttcttggcaggtcttaactagaatctagcctcctcttataatagttgaaaatgtgtcatgactaattaatatgatacaatgagagcactgttttctgattaataaggtgggtggaccttatgaaatgttatctgaagatcacgcacgtaatctttgatggctgttattgcgttatattgacttgtgattcctgtgtgttcaacttctagtgtgaatagtaaggccaaaaattcaaaagggcttttgaagttgatttgtaattaaatagcattattaaaataaagagtcaaagcattgtcaagtgtgataaattcagtgtcaaaactgagcctttaaaaccaaaaagcgtggctgggcgtggtggctcacgcatgtaatcccagcattttgggaggcctgggcaggtggatcacttgaggtcaggagttcgagaccagcctggccaacatggtgaaaccctgtctctactaaaaattagccagatgtgatggcatatacctgtagtcccagctacttgggaggctgaggcgggagaactgcttgaacctgggaggtggaggctgcagtgagccgagattgtgctattgcactccagcctgggcgacagagcgagaccctgtctccaaaacaaaacaccaaaaagctcatgcctgttatgctagcactttgggaggccaaggcatgaggattgcttgagcctaggagtttgggaccagcctggacaaaataaggagaccccatcactacaaaaagtaagaaaaaggggctggtcgtggtggttcacacctgtaatcccagcactttgggaagctgagataggtggatcatgaggtcaggaattcgagaacagcctggtcccatggtgaaaccccatctctactaaaaatacaaaaaaattagccaggcatggtggtgtgcgcctgtagtcccagctactttggaggctgatgtgggaggatggcttgagccctaggtgtcaaagctgcagtgatcacactactgcactctagcctgggcaacagagagagagatcctgcttccaataaaacaaaacaaaacgccctcctcaaatcagaaagcattctcaaccatagtacttccaagcaccctatttgtgttagaagtgtttaaggcaatgataaagtcagtaaactatttcaagctgttggaagtgcatctcagcacacgacagttgtgatttcataagcttcttaaggtttcaagtgcacagcattttaccgcagaactattactgtctcaggaatgaggcccatggaacacaggaaaattctccacccagggaggaaggctgggaggcctcagcagccaatagtggtgtgactgagactctggagtcccttcacacttgtgtcgcagcttactacgggtcacctccgtcctaagtgtcttacatttattaatcatatatcctcacagatagggaaactgaggcacacagcagccaaggaactcgtccaaggccaaccaggtagtatatggtggaactggagtgaaggcaggctccacagtccctgttcttaacctttatactccactgcttctaattccttactttcttttatacaagaatataatttaaaatcctgcccaacacttgttttgtaagattctagtggcatgggaagtgaggggttacagttggtgtcagtcatatttcaaatggctgggaataggggtgataacatacacccaaggaagtcacgctggctgctacaacattgtgagaatatcattctgctgagattttacgcttgctggtagttgacataaaatgaagcttagtctattatatacaatgccagctttttccttcatcagttacaaggcttgactttaatgaaaggagaagactgcattttcaagtttgatctagaaggctatgaaggctctggttggaattattgagaaagacaaatctcaggtgatctgaacgtgttaaattgtaagagtacttaatgtgaattggaggaagcaattctctgaagcaaagggggaggaatttgtatcttggaaagaattgcctttgtcttttattatttatgcagttgataattgcaatattgccacttcacatatgaaaatatcattgtagtaaatttatgtagagttggctaacaaagttcccatccatctttgctttagttcaattgccattagtttcccagagtactttctaattcctctaccacagtactcatgctttattttgattttaattgtgttatattttctcttctagttagtcaaataagcgaggtcctggtgcacctctgtcttgtccatcattgaattcctaggcttaccacagtgcctgacgtagagttggtgttggcagctatttgtaggatgaatgaatacatgactgtgttaagcagacatcaaaggcgtataaaattgaaatctagttgttgtaagacttaaaaagagaggagatccttatagatgagtgctggttgtttgcaggatcattattattctctgatgatcaaaaaactgtttacgcatgcaccagtagtcccagctactcaggaggctgaggcgggaggatcccttgagcttgggaggcagaggttgcagtgagctgagatcacgccactgcactccatagagccagaccctgtcttaaaaagaaaagaacggtttacagatcagtgagagaggtgttttcctaaatatttaaatgtttgcttgcccatgctacttttccaaatcctaattgtccttttccccctcaaatgctccttcctttgtgaagccgtccttgattcccttgttggactctgttcaccgtgtctgatttttacctcttctagtgcactgactattcttaccgtgtattgtttttattttttggtacatgtgttgttgtttgttctactagactataaactcttgagtgtgaaaaccatgtctacttaaccagcctgcttccgagagtgaaaagggacgctaatcagataggacaccgagtaatagatgtgttcaaggctgtgcgaggcaaacctgatggctggttactctccagtaatctttagcttattgaaaaagcagaggccacttgcacctgtttacaagcaggtgagatgggcctgagaaggtgattgaattgcagattcaaaacgctggtttgtgtcttagtcttatctctgtcacttcactagtctaatgactgtgggtaatttatttcatcttgaagaccctcattttactgacatgttaagtagtgatgaccatttatttcctgctgtttcttaggccccctcctttttgtgttttgaggaagagaagatataaaaaaacgcccttgagagctgtgaagtgtcatagatactacaatatcgttttagaatcaattgaagactttctaactttgtaaacaaatttgaatctgatgactgaaatgctaatctataaaatggttttttagtaataaagtgagacttaatacagtgcttttaaatagtatgaaataagtaaataaatattgtagtttttgttagtatcattatattccttgttcttttaattcatttttaaacttagaattgtttcctacagataaacaaatgtcagcttgggtccatctactacatcttattgtcactttcacttcattgcatcattgctcttaatcagaataaagggtgaatttagcaggttgtagggtttgagtagtgctaagtattgtgaggaattgtgctcaaggtaattaattataaatcatagtccgggtgcggtggctcatgcctgtaatcccagcactttgggaggccaaggcaggcagatcatgaggtcaggagatagagaccatcctggctaatatggtgaaaccccgtctctacaaaaaaattatcctggcgtggtagcgggctcatgtagtcccagctactcgggaggctgaggcaggaaaacggcacaaacctgggaagcggagcatgcagtgagccgagattgtgccactgcactccagcctgggtgacagagcaagcctccgtctcaaaaaaaaaaaaagaaatcatgatctctgctattttaatattttgctcagtatttgaaataagctttataatgtaggctatagtaaaacacagcaattaagtgcttaaaacaagaatatcccaactgtaggtacagcatactttacctaaactatatgactcttatttctatccagcaatgggatcaaaaacttgatgcatttcagaaaacacgaggttaagcaagacgtgggaggattttgacttgtggtaaattttgaaagaaattgtaaatattttcaaagaaaatagaaaaagcacacaattcagagaatatacaaagccaattaaaaagttgtaaaattattattattattattatttttgagacggagtctccctctgtcgcccaggctggagtgcagtggtgcaacttcagctcactgcaacctccgcctcccgggttcaagcaattctcctgcctcagcctcccgagtagctgggattacaggcgtgtgccaccacacccagctaattttttttgtatttttattagagacggggtttcaccatattggccaggctggtctcgaactcctgaccttgtgatctgcccaccttggcctcccaaagtgctgggattacaggcgtgagccactgcgcccggccgtaaaattaaatttaatatctgatctgacggactaaacaaaagatctcttgcctttcaccagtttaccagctttctgttctttttcactcttagttcactaagtgtgagtggactgtgaggcatgagcaggaaggggtggcattgggcatttacagcaagagaccctcatgctaagtgaagtgttatcaaatcttcatttttttgcttatactgtaaaattgccaattatattcatagttattgtaagttatattccaaagtttaactggaaaaatattattttgcaaccaaaaaggtaccaattaatattcctgttcatgaaacaataaaaagaattgaatcagggagaaatgaaaacagctcattttaaatattcaaatttaaaatgatataaaatagggatataaaataaaagcattttatatgaggtatagaggaaagaaattacaacttcaaaacaaatccttgtgatcagcttccatgaggaggaccttagcaatgtataccaaatttaaatgtgaagcttcttaccttcttcttacctcatcttcttaaaagatacatctaaaagaaaaactaaaatttgtatcgatatgtttaattaaagcattattgttattattatgtaaagcagaaagaaacttctgaaaaatagttgagtgatacatttaagcatttcacctaaggaaatttagtgttatttaaactgattaacagtatttggcaaagtattttcattagcgttctaatattaaagctagcatttccttaaaggagggaggctaaaattcatcccaaagcttgtttttgttaactcaaattttctcagtgttattgctgaacaagttactgaattttctctgggtatcttctatattgcctttctttgattcttgtcagtgcaaccagtctaaggttttacatgataaaggaaatctgtggagctaatcctagaaacctctttctattttcttacctaacacctccaggcacagagaagacaaaatacttcatttgcattcttaaacattaggaactcagaataagtctttcaactggaaatgttattgcatctacatttcccgaagagaaaaaggttaacagcctactcaggtttatgttaactcatctctttttagtatcctgatgtgcacaaagagtgaagaatgtgaggcttacccacccaggctctttcttctttacaatcaatgagactctggaagtggtatcagtgctgattacagggaaataaaaagaaaaaatcaaatatgcacaaaagaaatggaaaacactaacatactttaatcttagtcttctaggaatagaaagaacatttccaaaattaataacgaacatagtaattcaaattttttaaaataaaaagtttcctccataaatttgaaaagcttaccaggaaagtacaaagatattgagatttatagtttgtttgttgaaatggtttttattaaagtaatcaataccaaaaaactcttgtttgttctaagtaccttggtcagaaacccgaaacatttaataaaagaaattgaacaattttttgacttaatgtttgctaaaaagtagaaatggaaatcatttaattgccagatattaaaaacagaaagttttctattgctgtaatactcactccccatcagtgtaggagaaacaaggttttatatttaactataatatattccttaaaatatacttaagtgggaaacttaacttctgccgacagttacagtggggaaagttaccactgttctctttccctaactaaataccgtacatagctatcatctggaagtaatagtattacttcagtgcattgtgccagtagacacttaatacagaatatactttagactaaatgaaatccagatcccagtaatactgaaacagaaagacacaggttcctttggttaaactaagtcatagtgtacagtgtactataaattaaatacagtttgtgagtatgtcattagattttaattgaatttgcaattagcatcccaaacatttaaaaatcgtgtgggtttataagtttttacttttgaattttaaaataatagaacctttacccccttccactacccatctcccatagcaatcacatccatttatgttcttatcctaatgaatcagctaaattgggttttaatttacaatgagctggtaagagttaaagaaaatgactcctataaatgtagtaggtgagaggctgagggcatcctcttctaggttattctgctccttcctacctttgttgatgccccacagtcaatgttggggaaaattaattaggatttatattccagtcttctctaatgtgttgtcaccattgcacagactcaggacttccagtgcagtgttgactagtaccagtgcacatccttacccaggggactggaacttacccaggatcacaaaaatgacactaggaatgtttctcccctctcagcattcaaatgttctccttatcttttatttttatatatttatttttgagacaagattttgctctgttgcccaggctggagtgcagtggtgtgaacatggctcactgcagccttgacctcctgggctcaagcagtcctcctgccctggcctcctgtgtagctgggaccatgcctggttaatttttaaatttttttttgtagaaacagggccccactgtgttgtccaggctgatcttgaactcctgggctttaccttttattattttaatttaattttattttttgagacagagtgtcgctttgtcacccaggctggagcacagtggtgtgatcttggctcactgcaacctctgtctcccaggttcaatagattctcctgcctcagctcctgagttgctaggattacaggagcatgccaccatgcccagctaatttttgtagttttagtagagatggtttcaccctgttggtcaggctgtgatccaggcaccttggcctcccaaagtgctgagattacaggcatgagccactgtgcccagccttatcttttatttttaatgattattgtttaaagtacactgagttcaggttaaaaaccaactgccaaagtaaattttaacacctaaaagctgggagaaggggccattcttcttttatgcagtaactctttggagtccagatactaacatgccccagatttcatcctggtgctaaactgacttgttttccaattaaaaaaaataaaagtctgagtaatattgcgtaggagtaccagaaatggccttgttggaaaccaaaactatttacattcgttaagaaatctgtttgcaggtgtgtctgccacatttacagcacagtgtacagctcctggcactcaatacacagtgttgcacagcttgccgcaggagcataaagtggaggtagtaaaaaggtaaggaagaaagagggaggaggatgagttgttctctattcatttgcttctcatttcatcactgatttggtggtacccagacctttacagagccggtctccataatactggtgcaggtggcctgatgcccagtttctgttgctcagataatgcagtctcatctcgtctgtgatttcagcagcactcatggcaatgggaacattcttcttctttgcaacccaggagtgagattgaatctctgattaaagagcaaagcttgagtgttttggacatggtaatgctgcagaggtgagttcctgttctggctgtccatgtccaaacaagtgaaacaaatgttttcatactttgcagttgccacgttcattcattcattcattcattcattcattcattcattcattcatttttgagacgagtttcgctcttgttgcccaggctggaatgcaatggcatgatcttggctcactgcaacctctgcctgctggctcaagtgattctcctgcctcagccttccgagtagctgggataacaggtgcacaccaccatgcctggctattttttatatttttagtagagacggggtttcaccatgttgaccaggctggtctcaaactcctgacctcaggtaatctgcccgcctcggcctcccaaagtgctgggattacaggagtgagccaccacacccggtctgcagttgccacatttaacctttagtgctaagtaaacatttcaccatggttcactttgtacaaaatgagaatctttactgaagcatcccagccaaacataagaatgtactttacaattttttttttttttttttttaagcctaaagtccctggaagaggctggcaaactggcttgagaaacacttcactgggcatagagctgctgaagctgctcctagtccgtgtgttgatttcactcctataagttggtggctactctgaaatagttttcaaaatttttattgtaaaataaaaggcagttacaggagaactatacaaaagaaacctatggcttaatgaactattatagggcgaactattttgaaatcatgaaataggtccagacgcagatgtttaccctgaatcctggaaagctgtgtgacccatctcagtgctaacctccggcctctctctaaacatacccattcctttggcttttatagtaatcatttttttttgcgtttaaaaataattttattgtccaaatgtgccaccttggacacaatatttaagtcttgtccatttatttttaaatttgataagtctttaaaatcttagtctgtaggctcctcttgcttccttttcttcatgacttatctgttgaagaacttgggtgtttgacttacagagtcttaccccagtcttgacttagctcactgcatggcgatgctatagctcagtggtttcccccattcttggtgtttcctacaaattggcacttgaattcagagatgggatcagacttggatttgatgcctttgatgaagactataggaggcacataatgtctttttagctctttttaagatataagcagactttgatgcttactgcccatatctagtaatttattggattacaaaattttggtagtttaatgctaacatttttttcattagttaattggaatatatttagaaagaaacccttcttctcatttactgttttattaccactggtacaattcatatatgagaagcaagataaatgcttaattctttacctttatttactatttctgaagtaatgattggttccttatcatccctcgaagttagccaattcttttgaagaaatcactatgaagtcatactgttgaaattactgtgaagtcaagttgttcctctttggtccgtggggcttaagttgactcacgggtctttttgacttgacctcataatcttctctagcttccttactatctgatctgacaggacattccaggctcatgttttacattttctgttccaactctttatttttatttatttatttatttatttttgagacagagtctcactctgtcacccaggctggagtgcagtggcgcaatcttggctcactgcaagctctgcctcccgggttcacactgttctcctgcctcagcctcctgagtaggactgctggagcctgccaccatgcctggctaattttgtttttgtatttttagtatagatggggtttcaccatgttagctagaatggtctcgatttcctgacctcgtgatccacccgccttggcctcccaaagtgctgggattacaggcgtgagccacagtgcctggccttctgttcaactctaatcagccatcttttcaaaatgccttggcttcttctaatggtatttggagatcacagttggggtactaggcatggtcattgctactgattggtcattttaagcctttttagttgcaggctaggaaaaaaaatatacatatatattaacaggtttttaacatatacgttttatgttatatatgtatattgcttataatacaatatgttatcttaactatattatattaataaaatatataccatatggcaatatatttactatataaatatgtttaaatataatgccaaccctaacccaaaatagggtatgtatataaaacaaatttatattataataatcatactgtattaataaaatgcacataacatttttctcatatataatgtatataacaatatagaagtataattaaataaagtctacattttatgtgagacaaaacaactcctgtgttcatagcaatattttccattacaattcaaaattgcagaactttaacctctttgttgcctctgtgtatcttcattcttctggattcagaattctgactctcaaggataggggaaatgacagaattagagtatctcacaattgcttatttgtcttgtcctgtgctatacacagagcaatctcaggataacaatgttaataccactaccaatatgattactaaaaacattaaaaatgtatttgtacataatcttcctgtaatattaaaaaaaaagttgtactatatctatattgtcagaaaatgtggctgttatctataaggttttatatatatatctccttagctttcatttagttttagctctacaagtaaatcccgactctttttgttgatatctcttttgtcattttagtttcctgaagctcattctctagtacaggagtgggcaaaccttttctgtaaggagccagaggggaaatatttttggctttgtaggccctatgatctctgctagtactcattcttattcttatagtgagaaagcaatcacagacagtgtaaactatgagcatggtggctacgtttcagtttcatataatttttatgtgtaatgatacagtatttaaaaaaatttttgcctaacccccacccccaataattagtaaaatcttttcttagatcatggactgtacaaaaacaggcagtgaggctaggtgtggtggctgtcacctgtaatccctgcattttgagaggctgaggtgggcggatcatctgaagtaggagtttgagaccagcctgaccaacatggtgaaaccccgtccctactaaaaatacaaaattagctgggcgtggtggtgcatgcctgtaatcccagctacttgggaggctgaggcaggagaatcgcttgaacccgggagctggaggttgcagtgagctgagattgcaccattgcactccagcctgggcaacaagactgaaactgcgtctcaaaaaaaaaaaaaaaaaaaaaaaaaaaaaaaccaaaagcagggagtgaatgggccagatttggcctacacactagtttgcaaacctctgttgtattggacttctcagagtttatgagttcttgcatgttgttaaattttctctgcctttcatagttgcactgacttctatggatttaaaattcttagcttgactcagcctggtggctcatgcctgcaatcccaacactttgggagactgaggcaggaggatcacttgaggccaggagtttgagaccatcataggcaacatagcaagactccatctctacccaaaaaaaaaaaaaaaaaaaactgggcacagcagtacacatctgtaggcctagctacttgggaggtcaagatgggaggatcacttgagcccaggagtttgaggctgcagtgaactataatggcacccctgcactccaggctgggtaacagagcaagaccctgttccacgaaaagaacataaaattattagctcatactttctttccttgaatttcttactcaaaagagtttattattccattttcttttggtataaaatgttgctgtcaaagtctgatgattatttaaatttctcttttgtataagttacctattcctgtttttttttttttcattttcttttacttaagtaatattgctagaatttttcttggtatgttggtcatcctggaatgaatttctcctgtagtgtggtcttttaatatgtatttttagttcaagtaaattttcttgagttgtatttttaatatttgctcttttttttgctttggttctcttcaaggattcctattattcatatgttggatgttcttttttattttcaatatttctcatcttctgtattatttattcattttttatatttaaattaaatatttttattttcaatttgtctttctcataaggcattgtctgttttccttattcactcttacattctttgtagctgttttcatttctggaatgattttctttttcatttctagttgtatcctgagttctgtcatctcatttctgagcttttctaaatctgatttatactattttatgttatgtgtcacttaaaaatgtcttttaacttgttttgaaatattagatgataggccaggtgcggtggctcacgcttgtaatcccagcactttgggaggccaaggtaggcggatcacgagatcaggagttcgataccagcttggccaacataatgaaactccgtctctactaaaaatacaaaaaaaattagccgggcgtggtggtgcgcgtctgtagtcccagctacttgggaggctgaggcaggagaattgcttgaacctgggaggtggaggttgcagtgagctgaggtcgcgccactgcactccagcctgggtgacagagtgagactccgtctcaaaaaaaaaaaaaaaaagaaatgagatgatagttttgatctattgtattggtatgtttttctcctgtgctttcctgccctacatggatgttactctggtccctttttctttgccttataaaaacattgtattggggccaggcatggtggctcacgcctttaatcccagaactttgggaggccgaggcgggtggatcacttgaggtcaggatttcgagaccagctcggccaacatggtgaaaccctgtctctactaaaaatataaaaccatattagcccggcatggtggggggtgcctgtagtcccagctacttggaggctgaggcaggagaattgcttgaacccaagaggcggagattgcaatgagccaggattgcaccgctgcactccggagtgagacttcgtatcaagacaaaaaacaaaaaaaattatgttggattttaccttgatattttatttcacttagtttaatgtgtaaaattggtttttctctacatttctttttaaagagccatgtattttaaaatcagtgactcatgtccaagaagttcaaacacgagtagagatagcaggaagtggtttattctgaggtcttgaaaagaatgaattaaccctgtaatctccccagtattctttttgatgttcctattgacatcactatattcagtgggtgctcctttctatctgctacattagtttttgaaagctttctttctgactcagtttatctcatgtgctaacttcctgaaccaatcctggaactggccttttctaccagaaacactcttttcttttatcatggaatagtattaaaaaccacaatctggatcttttggacagttcagctgtttttccgtggcttttttttttttttcgagacagggtcttgctctgtcatccaggctggagtgcagcggtgcagtctcggctcactgcagcctctacccgctgggctcaagcaatcctcctacctcagcttcctgagtagctgggaccacatgggaccacaggtatacaccaccatgcctggctaatttttatattttttgtagagaaaagtttttgccatgttgctcagcctggtttcaaactcctgagctcgtgcagctcacctgcctcggcctcccaaagtgctgagattacaggcgtgacccactgtgcccagccccatggctgtctttttcttctgaccctggttttgtagttatccaagtagcaactcttggtaagcctaaaatctatacgctttaaaatctgaattcataatatagcaatttactaacttgtggtatttctaagaatgaaatatgtatcatacattttaatttttacaatgattctttctgtccttcattcctgacataaagcctatggtaaattaaatctcatttccttaacatactgctcaaacccaaccctttcccccattcttctattaaaatttgtccagaaccatagagtcacagaatttaggaaatgagtagaattttggagcagtgatttcagcttttcataatttctttctcttcttttgtcttgctgtgttgcccatgctgaagtgtagtggctagtcataggtgccatcatagcgcacaacagctttgaacagtatctgggctcaagagatactcctggctcagccttccaagtacctgggactacaggcacacttggctcataattttttttttttaaatgaatcactttaatgatgaaaaatgcccactttttgtgatcataagacatttacttgtattcagatattatatgtatcatgcaaggtaaatttaaaaggaccttaaaaagcatatttttggaaacaaatttagttgctattgcataacaaaaaacttacagtgattaagggaaactgataattagatggataacaaaaaataccgggttaacagaagagtatcgaaggttactagtggataaaatctggccttttattctaagtcacaccgctgcctggtcaagaactgaaaacatttgaaacatgctccatcacactgcagttaccatactctcttatcctgacctcatcctttttggttacagatttatgggagccaagagcctctaatgttgctttctcattttgctttaattacttttaaaggccaatctagggagcacttccaaaacacattgataaaaaggaagttaagtctttgaaacatttgtagttatccagcatactactggctatttttcttttgtattgggtgggacaaaaaatagtcactaaatacttgatataagcttttttttttttttttttgacaattttacatttttgggtgagtaattttcctcaaattagaatgcacaagaaaaatctggttaatcagtgttccaggtcgttgggctcctgttaatcagaagttttactgtataatcataatgtattttggatgttctcatttatgttatttcttcaattctttgtgtgggtactctgattgcttgattacatctgcctggcatagtcgtttttaaagcagcatttataataaaattttccatctttgcaagtaaaatgagaatatggaaagacaattgatggttgaagcatgattgtttcctcttgtctttacttagtgtttagtgggtttcaggttttggataaagagaaatgaatatgattattgtcctggtccgaaatgattcatgtatccacctggagacgtagagttgatagaggtgtaggcttacctctattatctcctcatacagagcagcgctacttcctacgtatgtgctttacatttttggggatttgcataagattttttttttccatgaaaataaggttctactaaaaccaaatacagaaacatttgatagagagatactttataagcacctcttagggctgaaagggtttcttgtctagcatcctgccacttgtaacaccagcaaattctaggcatttgggttcctataatattattttagagtcctgtggacctagctatcttattattctagtgtcctcttttttttctggagacagagtctcactctgttgcccaggctggagtgcagtggtgcaatcttggctcactgcaaactctacctcccaggttcaagcaattctcctgcctcaacctccagagtagttgggattacaggcgtgcaccaccatgcctagctgatttttgtatttttagtagaggccactatgttggtcaggctggtctcaaactcctgacctcaggtgatctgcctgccttggcctcccaaagtgctgggattacaggtgtgagccactgtgcccggccattctaatgtcttctttttatcaagacttctggagagtggacaaaaactaacagttgtggcactcaacttggtgctttatattattattgatggggtttaggacatgctactcccaaatttggcaccttggcatataagctgaaggatttggagaaaacagcagaagcacgaaggtctctgaccttccccttcctctcttccctgaagcaggtcctaagacctaggagggactttctgaccttctctgaaccagatcctaagaccttcatgtgagagatgcccttcctgtatctggaagagaggagcatcctcatccccatagagaaaaggacgcagagtaatctgagtagtttcccccagtttatgatacttacctcttgctctccgtgctatcatttctccataactcaccagtcctcatcaaccctgtataaaaacactcaagtttaactgtttctttggattttcatttccttatgcaggctccggtgtcacgtacaacttacaattaagtaaatgtgtatgcttgtttttttggtaaactatcttttgtaataggtgccctagccataaacttagaagggtagaaggaaaataatagttttcctcctgtacattattttatttaattctttaatcaaacttaaaagtcagatattatccacattgtcactcaaagaaatgggtgctttagactcagggtctaaaatttcccttttcttttgttttgcttttgggtaggagagaagcatacctcttgaatttaaagacattggcttttctactcattttctctgaatgatttcattcacaacttttatttttgtatttatttttttgagatggagtctcgctctgtcgccaggctggagtgtagtggctccatctcggctcactgcaacctctgactcctgggttcaagcagttctcccacctcagcctcccaagtagctgggattacaggcgcatgccaccacgcccagctaatttttggtagttttagtagagacgggctttcactgtgttggtcaggatggtctcgatctcctgacctcaagatctgccctcctcggcctcccaaagtgctgggagtacaggtatgagccaccacacccggactgccattcacagcttttaattccgtcctgtatttgatgcctttaaaaatctgtattttggccaggcgtggtggctcatgcctgtaatcctagcactttgggaggcggaggctggtggatcatgagattaagaggtcgagatcatcctggccaatatggtgaaaccccatctctactaaaaatacaaaaattagctgggcgtggtggcgcgctcctgtagtcccagctactcgggaggctgaggcaggagaatcgcttgaacccgggagacggaggttgcagtgagccaagattgtgccattgcactccagcctggtgacagagtgagactctgtctcaaaaaagaaaaaatctgtgtttcagcctggacttgtctaataacccctatacctctatatctgcctcctgaacatgaatacttgactattgcagaggcctgtcagctcagcgtgtgcaaagttggagtcatcatctcgcctcttaaatatttatctccttgtatattctttgtgtttattccttgttctacttctacttcctgctcggggtgggtttaatcctcttggtcatgatggccaggagagcagtccaagcaacaggctactcagctgccctggtcaccaggagaatgaaccttttttcccaagtcaagattctttgcaggcagcaacgctaacatggaatgaacaggtgatgtaaaagtgatatacaaatatgcagtttattgtttataccaactctgacaaggtcgtaggacaatcagcagttaggcgccttcctcgaggaaggcctgcatataggtctggtttttcccattttatatttaccttcagttctttatgtaatgacttcatcctttatctcagcaaatacccccattacttttctagaccatgccctgtggtggagctaatggcatcatattttgttctgtctctagatctatttaagtcactagcttttttttttaaattagagtggcataaacaagagaggtagatccattgtcaaggtattcagtgtggtttgtgcagagtggttttgattgaaactgaactctacccagttaaattcccactggatttttgactcatcttttatagtcacaggatgcaaacatgtactttcttttgtctatttctctgaggtgtcagtgatctgttcacgtttcctggaaattgttgatatcctgttgtcttcatccatgttatctcctgtgtttagctcagagcctggcacagaattggtattcaggaaatatggatatttgtgttatactaggcattatgctgcaggctattgagaacacagagatttataaggtgtttacgggtgaccttactggctagattaggtggtgtaggacgttatatacaaatacagtgtcatagagtgacttttccgaggcacactgtttacccagaaggagttcttcagtgcttttggttgttttcatttgactttgttgcatgcatctatccacacatgtactatatgcaatatagtattttaatgtgttggctcaaaaactgttgtttctgcaataaaaataattagaaaatacacatatgggcttttcttttataaaattgtgactccacatcatgctccgtaatgttcttgttataaattttgacttgtttttctccacaggcagcagaagatgtcgttttcattggacctgacacacatgctattcaagccatgggcgacaagattgaaagcaaattattagctaagaaagcagaggttaatacaatccctggctttgatggagtagtcaaggtgagaagctactttaacttttattgtatatgtcttcaagttaaacattttgtcaaaagtataagataaaatgtaactattgcttttttgggatatacacacacacacacacatatgcacgcacatacatacatgtatatatgtttaaaaaatcagtgtttttacatttatttatttatttatttgagatggagtcttgctcttgtcgcccaggctggagtgcaatgatgcaatctcggttcactgcaacctctgcctcctgggttcaagcgattctcctgcctcagcctcccgagtagctgggattgcaggtgcctgccaccatgcccagctaatttttgtatttttagtagagacagggtttcaccatgttggccaggctggtctcgaactcctgaccccaggtgatctgcctgcttcatcctcccaaggtgctgggattacaggcgtgagtcactgcatccggccagaaatcagtgtttttaactggattattttattatttttagagatggaggtctcactctgttgcccaggctggagtgcagtggtgcagtcatagctcactgtaaccttgaactcttaggctcaaatgatcctctcgccatgactcaagaatccctccttctttagcctcccaagtagctaggactgcagacacacaccaccacacctgactaattatttttattttgtagagatgagggtctcaccgtgttgcccaggctggtctcaaactcctgggctgaagtgattctcccgccttggccttcccaagtgttgggattacagatgtgaaccattgtgcctggccaacttggattgttttaaatagcataagttaaaaagagtgagaaactgtttgagcattgtatttaatgaatcagcagtgactcagactttcataggaaaaaatttggtgattaaaaaatgtactgtcagatctctggactgcatttaatagtggtatgtgtttcatgtgttaaacattaagagtttctctgtatatctttatcttgagcttctctccatgtgcataatatgtaagttaggatcatgtttctggtgaaagtggtatagctataggtaattgtatattgcaaacatttagcaagggccttctgcagctgaaggcttctgagggagaaatgcagaaattgaagtatgcaacttctccttttcccatgagaaattattctgtttttttctagttagaagagagtcctcatgtagagttttaaccttgcgatttgacttagcctgcaggaactcttcatttcagcatttcgtattgttacttttggcattctgtgttgggttgttcttcattgtgcaagatcatttcatgcattagaggacgattagaaaacttgccccctagttaataaatatcctcagcttcttgcccatatttacctgcatttacttttatctatgtgtatccatgttgtttcttcccacttgttacaaggaagaggtgttccacatcctctggaaagccagttcctcctcctacgctccaaatgtattctttatagccttcacaggctatggttttactgattatcttttctctcttctgtgtcttaaaattctcctcatcttttagctccttttgttatcattgctattaaaaatgctcagtgaacaaatgtgttggtcactcagttatgtgggaaggatgtggtgatgagatacacatgatctgcgtatcatagttctcacagtttagtgggaaagaaacaaacatttcttccattcgtaaagcaccatcacccctatcactctacagctagttgccaccttctttctctcttcccctttcagtgccaaagctcttagaattgtccttcctcactttcatttctgtatctttcacttaatcttttcttgccgtctagcttctttcctcattcctactgaatttctcttgcaaagctaccagcaacctcttccctttgttaaatcaatatgtaattttgaattctgatcttatatcaatctttgagcaacatttgagtctcttggtcagtccatacttctctcatgagatactcacttttggcacattactcagttctagtttttgtgttttttggcttttttgaatgccattcttagattccttcccgattgttcttcctatctttgttccttaaatgggggttttattctgggtcctgagtaggacatttcctctttttattgtgctaacttgccctgggcaatcttactttttttcatggcgtcaattgccaccttttcttttttcttttactattattattattttttgagacaaggtcttgttctatcacccaggctagagtgcagtggcatagtcatggctcactgcaacgtcaacctcgtgggctcaagtgctcctcccacgtcagcttcttgaataggtgagactataggtgtgtgccaccacagctgcctacttttttatattttgtagagacgggggtctcactattttgcctagactggtctcaaattcctgggctcaagcagtccttcccctcggcctcccaaagtgctgggattacaggcatgagccactacacttggcctattgccacttttctgaccaatctcaaatgtatgtatctgttctgaacttcaggattacatatccagttgcttcttatatagctctcactacttgatgcctctgaggcaccttgaaactaacaattaaaagctgaactcatctttctcctgaaactagagattggtactatagcccatgcacacctatttttataaataaaggtttattggagggcaaccatgttcatccctttacatattgtctgtggttgcttttccactacagtggtagagctgagtagtagactcaatatgtggagtagactcaactacatgggacacatagtagactatgtgactcacaaagcctaaaatatttacttcctgatccattaagaaaaagtttgcctatccctgctctaaaattcttatccttcattcttttccgcctaggaaggtggtggctagaaacatagagtaattcttaacaaatgcgactgtggagaattcactcagatagctttctaatccatttacttctttctttgcccgtactaaccaaccccagattccagctactatcatctagtctggattacttcatctgccttctaattagtctccttgtagtcattcttgcttccatccaattaattttttaaaaattcttcacctcaagtatttataatgtctttgtgttacaaacagtctaatatacttttagttatttaaaaatgtacaataaattattgttgactgtaatcactttgttgtgctgtcgaatactagatcttacccattctatctaactggacccatttttgtacccattaaccatccccacatcacccacccccactcctccccactacccttcccagcctctggcaatcatcattctactctctatcactgtgagttcaactatgttaatttttagctcccacagatgagtgagaacatgtcaaatttgtctttctatgtctgacttagttcatttaacataatgtcctccagttccatctatgttgttgcaagtgacaggacctcattctttttggtggctgaatagtactccattgtatatatgtaccacattttaaaaatccattcgtctgttgatggacatttaggttgcttccaaatgttggctattgtggatagtgttgtggtaaacatggtagtgtagatatctctttgatagactgctttcctttcttttgggtatatacctagcagtgggattgctggatcatatggcagctctatttttagtgttttgaggaacctctatactgttctccacagtggctttactaatttgcattccccccaacactatacaagagttcccttttctctatatcctcgccagcatttgttattgcctgtcttttggataaaagccaatttaactggggtgagatgatctctcattgtattgcatttctctgatgatcagtgatgttgagcacctttttatatgcctgtttaacatttgtatgtcttcttttgagaaatgtctattcagatcttttgcccatttaaaaaattggattattagattttttttcttgttgagttgtttgagctccttatatattctggttattaatctcttgtcagatggatagtttgcaaatattttgctcccattccatgagttgtctcttgactgttgatttccttggctgtgtggaagctttttaacttgatgtgaccccatttatttatttttgctttgcttgcctgggcttgtggggaattactcaagaaatttttgcccagaccagcatcttacagagtttttgcaatgttttcttttggtagtttcataatttgaggttttaggtttaaattttcaatccattttgatttgatttttgtatatggcaagagataagggtctagttttgttcttctgcatctggttatccggttctccgagcaccatttattgaagagaccgtcctttccctaaggtatattcttggcacctttgtcaagtgaattcactatagatatatggatttatttctgggttctctattctgttctattggtctatgccagtactatgctgttttgattgctatagctctgtagtataattttaagtcaagtagtgtgattcctccagttttgttcattttcctcaggatagctttgcctatcctgggtcttttgtggttctatataaattttaggatttttttttctatttctgtgaagattgtcattggtattttgataaggattatattgaatcggtagattgctttaggtagtatggacattttaacaatattgattcttccaacccatgaatgtagaatctctttgcatcttttgtgtccttttcaatttctcgcatcaacgttttatagttgtttttttgtgtgtgtgtgtgtgtgtttttttttttagatggaacctcgctctgttgccaggctggagtgcagtggtgcaatctcggctcactgcaacctctgcctcccgggttcaagcgattctcctgcctccggctccctggtatctgggactataggcatgcaccaccacgcccaactaatttttgctttgtttttagtagagacggggttttaccatgttggccatgatggtcttgatctcctgaccttgtgatccacccacctctgcctcccaaagtgctgggattacaggcatgagccactgaacctggcctatagttttcattgtagagacctttcacttctttggttaagtttattcctaggtattttattttattttattttattcatagctattgtaaatgggattattttcttgatatcgtcttcactgttggcatataggaattcccatccattaattaatgatacttcagtttgagtgaccaaaaatccagatttgatcgtatgcctatctttaataacttttgaatgactactcatataaatgttttaaatggttggattttgcttagctctccaaactgatactgtgccagtctatcctttgcattgtatgtatccgccatacttgacatcgttcagattcttgaaacttatgtgcttagtcatatctgcttctgtcttcattcctgattgtctcttagtcattgtttaggtcttggcttaaatgtaaattcctcacataggcattccttaactgtcttcattagattaggctctctgctgtatttttccttaggaccctacacttaactcatcacattttaaatcatttattcattcatctattcagtagatatttaccaagtgcacgcaatttgtctgacactgtttgaagtgctgttgatatagtagtgaacaaaagagactgaacatatttttatgccctcaaggagcttacactatagaaggaaacagatgataaataataaaacatatgttctatgttgaaacataagagaaaaagactgctggaaggtggggctatattcacaattttatatacaggcatgtcttcatatctacaagggattggttccaagacctaccccctcagataccaaaatttgttgatgctcaagtgccttatatgaaatggggtagtgtttgcatatatcctacgctcatccttctgtatactttattttattttttatttttatatatttatttttttgaggtggagtctcactttattgcccaggctagagtgcagtgtcatgatctcggctcactgtaacctccgtccaccctgggttcaagcaattctcccacctcagcctctcaagtagctgggattacaggcatgcaccaccatgcccagctgttttttgtatttttagtagagatgaagtttcaccacgttggccaggctggtcttgaactcctgacctcaagtgattcacctgccttggcctcccaagtgctgggattgcaggtgtgagccactgtgcgcagccctgccgtatactttaaatcatctctagattacttataataccctaaaacaatgtaaatgctatgtaaatagttgtcccactgtgttttaaaatatgcagtattttaattttcctccctttcccttccccttcccctccccttccccttcccctctccttcccctttcccttccccttcccttttttgggtttaatccatggatacagaacccaaggatatagagggccaagtgcatgtttagcagaccatctaaggaagtggcaggacaagtcatgttgctatcctggagaagagcaaagcatattaggcagaaagaataacaagcgcaagattgttggttgaggttgaagtgtacctgctactgaataaacaccgaggaagcatgtgattggaatcatcgagagagacaatttagagataaggtaaaaaaagataatggtgtagtagggagcttagatttttagggccttacaggccatttcagtattaggtaaatgtctccttcctacacggagcgtaagcttctgatggcagggatgctgctctctttattactgtatcacatgcacatggtgcctgacatattgtcagtgcttaagtcaatgctcagtcagtgctcactaggtatttgttgaatgaataatattctaggagataaattttatacatatactcattttatatacgttgccatttagtacatattgtttagtcacatctattagaggcaccaaaagaaaccaaaaaccaagagaaaaaattaaaagacaatagaaacatatccacatatgcttcagatattggaattggctgagataactacgatttatatgctaaagaaatccaaggaaaatatggagaaaatagataagtatataaagaatttcatccgggtatggtggctcatgcctgtaatcccagcactttgggaggccgaggtgggcggatcacctgaggtcaggagttcaagatcagcctgatcaacatggcgaaaccccgtctctactgaaaatacaaaaaatatttgagtgttgtggcaggtgcctgtaatcccagctactcgggaggctgaggcctgagaatcccttgaacctgggaggtggaggttgcagtgagccgagatcacgccattgcactccagcctgggcaacaagagcggaactctgtctaaaaaaaacaagaatttcacaagagaatttgaatctattttaaaaattaaatacaagactgggtgcagtggcttacgcctgtaatcccagcactttgggaggccgaggtgggtggatcatgaggtcaggagttcgagaccagcctggccagcatgatgaaaccccgtctctactaaaaatagaaaaattagctgggcgtggtggtgcgcacctgtaatcccagccactcgggaggctgagtaggagaatcgctggaccacaggaggtggagcttgcagtgagccgagatcatgccactgcaccccagcctgggtgacagagcgagactccatctcaaaaaaaaaaaaattaaatagaaattctgtaactgcaaatatatgaaaataaggactttagatagacttaacattggactcaaccaagcaaaatatagtatccatgttatagcatgtatcagtttttgtgtgtgtgtgtgtgtggctgagtgatattcagttgtatgaatatgcttcttaaaaaaatccacctgaggtcaggagttcaagaccagcctggccaacatggtgaaaccctgtctctactaaaaatacaaaaaaattagttgggcgtggtggcaggcacctgtaatgtcagctacttgggaggctgaggcaggagaatcgctagaaccctgggggcggaggttttttgtgtgtgtgtggctgagtgatattcaattgtatgaatataccacttaaaaaaatccatctgaggtcaggagttcaagaccagcctggccagcatggtgaaatcccgactctactaaaaatagaaaaaaataagctgggcgtggtggcaggccctgtaatgtcagctactcgggaggctgaggcaggagaatcactagaaccctgggggaggaggttgcagtgagctgagatggcaccactgcactccagcctgggcaacagagtaagactctgtctaaaaaaaaaaaaaaatccattcattagttgaaagacatttgggttacattttgaccattgcaattagtattgctacaaatatttgtatgcaagtatttgcttatatatttgtttgttttgagatggtatttcactcttgttgcccaggctggagtgcagtggcgtgatcttgactcactgcaacctctgctgagttcaagtgattctcctgcctcagtctcccaagtagctgggattacaggcacccaccaccatgtctggctatgggttgtttttttttttttttgtatttagcagagacgggttttcaccatgttagactggtcttgaactcctgacctcaggttatccacccgccttggcctcccaaagtgctgggattacaggcgcgtgccactgcgcccagccatatgtctgttttttaagttatttggggtatgtacccaagagtggaattcctgggtcatgtggtaattctttgttcagctttttgaggaactgtcaggcatccaaacctttatgtactcccttcctcttgtataatccactcctcttcaatttgggtagaacctgtgaattgcttctctaactaatagaatatggcaaaggtgatgtgatattactcccttaattaggttgcattatatggcaaaagtgatgggatgtcactgcattcaattacattatgtggcaaagtggttgggtgtcactcttgtgattatgtttcattatatagtacttgatcttaacagactagagaacaagattctttttgctggcttgataaagtaagcagccatattaaggaagcctacttggcagtgaatggtgggcagattctaaggatctatgtaaggacagtctctacccaagagctagcaaaaggctggggtccttcatcatgcagctacaaggacataattctgccaactacctgaaagagcttggcagcaaatttctccccatttgagtctccagtgacaatgcagcctggttcactccctgattgcagccttgcaaacccctgagcagtgtatgatgaaattattattattatttccttatgaggtcttgtcctctttacctttttgttttagacatttgtgtgaatttgggtaggggtttggatgtgtcattatgaaccttgatctactcagcctgaatatttctaccagtataattatatatttttttgatgaggaatgttgcctttttgatatcttcaatttggacttgatttattcccaagaatactgatgtgtcactgtccaaattatttctggcttgatgatgaatggtggagtcctcaagggttcaaggaagagaccatcaggagagtgtttgatctggaaattctgtttacacgggagatttttccttatgaaattagtgaatgtagtgtctcctaggaagggaatgtttcttggctaaaggtccaaaggtgaccgttgtgtgctgggacatgggaaatgtgacgggtattatccatatctgtcaactgagtagtttgttgattccgagggagagcttgtggaacaatggcaggaattaaggtaaatatactgccacccatatcaataaaatttttacttgtttctccgctaataattagtgaaaattcgtcttgtgagttgaagagtaaaaggagaaatgggtacttgatttgctgttagaacatttgcctactatcattttttcccaattctcttgaataaaacagaacaattatttttccattgtaatttcttcttacaatctctgcaggtttctttatcaaaagactggtgtttaatttttggagtgggagcatctagttttatcttcaagggtatcatcttattctgggtcttatactgcctttgttttcaggctcttttgaaatgtgtaatatggagttacattgtttgacaatgtggtgccttcccagccagtttttgcttgtttataacattttctttttctggcttaaggctgttcacaagaagtgaggaaggagctggggtcacaactacttgagggcttactcctgaatgctaactgaaggtagtaagagcccaccctggaagtctgcaaggggcttatccttcgtctgctagaacaactgaattagagttacctgttttcacaggaaagattttggtaatagccttcaaaagaccgtgtccaatatttacagtttcttttttttgtttttgttttttttgagacaagagtctctttctgtcacccaggctggagtgcagtggcgcaatcttggctaactgcaacctccacctcccgggttgaagcagttctcctgcctcagcctcccaagtagctgggaccacatgtctgagccaccatgcctgactaatttttttttttttttttttggtatttctagtagagactgggtttcaccatgttggccgggtcttgaactccttacttcaagtgatccacctgcctcggcctcccaaagtgttgggattacaggcatgtgccaccgcgccccgtcattcacagtttttctaaaccccactggctttctgtgcatttggggtctgaagtcactctcaggatatttgtttcccctttctaataggtcttcctatttccctctccttgctccccactttgtaactatccttggtgaaatgatgccatttataaagagaagaccatgaatttgcattacatatttaatgcatttaaagaaacagaagtctgactctgagagaccacagacttagtctgagccaaactcatgggagtctcctaatggcatattgaatatgttgtttgtgcacctcctgtcttgggctcacagcctaatggttggccatctctaactgcaaacctgacagtgccttgttggtttaagatttggagagactgtctctcctaggcccagacttccatggacaaagcaagtcaagacagaggaaaatactcaaggttcccaggtaaattgtgttctatttggatgatgatctgatgaaaccttctgaactcactggcttctagagtcagcatgaaaatgggcttatgaaacctatgcctgtcttctttcaggtgaactttgacttatggacttagaataaaaaatgttgaggacagtatattagtaatatgggaggtttcttccaatattaaacattttcaaatgtgataagaaattcagtgggtctttattcctacagttgttgaaaaggaaattggacctctacccagtgtgactcatctcaccattgtggttggggagacccctgagggggtcgctcagtgggcctcagagaagcatgcagatgccagatctaagatcttgaactgtggcttttagtgggcttcgaacatgtgtctgtgggtaatacacttggttttgcttgttcaacaggttattttggttatcttcttaggaggctgcatctgaatttgcagcctctgttctagtaaatttggaaaatatggaaaggtagacaggagaaaagaaatctcatcttttcagtttttttccttgtatgcattagatgatttgtaacatcctattacactctcaaatgattgattctcattatctgcactaacgactatttctgaatttgtgacgccacagctgaacctgcaggttatagtttccagataagcatttacaaataatttttaaggaatgtccttttgtttccctgggaaatttttttttttttttttttttgagacggagtctcaccctggagtgcagtggtgcgatctcagctcactgcaacctctgcatcccgggttcaagcaattctcctgcctcagcctcccgagtaattgggattacagacatgaaccaccatgtccagctaattttgcatttttagtagagacagggtttcgccatattggccaggctggtctcaaactcctgacctcaagtgatccacctgccttggctccccaaagtgctaggattataggtgtccaggtgtgagccactgcgcctggtggaaataattttttttgagacagagtctcactctgttgcccagactggagtacagtggcacaatctggactcactccatccccgccccctgggttcaagcgattctcctgcctcagcctccggagtagctgggattacagatatgcgccaccatgcctggctaatttttgtatttttagtaattagtaattttttagtaatttttgtatttttagtagagatgaggtttcaccatgttggccaggctggttttgaactcctgagcttgggtgatccgccctcctcagcctcccaaagtgttgggattagaggtgtgagccaccgtgcctgactggaaataatttttaatactagttttatttttagtttgtttttatttctgatacaagaggctgtacatatttttcttttaaatttggctattaatttaggtttctggtatagtgactccacattcacttggagctacaccattcacatttactagtttagatatattgagtataagattacttttgagagtatctatgcagatagaagtttgctgatggaaataaatagtaccgaattttggaatatcttgggtttttagcaacagtttttcattggcagagtgcatatgccaattacaggtaattctgtcttttaaaaaatgtttagtgttctttaaaattagtctacagtgtttttaagactaaagtcttttccttgataactatattctattttttttccccaagtagtttccaccagttatgatacaattttagtttgttacatttctccttcaaacatttgttcctttcttatttgaatatgtaggatgttacatggagacagtttacccatacccctttaaagcattgtgtgcagtacttcagtggtcttctgcaactcttctttttaatggcttattaatctgtccttgaatcatccttttccttagagagaaactaatgttttaaaatgtaattatcaagtaatcgtttggtatcaagtatttgcctttaacaaatttaattttattcaacatttcattaccttgatctcaggaactggagagcagagtgaaaggcatgcacattaagatattggagacaggaattgggatcacagcttttttttttttaaatcaatgaataacatgccacagatcctgctttcaaagagcttaaagccttctgtgtccggaattggtgggttcttggtctcactgacttcaagaatgaagccgcggaccctcgcggtgagtgttacagctcttaaggtggcgcgtctggagtttgttccttctgatgttgggatgtgttcggagtttcttccttctggtgggttcgtggtcttgctggctcaggagtgaagctgcagacctttgcagtgagcattacagctcttaaggtggcacgtctggagttgttcgttcctcccggtgggcttgtggtctcgctggcttcagcagtgaagctccagaccttcgcggtgagcgttatagctcataaaggcagagtggacccaaagagtgagcagcagcaagatttattgcaaagaactaaagaacaaagcttccacagtgtggaaggggacccgagcgtgttgccactgctggctcgggcagcctgcttttattctcttatccggccccacccacatcctgctgattggtagagcctggtggtctgttttgacagggcactgattggtgcgtttataatccctgagctagacacaaaggttctccacatccccaccagattagctagatacagagtgtcaacacaaaggttctccaagtccccaccagagtagctagatacagagtgtcgattggtgcattcacaaaccctgagctagacacagggtgctgattggtgtatttacaatccctgagctagacataaaggttctccatgtcctcaccagactcaggagcccagctggcttcacccagtggatcccgcaccggggctgcaggtggagctgcctgccagtcccgcgccgtgcgcccgcactcctcagcccttgggtggtcgatgggactgggcaccgtggagcagggggcggcgcacatcagggaggctctggccccacaggagcccagggagggggtgggaggctcaggcatggcgggctgcaggtcccgagccctgcccggcgggaaggcagctaaggctgggcgagaaatcgagcgcagtgctggtgggctggcactgctgggtaacccagtacaccctctgcagctgctggccagggtgctaagtccctcattgcccggggccggcagggccagccggctgctccgagtgcggggcctgccaagcccacgcccacccggaactccagctggcccgcaagcgcagctagcagccctggttcccgctggcgcctctccctccacacctccgtggaagctgagggagctggctctggccttggccagcccagaaaggggctcccacagtgcaggggtgggctgatcaggtccctcaagtgctgccaaagtgggagcgccaagagcgagcgagggctgtgaggactgccagcacgctgtcacctctcacttcttcaggaggactgcaagtattcaggcaattgactacattttgataatgctaagctcaaggcgcaggggcctatgcatataggatgggcatgtaacctagttttaggtatcattgcagattttccaatggaaatgatagctaagtgaaacctcaagtctgagtggtagtgagttagctgaaaagtgagattgatgatggacacagctctaatgtcagtgaaaacatcttattgcaaaagcctggaggtgagagacagtgagaactctggaaaactgcagatttgtagtatgaggggctgcagttagaaagggagctagagagaaaattaggatccagatatgtatgggctggaatgtgatgtaacttattttgaaggctattcttgtggtttggggagcctctgaataatttcatgcagaagagttaacatgacagaattgtggcattagaaaactcattttggtttgttgtgtggaaagtaaattggagcatggcaaaacttgaagttggtagacaaattaggatcctcttctaatccaggatagaaacggtagacccctaaaataaagtattgtatgcaacaaagtagatggtgttgagaaagatagtggaagtggaatccatgggattatgtgatctgttcaatgtcaggtgtgaagtggagggaaggatcattgatgattattttactgcatttggttgtaatacctattaacacaccagtttcagaagaaatttatttaatgtcctttagttctaattgttcgttaagaggaaatagtaatacccgtttacaccacagaacagagtatggccgtgtatttgaatgagttttgtaaattaggcagtgtagatttaaagtagtaattgtttttatcacctaattggccagactttaaaaactgtactcttgctttagcagaaggaggcaaataactaagaaagctagtgtgaaggaaatcatttaaaaaagaccctaaaaacaaaaaccaaaaaattggagacaagctgtgtctcagcaattagaaagtataacattaaacattagtgtatttgtccctgctaaaccaagaataatcagttttcctgatgaagcctcaaaggttttatattttggaaaaaaagactcaattatttttactatgctgtttttacaatgatagaaaagtgtactaaattttagaaagcttttttttttctttgagacgaagagtgtcgctcagtcacccaggctggagtgcagtggcgcgatcttggctcactgaaaagcaccaccttccggtttcaagtgattcttgtgcctcagcctctcaagtagctgagtttacaggtgtgggctgccacacctggctaacttttgtgtttttagtagagatagggttttgccatgttgcccaggcttgtctggaactcctggtctcaagtgatccaccttcacgacctcccaaagtgctggaattgcaggcatgagccactgtgcccggccgaaagatttggaagtatattaaaacagaaagaatcttctgcctgactttgagttaactggattatgtggaagctagaaagccattcctgagcccaggattgtttaaaagtttctgctttactttatatatgaatgcagaatagtttgaggacagcttttagggtacagatataactcttacctgtagtgtcttgaaacaaattattatttttttttaataaacagtcactgattcccttctagaaccagctgtaaactcctaagtggctttcatatgaatgggtagcaggattctcatccacagaatagaaaattaaggattggtaagtaggcagtagcaagtgagaaggatgtctgaatcatgaatggtggtcggcgttgacactaataccactatcaaaatgtatgggtgtttagcatctgggaagaatgattcgaatgtgcctgtctttgttgtagtgttttctgcgcttccttgtgttttgccctgttcaccagcaataccgagttcgtagatcgtctgatccagtgcattataagagaggaagtacatgttttttccagtattgtagcgccagggttagttctatgttatctaggttcagaagatgagtaatgacacaggatataacaagtaaggccaggcagggaaggtaccaacatggtagtttggggtggcgggctgcccattttctcataattactaaccttaattgagtacctactgtgggccaggtgctgttctaatgtgtttcagccttgactaatttcatcttcttaataaccctatgagatagatactgttattatgtccattttacagatgaggaaaccgaataccagagaggcactctagtaactcagtcacagtcacagaagcagtattggagcccaagccttctggcatagcgcctgtgttctttttttctttgagacgaagtcttgctctgtcgcccatactggagtgcagtggcactatcttggctcactgcaacctccgcctcctgagtagctgggattgcaggcatgcgccaccacgcccggctaatttttttgttttttttttggtagagacggggtttcaccatattggccaggctggtcttgaattcctgacctcaggtgatccgcctgcctctgcctcccaaagtgctgggattacaggcaggagccgttgtgcccagcccacacctgagctcttaactgcaaggcttggttaccccacaggccatgttctaggtattaacaaataaatgacatttgcagaaaaggcaccagatttttgttaactcttttcacgttttttctggttagtttttactaccatttagttagtttttgtagcatcatccaccactcccatcatattcacagttaaatagtactttttactgttactattcttgggttgggtgatagagcccacttaatgtgagttgttttgtaatagaggaataagaggaataaaagaaatgggtactggtttgcttggtttctttcccttttctccgtttcttaagctactcttttggcattgtattcttagtactttcctgtaactctttccccatcggtgctcaaaagagttaaatagcttcagaacctgagtgtgccttccctcaggacaagctgggattacagaaagaatggaccaccaggtagtttatcacttagaagaatagaataaaatgatatcattggactcttttttccctacctcctgattggaaaccatcaggaataccatcatctgagcattgttgctgacacatttttaatttttttgtgtactttttgttttctcaattgtattacttgtgatatgaaaataaaactattctaaagacttcaaatgaaaaatttttaagggaaaatgaatagcatcaaatttgttttaacaattctgctgaaatttttatatttgactttttcttttttttttccagacagggtcttgctctttcacccaggctggagtgcagtggtgccatctcggctcactgcaacttctgcctcccgggttcaatcaattcccctgcctcagcccccggagtagctgggattaaaggcgcatgccaccacgcccagctgatttttgtatttttagtaaatatgggatttcaccatgtcggccaggctggtctcgaactcctgacctcagatgatccgcctgcctcagcctcccagagtgctgggattacaggcgtgagccaccatgcctggcatatttgacttttcttccactttggggaggattattatgtaatgtgtcagaaattttcttttaataaattataggatattattgaacattatgttaacagagtttattgttctaagccctttcatattttcatgtattgtgtgtcatgtaatcatagatgtgagagctgtcttaagaatattttaaagagtgttaagaataatcagctccactttttcttcaaatattgccaagctgtatttgtgaagagataatgttgttttgtttaaaatatatttattttatataaataaagaacaaaggctgggcgcggtggctcactcctgtaatcctagcactttgggaggctgaggtgggaggatcacttgaggtcaggagttcgaaaccagcctgccaagatggtgaaaccccatctctactaaaaatacaaaaaaaattagtcatacgtggtggtgtgtgcctataatcccagctacttgggaggctgaggcaggagaatcgtttgaacctgggaggtggaggttgcaatgagcggggatcgctccattgcactccagcctgggtaacacagtgagactctttctcaaaaaaaaaaaaaaaaaagcacaaagtatatttagtaaaataaagtttaaccttttacatttttatgaaataaagtttgatatctatacattgaaatgagctgctttcttttgttttgtattataacttaaacttgtggcttttcaatttgaaaacttattgccatgtagaatttgattttttttttttcctaatgcaacactttacttaaaaattatggagtagaactatattttttagaagagcaggttttacaaaacctaaaattcaaactctggaagttgcatgatgtggtggaagaagtgctggactgagaatcccaaaaatattgggcttggttttgcccaatgccaacagtatttcactgagtgcaccttgttttaaactgaagcaaaactgaagtgtaaaaagtaaagtagaggttcctcttcaaagactttcctccccatctaattaggaataaatagtaacttctcttagaagcaaaatttattctaagacctgtgctaacattcttaaatatctgctagctgtaataaagaaatcaatgtactttatgttctcagctcccacaatttagcctaaatatttgccctggcatgcttatactggtccaagcaagcattaagtcatagcctgttcctcttccttatttgaaggtgtttttacctttctcagtattccacaagttacttcctccttcctttgttctcctctgccgttgcctcttttaaaaagttctatgttgttagccaattgggacaaatacaaaatgtgaggtcctgttccagccaatggaaaccggacacagcagtagggtgggcgcctcaggttataaatgaccctgtctcctttgttcaatgtactctcgtggcaaaactgctggcgaatgtaccctttctgcagaaagtaaacatggccttgctgaggaaattaaatttatgttccagtgctgtttctttacggcactggggaacaagcatttctaacagaagcctgtctggttctgagtccctgccctgaacccctgcctttggatgtcagttaactcacttataaaaccgctgctctggagatgaatagttctgttggcatttgtgagattgtgtcttatcctaacagactaatttttatggaagctgatgcggatagttgtttattcatggaagaaataatgtgttgattgcgttaatttgctaaactctggggatttagtagagagtaagacagctagttgttgccctcatgaaggttaagtgtgaaaagggctgcataattgcagggcgtggtgtatgtgttcatgtggcaatgatacctagccaggtgtgggaggactggaaaggcactctaaagaaagtggcaggctgggcgcggtggctcatgcctgtaatcccagcactttgggaagccgaggtgggcggatcacctgaggtcaggagttagagatcagcctggccaaaaatggtgaaaccctgtctctacttagaatacaaaaattagccgggtgtggtggtgtttgcctgtagtcccagctactcaggaggctaaggcaagagaactacttgaacccaggaggcaaaggttgcagtgagccgaggtcgtgccactgcactccagcctgagtgacagactcccatctcaaaaaaaaaaaaaaagaaagaacgtggcattagctgaaactggaagcatgccaccctggactctgggaggaaatggtcattttcctgtcacccagactactgcctcccagcctgactcttcagatccctcttgcctctcaaagtgttcatttgtttgttcattcattcatttattcttccaacaactgttggttgaataacaactgtgccaggcgtgtgctcgggatttgaaatacctaacttgaaccagctggacaagggtttctgtccttatggagcttacattttaatgggctagggaggtgcagagggtggacagtgcacatcataagtaagcagatgctatgccagaattctccagcctgcaaccagagctagcccttcatttccttgctctgaggctacagttcagtttctctcatgtggctgtgaggcccagccttcccctcgcctctctcttcaggtcccagacactgtttttcactacgcttctatttctaaggtgtcttttcagttaccacgcctgagaaagttttcaggaatctatttttggattagagatcccctgttgtcacatgccctctttaaaacttgtacataacatgcaccacataatcattccttagctgctgtgtggctgtatttaaggtttgtcttttccaccagcctgtaaattacctgttggccaagatgatgtctttcttgttccgtcccgtgtcttcagggcccagaattgggcctattgtaataaaagctggtttggtaaaaggggagagagttactggctgaggctggctgaactgagaaggctgtgcaaggctggggagcctgcctgggccttgggctgcagggtaagatgcaagatgaacaggggtggggctgagactcatgcttaggcggacaggatcaagtattgaaaccagcctagggagttcaaacttggttttgaggcaatgggatgtcatgaaaagcttaagtgattttggggactcctagtttgttttgataacatttaatattctcaaaatcattaataatttgataacttcaggcatggctgatttaatttttaaactatgaaaatatgaagtatgaaattatgattcttatggtaaaaaagttcaacgtgtacctaagagcatacaattttaatttcccttttcctacaacttttaatcctaccttttacatttatttatttatttattcttaaatatagacaaggtcttgcgatgttgcttaagtcagtacagaactcctgggctcaagtggtcttcctgcctgggcctcctgagtagctgggattataggcctgagttaccatgcccggctgtctgtcctacttttgagcagtaaattggtttctgtagctgtctaatgcttaaactttcctgtgcgttcaaatgtgtatttctgtcttaatgtaggtaaggtcatacgctatgtactccaacttgctacccccgcccccagtatatactttattttgcttatttttacagtgtaagagttactctcttaaagcttaattgtcatttgtcattgccttgtatagaaccaaggcatcttggactgtgtaccaaatcccataagatctggccagaacagggccacgccgtccatacctccttatcttgtgctttgctgccacttccttactgtgtttcagctttagctgcctgatattctttccctatgaaattgcttcctcatctaggatttttatatgtgtggttccctctgtctaatgttctttctccctgatctttccatggtagctagctgtttatgtttatgtgtgtgtgtgtatgcgtgtgtgtgtgtgtgtgtgtgtgtgtgtgtgtgtgtgtgtggttttagagacggagtctcactttatttcccaggcaggagtgcagtggcgccatcatggctcactgcagctctgacctcctgggctcatgcaatcctcctgcctcagcctcccaagtagctgggactacaggtcccaccaccacacccagtaatttttgtatttttttgtagagatagagatcttgccatgttgcccaggctagtctcaaactcctaccctcaagtgatcctcccatcttggcctcccaaagtgctgggattacaggtgtgagccactgtgcttggcctggctagatgtctttatccttaggtttaaaattttactccagaagggccctttctgagcagcctgtctgaaacaagttctccctagtattcttgcctgagtactctgtttctatgtaacatttattttagttatcaattgatttgtttattttctgtttctctcattagtttgtaataagctccatgaaggcagaagatgtatttcatgtagtgttgctgggcagatagttattgaattaatgtataagtggttgaataagaacatatagatcaactgcattctttttaaaggctaatatttcattttatggatgtaccagtcctttgttgaaggcttactaaattgtttttcagaatttttttcttattaaaacaccaccaacgaattcaaaataatgaatttctttgtatgtctctctgtgttcactcatgtgggtatatctgtaggatgacttcccaggagtaaaatttcagaacaaaagataacgtgtcctcaaacttttggtagatactgacaatttctttttaaaaagattatcccattttctatgacaccagtaatatgagaagtatttaactttgtcatcctggccattatcagattttaatttgctagaggaaaagtgagatctcattgttttaatttgtatttctgtaattaggagcaaggctgagcacagatattgtgcttctggaactgtttttctgtgagcttttaatttaatcttttgtgatgattgttggtcctttttttagttgattcagagtttgattaaagttttttaaacttatgatgttataggcaacctttacagtgtgatgtcacttagtgccattgaatttggagctatatagggctttttatctcttcaaaagtaattttgtagagcctgataataaaacttcatgttctcaaagaccatattggggctgagtgtataatatttagtagtttattattgaaacagtaatagagattttaatgtccagtgcataataggtcctcagtaaagtatttttggatgaatgagtgacaagtgaaaagttaatttttaaggcagcttgattttatttgaaagttcatttagaagaatctaattttcatagtaagaagacttagcatgctgttaagttgaaagataagcttgctttgtggcatgctatagaagtgttggatttgtggcagtggaatttttaatttgctgtgtcagatatagatatggctttatgtatccatacacacccagctataacatgtatattcaaataagtgacaaaatatgtctaatgaatttttgaattaccttttaaaacttgcctgttagttctctcaagtgatgaactttttacaatagcagtttattttctctcatcacgttggaaagaaatgttaaaagttttcttctaggtttattataatccagtcttcatcagccatcactcttcctgtattttgttcaagaggcactaattgttcgcatttggcaggtttaacacttcctgacagagaggctattaaggggaagtattctccaataactgtcactggctggaacaaagaaccttccaactcaatgtgtggaaaccactaacattcttaaatgacccttttcatggattttcatccctttaagctaaagtttggagaatgtagggtcagcgaaaacagcaacgtgtaataaagcagtaaaccttgattttggaaggcatagggtgggagatatagatttatctctgacttgaaaacaattgttatttggaaaatctcattagcagatgtgactgcttggagtaaaaaaaaaaaaaaacaacttaaaactgatgtcgctttcaggacccctttgaacttaacaagcacctatttgtggagcagactggctaatgaaaggaaattaaatttttctgacaacttcccctgccaacctccttattcaggggatgttattaggtactgaagaactttaaagaagatttttttttattagacataagtgaaccagttataaacatccccccccgcccccttctcggaggattctgacatggttgctctacattttaaacgtattagcttaaaagcttaaaaaacactgggcttcacttcagcattttagtcattttctaaaaattcagtcacacttaccagctgtggtttcaaaacaatattgtcagtctttgtggtagtttagtttgtgtcactgaattacacaaacacacacacacacacacacaccccacacatacccacacacacgaaggaggcttagatttcaacattatctttattgttatttggggaaatgattcagcagtgtcctgtgttggatgtgttaggtgagggttaatgatcagtgaaattacttagattcaagggaagtttttgtcttttcatcttcttagaggtagaagtggcattggttaatatttagcaataactaatccttaaatggataaacttttaccccttactgtttaggaaggtattttctttcttttgctttttggagttttttcctccagtagttggttcgttgaaattaaagtttttttttaatttatgtaacaagatacaattgtagagataaaatatgtacctgaaaaaaaaaaaaaagaaagaaacaatagaaaagaaaaggtaatgcagattaccaaaaggattttttggaacaattcgtaattcctgtaggtactggaaattaactttcatatttctgcaaaatcgatcaactactcccaaacaatagagaatcaactccccctgctgacagaatctaggaaaacatgacacataatattggacagaaacaagctggctgcggacaagctttaatgacctgatttatgattcagtattgattgtaaacatctaaattctgccattaaattccggcaactgcaccaaatcattggcaattctggtagtgcttcctgccagctcatttcaactgctttgagtttcttaatataataatgatgaggtagaatttacattccacttatggtattaattttacatttctctgaatgaaaagggttagaaggtagtaaaattgaacattaaatgaatcggaggagacagtagtgcaatatatgactgccctaaagacattgtgcaatgcctcatgggattaatgttgagtctcatttcctgcttttacaggatgcagaagaagctgtcagaattgcaagggaaattggtaagtccttaaattaactttggtaggatttctgtgtctttcagcagatacggttgagtcaacaggtaataagtaattcccatagagcaaataatactttaatagttttagattttgattacttgttgctctggaagaatgtatcagttgaattgccaaattctattattaaaggagactgtaaagagtaatttgaccttaactatacataactcttttgtaagatgagatcacaggctaattcaaagaaggaattgtcttaagaattctaaagattggatataagtttaatgtcaatttatatgtacatagttgaatgtggtttgttaaaattaagaacatttggattaaaatgaagataccatatgtgacatagttctttaagtttttgccttttgctaagatgttaggtatcaacttaatcttgttagatgggaaagataaaatagatgtgggaaattagaactgaatgatctaaattggaataaaaggtagactggaggagtttttaatggctgttttacatgtacttgtatttgggcagtgtttcccaactttttaatttcttttctttttcttttctttccttttttttttttaagatggagttttgctgtcattgcccaggctggagtgcaatggcacgatctccgctcactgcaacctctgccttccaggttcaagcgattctcctgcctcagcctccctagtagctgggattacaggtgcctgccatcacgcccagctaattttttgtatttttagtagagatggagtttcactatgttggccaggctggtctcgaactcctgacctcaggtgatccacccgcctcagcctcccaaagtgctgggattacaggcgtgagccaccgcccctggctcgcaactttttaattttaaaaatattcttggcggtcatgagaactatttttggtatctgctaattgagaaaatgtgtaagggcatgctattatatggattaacaatattgttaaataactttgcaggtttaataatcaaatcagtaattgtatacatttgacagaaatttgtacagatgagagaaattaggcaatgcttgtagggatcccagcgtcttctcagcattcctgtacgcctcagtccaagcatctcatcgtgccacacgaacatttctgtaggcctgttttctcactaagattatttagatctattttctgcctctagagagcatttgatttggcaaagctcatatagttgtgatatgtagaaatatcttattggtctggaagtgatcacttgtactagtaagcgtgttctttgcaaatgggacagtctaacttagcaggtctttagtgacctgaaaagcagtttggcttattgcacccttgtttgtagttggtactgtctaaattatttgggctttgcccatcattaagtgtgttttgttgtttgctttgcaaaaatctatcttattgatataggtcctggatttaagaccagaccatagaaaatcttattttatctgactacctcatctcttcattttttttttcagaatcattaacatttcaaaaagcctatcagtacttcataggaacatttgctcgactgctaaataaactggactatatagaactgattctgtggtttctttatggagaaaaatcaaaagtttctgttcatggtttgaaatcactggtattcctcattgcctaagaggcatataatatacctactggcttttgaggatagttttctaaaatagtttaattccatcctgtcagacatctttacatttaaaaagctctttttctagttctaggttagatattattatcaacctcattggatataataatactgttattattattattacagtatctacataaaggacaatatttagagaaatttagggaaataaagggattagaagaaaatttacagttacactgcagtgccacattttgaatggtgaattttggacttgcgagcattccctttgtgtaaatagcaggccgtggattgctttgcttcctttatgccttttcttccactttctttctttctttctttctttttttttttttttgagacagacttttcactcttgttgcccaggttggagtgcagtggtgcgatctctgctcactgcaacttctgcctcccgggttcaggtgattctcctgccttcacctcctgagtagctgggattgcaggcacacaccacaatgccagctaatttttttgtatttttagtagagacggggtttcaccatactggccaggctggtctcgaactcctgaccttaggtgatctgcccacctcagcctcccaaagtgccgggattacaggcataagccagtgcacctggccattttccactttcgttataacctgtcacctttaagataaccagctcatcatgatgggcctctgtctaactagttctcatcactttgctttcctccctcaatattttaatgctgtgctttacctccttttcattttttattttttcctactgaagttacctaatctaatctaagtcttttttctttgtacttgggcacatcctttatgactcctttctctttcctgtccttcttctaattcttccccaattactctctcttgcttgtgaaataaatgatagcaatcatggctattaagtataagagtactggtgttttgcttatactgaaagaaagggaaaccataaaatttgaggtaaaataaaccataaagaactagggtcatcagctcttacaaagcttttagaatttctctgaaaatctcttctgaatcacctcagaagcctcgcataaaatcttttccttgaagtgctactttctaaagtaaattaaattatgttttattaaagtctgttggctttctgtgttgtttgatatttcgtaagttttttactactgattttattgagatatatcacattttaactatgattatgattccatgtgaaaatgtgttcctagttctaaacaactgatttataatcaaacctttgaacctatccatttgtaagttgttgattgtccatgtgttatacctattcatagagttctctcttaattctttctgtgttatgtgatgaaaatgaagtttatcctgttttatgtgatttcctcctctctcatgtctttgcttttcttctggaaacattaatctatgctgccaaagtaggaaactcactgtattgagcattgatgaattaagtgccttttacataatggtaactccagtttatggagcatttcttcctaaggccaggcactttggaaatgttgtttctaatgctaattcttgggtttaatcatttttgtttacatttaaggaaactaatgattagaaatggtaagtaatttgctcaaggtcacagaactatcgagtggtggaccctggtttaaatttaggtttatttgactccaaagaccacagactttttattatactgtgtctaaaccaatgggattagaggatggcagctaaaatttgagcgactactttgtgtaaaatactgtaaggtactcaaatgtgttatacatggaattaaagaagcagacagtctcctatccttgatgaggtgagagacagttaagacttaatatgttacttgtatgtatttgttttttggactacctagtttctctcattcttgttcctgattttttactttgacctatctaagttgagagatacagagctattgatcctcagtttgtctttaacctcaatgatagacaacagtaatcagtgagcttgatttccattgaagtttgatctttttactgggccaaaggtccttaatacaatcaagtcaaaattgattcttgaaaggaaaataaattgtgaatctaaaacctgtcctttaacaacttccagattattcagattcttttcctttgcttgtctttctcacaatcacaaatcatgcccaatttaaataaaaacttttttttttgatcctcaggtctaccatactacaaacctacttctcccagaatttccaaatctcaataaatgtcacccctttcagtcaggccaaaactgagtctctcctggatgcctcttttcctcatcatcctgttgtaaatacatcaataggcattgtcagttcatcttatatacactgtcttcattactaccactctcctccaaactacttttgtcttttgcagggactgtggcaatagtttctttacttcatttcttaaacatttcacatagctgacagtgagatatttaaaatctttaaagaacaaggatatatttcatctcatcccagcccatttctgctttaaattctgtaatgactccattgaacttagataaaaatcacaattctttactctgactactatccctatgtaatttgacacctgcttttctctccagtcttattgtatactactcccttctctgcctcccatacttcagtcacattagcttacttgaacacagcaaatttcagggccttaggataagtttttttttttttttaatcttttgcggggtgaagggggatggcaggacctagcagactcttgctgatatcttcacaaaaatagctccttgcagtctttcatatcttagcctaagtatcatgtcttcaagagaagattctctaatactgccacccagtcattctctgtcttataactattttctaaatttctgcatagtattcatgatttgcagattttttttattcataaacttttctccaagtattttattttgaaaaatttcaatcatacggcattttgaaataattgttacggtttatactcgtatacccaacactaagatcccactattaacctttttctagatttgctttaccacttatctgttcatatactaatccattttatttttgttgcatttcagagtaaattgcacaaccagtatatgtcccattaaatacttcaacatgtgttattaattgaattcagtatttgtatacagttttgttattttgatgccaaatttgcacacaatataatgtgaacaaatcttaagtgtgtatttgtggattttgacatatgcatatatatatataacttagaatcccaccaaggtgctgaacatactatttccctggagatttccctcatgatccttccaagtcagttctcgcctaccccctggcctgcaggtaacttgttcagatttttatactaaagattagatttttaaaaattaagataaatttttaatactatacaattcagcctttcaaagtgcacaattcggtgattttttgtgtatttacaaggttgtgtaactgtaatcactatctaatttcagaagatcttcattactccccaaagaaactctgtactcattagtatgtacttcttattttctttccatctagtccctgacaaccattaatttactttgtgtcttgtggatttacttattctggggatatttcatataaataaatggaatcacaacatatgaacttttgtgtctggtttctttcacacagaatagtgtttttaaggttcatccatgttctaccgtttatccctttttacggttggataattttctattgtatgtacatgccacattttgtctgttttttatttttttgagatagggtctcgctcttttacccaggatagagtgcagtggtgtgatcccagctcactgcagctttaatctcctgggctctactaatcctcctgccttaccctcctgagtagctaggactacaggtgtgtgccactatgcctaatttttgtatttttttgtagtgggttttcaccatgttgcctcagttgatcttgaattcctgggctcaagtgatccacccacattggcctcccagagtgctgggattatagacatgagccactgcacctggccttatctatttattcatctattgatggacatttgggttgtttttacctcttggctattgtaaatggtactgctatgaacatttatgtccatgtatttgtttgtatacctgttttcaattattttgggtatattcttcgaagtgaaattgctgggttatatggtaattctatgtgtaacttttggagatactagcaaattattttccatggtggctgtcccattttacatttctaccaagaatatataagggtttcaatctcttcatatccttgccaacccttgttattttctttcttttataaggaaaactattgccatcctagtgtgtgtgtagaataatatcttattgtagcagagggaagaatagattaaaaaaagtgactcaactatatgctgtctataagaaactcactttagatgcagagacacaaataggttgaaagtgaaaggaaggaaaaagatatcccatgtaaatagtaaccaaaagagagctggggtggcatactaatgtcagacaagataaactttaagtccaaaactattctaagagacaaagaagggcattttatattgattaacaattacaaatgtatatgcaccaggaaacatggccctaaaatatttgagataaacattgacggaattgaagggagaaacagactaattctacaatagtagttggagactttaatagcacactataagtaatggatgcaacatctagagagatcagtaagggagggaatagaggacttgaacagcactatatactaattagaccttatggatatataatgaccattctacccaataacaatataaggcacatttttctcaagtaactattaaaagaggaaaggagtgatgattgagttaaaataattgttaaagaaaaagaaaatataataacaaacaggagcaatatctcataaagtgttgcccatgactcgcaatgttcccaagacttagtttgatatagaaatatttttccccgcatgtactgatttatattgatggattgctcttttcttaaaatagtataggattctctgcaatatataaattttatttttctttgcaaatgattgctttatattaatttgattactattttatagtaaaatttttgttgtggtggtggttgttttttgagacagagtctcattctgttgcccaggctggagggcagtggtgtgatctcagctcactgcaacctctgcctcctgggttcaagcgattcatctgccttagcccccacttagctgggactacaggcatgcaccaccacgcctggctaatttttgtatttttaatagatacaaggtttcaccatgttggccagactagtctgaaactcctgacctcaagtgctccccctgccttggcctcccaaagtgctgggattacaagtgtaagccaccacatctggctggttactattttgtagtaaaattgaccatgagttagttttctttgtatttctaatacttaatgcttgttacagagtatatattcagcaagtggttatttggtgaataaatcaaaatgaaatatgtatatatatgtatagaaatgaattaagcaatcacatatttaaagttcttttgtaatatttatagaccagaatttgactataattttctcccttttcccccttaatcttcaattttataatagagatacctggggaaaaaaaggaatattaagcaaaacatgataaactttcagcaaatagataattgaaacaaaatgatctaggattattcaaataaattcagtatatacttgttagtgactactagtcatcaattcttgtaggctgtccttgtgttcattaggctggactaatagaaatttataggaatctaagattcaaatgtatgaaagtcttttactgaaccttattgcctttacaccagcctgttcccatgacatcttatgttctttgaaagtctggctctcccatttgacttattttactattagtcttctgatgtagtgtgtctgccctgtctctgcgtagtgtgtgggggctatatggtagtcctttcttttctgccctggctgtttgcctttgcctattcttctcatcttccttttggcataatacaacatttttttaaaaagttacttttgttgcttatatacaaccaataattcatacttaagagggataaaaatatgtggctaagtcaggaatctttttattttgtctatttcatgcagcttagaaaaattttcacatgttatatatgactctggggttaaggttatatggaagaaacctttgcaaaaacattacaatttataccttcttcacaatcttacatcttgttaatttatttgccaatttcgtcttcaggagaagacatttaatatttaaggagattgaataacgcctaaggaaaagttatgttaaagaaaatggcattaaaataatctatgtgaaatccattaaataatgagatgtatattttgctgttttcctattattgaagtgatgtggtcatttgagattagaatgatattccctgggagacaggaacttgtgttctgtggctttttttcttctttcttttccaatgggtgcttatattttcttttattattccaacatgcacatttgggtttaagcataatttcacaagttctttttctgtcttttactgttaaatttgctgtttctgtctccctttatttctctcagtccttcatcttctttctcttgttttattgttagtcattcgtgaataccatttttttcctttttctattactctgttggaaaaggctgtgcataacattcaggcaggaatgtggaaacacattgtaatgtgaaaaaaacattgctttttttgtttggaaacttcctgtgtgtgaagcgttttgctctaatctgggcactgaaatgcactgatttccgatccctggagcagagttagggatctagtatttttatttgcctaagtagagagaaataggcaggcaaaatcagtttttcctttctctgccaaagaaatagtgtcataaaatagtgtcatgtattggtttgtttagtgtataatacatctggattatatttttgtaggtactgaatattgattcttatttaaatatgtttatatagttatttgtatatatgtgtatgacagactgaggaaaggctgtgtgtgtgtgtgtgtgtgtgtgtgtgtgtgtgtgcgcagtagtagagatgtggataaatcatagactccaacatatatatgtttactagttactggataattacagaccccaaatagtattgatgcaaatgtgcatcacctcagtctgaggtctgccaactcgaatgatactccaaaactaaactgataatgatgaaactaaatataactattttgtgatttaaagagagcaataaaatcagtggaaaattatgatcaaataaaaaatgagtaatgcattgatagtagagtgtatttccccaatttgtttgaatttaaactgtttccttgtttgtatctacagcaggaatttttcagtgttagtcacatggtgcatggcagccaaatttcccagtagattctgaactagattccttggaaaactctagtaatatgctaaatttaattggagtttgtggagttgtcattagttcaccagacctcgactataccacatttttacagcccctctcctgtcactttaaacaacacagatttagtttttcttcattctgtgtgttcaattctcattcgtcaggttgtagggtgagaaggaggcattttgttctatgctatccttattcagtggctaaggctgatggagtttccaccatctgcaatgtcatagattacagaggcaggacacagaaaagcctcagttttggtaatcatcaataagacattcttcatgacaaggtgtttactattatatctcattgtgtggctttgaaatttgcagattgtcaccaccatctcctaaatatttcttgaatttatctacttctctgcatttctgttgctattctctttgtttaaggtagtgtcatcccttgcctacatcactgtaacagcttttgaaatgtactcctcttatcatagcttgtaatcccttggaggtagactctggaagcttattgggggaaataattttgggaccaatacctgagggggaatgaaggaaactgagccaagggaaaagttgaattgattctctctcaacaaagccatcagctaataatttagagagctgtgaatatttgttggtcttttttagttgttccaagttcgggcaagaggattcagcctttatacacctgtatcaactatctagggggtgtgggctgcccctaggaaggggcatgaccttaggcagaaagccgaggacaagtcagcttttggttgacaatacttacaacagttggggcaatgtcctgaactagggatctgggcagaaaactgtacttaataactttgagatatatttttcatgattgttcatttctaagtaatttcagatttctgctatgattttgactcatatgttatttggtgatgtattttaattctttaattttttgagatagagtcttgctctgtcattgaggctggagtgcagtggtgtgatcacggctcactgtagcctcaacctcctaggctcaagcgatcctcccacctcagccactggagtagctgggactacaggcacatgccaccacttttggctaatttttgttgttgttgttgtttttgtattttttgtagagacagggttttgccatgttgcccaggctggtctcaaattcctgggctctactgatcctcctgctttggcctcccaaagtgctagaattacaagtgtgagccaccatgccaagcctagtgatatatttctaaataactgaaaaaaaaatagttttttattattattgatttctaacttaattgctttgtggtcagagagtatcatgtttttcatttaaaaatctttcagatttgatgaaaattgctttatggctaaggaataagtcactctgatacatattctgtatgttcctgaaaagagtgtatattctcaaattattatatgcaatgtcttatagaaaactcaagaggtcaaacctacctattgggatattcaaaacttctagtgagtttttttttttttttttaattaagacaatggagtctcactctgtcacccaggctagagtgcaatggtgcgatcttggctcaatgcaacctccgcctcccgggttcaagtgattctcctgtctcagcctcctgagtagctgggattacaggcacccaccaccatgcccgaccaagttttatagtttagtagagatggggtttcaccatgttggccaggctggtctcgaactcctgacctcgggtcatccgcccaccttggcctcccaaagtgctgagattacaggcataagccactgcgcccagcctgtgtgggttttttttttttttttttttgagacagagtctcactctgtcgcccagacgggagtacagtggcatgatctcggctcactgcaagctcccctcccaggttcacaccgttctcttgcctcagcctcccaagtagttgggactacaggtgcctgcctccacgcccggctaattttttgtattttcagtagagacgaggtttcaccatattagccaggatggtcttgatctcctgagctcatgatctgcccgcctctgcctcccaaagtgctgggattacaggtgtgagccaccgtgcccggccttttttttttttttttgagacaaagtctcgctctgtcacctaggctggagtgcattggcacaatctgggctcactgcaacctctgcctcccgggttcaagcaattctcctgcctcagcctcccgagtagctgtgactacaggtgcctgccaccacacctggctaatttttttgtatttttagtagagatgaggtttcaccatgttggccaggctggtctcggactcctaaccttaagtaatccgcccacctcggcctcccaaagtgctgggattataggcatgagtcaccacatccagcctttttgtgatgtttttggatatctgatggacctatatttgaaaaagtgattttccaatttttccttgctcgttaggttttgtccctgtttagataataggtgtattacagtgtatcgtgtttccttggctatcaaaacataatgaccaatttttgttttcaagtctaattatgatattaatattcctaaacaagcttatttttgttttatccttgtatcattctttatctttttcatctgccagtgaactgttgttttaggtgtgtctcttgtaagtgcacatctaaatttggactggatttttattttattgtttttctattcagcctgctggagcttgtcttttagctggagagtttagtccatttatatttattgtatttaaaattatattttgatttatttatataatctactttttgggggttttgtttgttccattctttggattctgttttctttcttggcttctttttgatgacgactttaaaaaaaatgtctcttgttcttattttatgtccccttcccattcctccctccactatgttggaaattttatactctatttctattgtttcagtgcttgctatagaaatttcaacttggagacattccttcaggtgtccttcatctttggcaacatttagtgttgtcagtgttttggattttagccattctaataggcacatagtagtatctcatagtttcagtttgcagttccctcatgacatataatattgagcatcttttcatgctattatttgctatctgtgtttcttttttattgagatgtctcttcaaatcttttgttaatttttcaattgggtggtttgtttcctggttgagttttaagagctctgtgtattttggatacaagttctttcttaggtatgggttttgtaaatattttctcccagtctagaacttatgtctttattctttttttttgagatggagtctcactcttgttgcccaggctggagtgcagtggcgcgagcttggctcactgcaacctccgcctcccgggttcaagtgatcctcctgcctcagcctcctgagtagctgggattatgggcacccgccaccacgcctggctaattttttttttttgtacttgtagtagagatggggttttgccatgttggccaggctggtctcgaacccctgacctcaggtgatctgcccacctcggcctcccaaagtgctgggattacaggcatcagccaccatgcccggctgtgtctttattcttttaagaatgttatttgggctgcagaaatttttattttaatgaagttaaatgtgccaatttttaatggtttgtgcttttggtgttatatgtaaaaactcattgctaaaccaaagtcacctagatgttcttctattttttctctagaaattttatagttctgcaatgtatatttaggtctgagatccattttgagttaatttttgtgaaaggtataaggattgtggcaagattaattttcttgcataatgaatatccagttattccagtaccctttgtttggaaagactatctgcatttaattgccattgcttctttgtcatagttcagttgactgtatttgtgtgggtctacttctgggctcttgagtaatttgtctgtcttagacaataccatactgtcttgatgtctgtagctttatagtaagtcttgaagttgggtattgttagtcttttgaatttgttctttttcttcaatattgtgatgcctattctgggtcttttcctttccatataaactttagaatcagtttgtggatatctacaaaataaattgctaggactttgattttaattgtgttcaacctatagatcacgttgaggaggattgatatcttaacaatattgaatcttcctatccatgtacattgattatctctacatttagattttcatccatttctttcgtcagagttttgtagttttcctcatagatacactgtatgtattttaagattcatgcctattttatttctttagtgctaatgtaaatgtcactattttaatttcaaattccagttgttcactgctggtatataggaatgtgataatcttttgtatattaatttgtattctgtaaccttactataattgcttatcagttccaagaattttgttgttattgctgatttttttggaattccttcatagacagtcatcttatccactagtgaagacagttctatttattcctttccagtctgtttactctttatttccttttcttaacatacttcataagctggaatctgcagtcagatgttgaataagagttgtaagaggggacattcttgtatttttcctgatttttgggagaaggcatccagtttcttgtcattaagtgtaatgttaactgtaggctttttgtgtatattctttatcaagtacaagaaatttctctttattcctagtttgctaaactcagtgattgttgatttttgttaaatgctttttctgcatctatttatatgatcataggatttttcttctttagcctgttaatgtgatggattacattaattgatttttggatgttgaatcagctttgcataccaggattaaatcccatttggtcatggtatataattctttttatatattattggattttttagtcattttaatatctaaaaacttaattttaaaatgtttgcttttttcttatttatctcatcatgtttatttttttctccaaatcattttacctgtttgtaatagctgtaacttataatagtatttgtaacaactgttttaagagtcttcatttctgggtttctttctgtcagctattttccttctgatatgaatcacattttgcatctttacctatctcttaattgttgattggattctagacattgtaaatgttacattgtgtgtttggattttgttacctttatttaaaaggtatagatgtttagtctggcaggtacattaattttgtttaggttaaggccttttaggctttaaaaaagttttcttagggcaagtctagcatagtcctttctcgtgttctgattaaacaagcttgtattatgctgtctctctacccgtcacacttcctgtcctttggttcataatttctatttcattatacgtctatggttttttcgtagtataatgtaaacccatgaaagatgtaggcaggagagagatataatagtatatataccttaagaaaatttcactgaccactatgtggcttggatgggggcaactgtagtagtggggagttctgctagtaggccagtacaagagtcctggactgctggtagtttgtgtaagtattatgattaagtattatgataactgagataaagaaaagtgaatagatttgatctttttaaataaagaatttataagagtttcatactatccagcagttgtgctcttacacatagatccaggaagctcatatacaaagttccagacaacaagtacaaaaatattcaaaggaccattgttatataaatagaacaggttacagtctgaatgttcattcacagtggaatggataatgctgcagtatgtttgtaggtgacatagattacagcagtaaaaataatgacttacagctgctcagattaactaatagatttacttagtaactcttactttgcatgttattctttaggcagtttcagccactgcagaaacaacaaagaagacaggcaaagatctttgtctttatgtttttttaatcattgtgcagtgaacaatgtagatattgactaaagcaagaatcattaaagttcatttttaataatgggtgaaaattgtttggatataggatcatcacagtttcaaagtatcaatctacagattatttgctaagaaaaaatggcatactttctgtgaggaaatttaatggatgccatcttaagtaatcaagctttatcagtttgggataaattgactttttattttacttttgatgcgatggaagaactcgaggatacaatatcaactatgttgtatttaagatttgttaaacatcttgaatttaatgagtgaataatcaggtatattcaaattgtggaatattctatcaaacaaccaccctgggttcttcagaaatatcatggtcatgaagaactccccccgccatcagcacaaaacaacaaacacaaacccacactttcccttctggggaggctgagggggttcaaaaggcaagtgaactactttacattagaggagcacaaagaaacgaaacaaagcaatgcgtactatctatgtaattctcatgagcaactttcatctggggatttccttcctttctgtcctagttctttctcggagtggggtgtcttttctcttctgaggtcctattacccatatcagggcctattctatccatctagaggactgttcaacttcctgaaatatcttttgttttctttttaccttggacctttccttgaggaaacaaaggccttgtagttaattataggtgttttgcaattggttatttaaagaagatccccattccccatcacatctccttgattcatgagagatttctgattagtaccgctggattaggaataagacattttctaagaaatacttttcttttcccttctttttatttttcctttcccattagtatattctatgaaattttaattcaagaaattgtaggtgagaaaaccacataagattctttattatacagcgtaccactgttgcatcaatagggtgtcattttatcagcttttaagttaccaggttgtgctaccatgtgtggcttgggttttgcttgaaaagtaaggttatttattgtgtcttgagtaggtaaatgtgacattatcagttggtcaaaaaagataattctttttaacttggaatccataactaaatggaaaatctcctaagctcctagaatcttccttcattcatccccttatcttccacatccaaactgtcgctaactctagtctttgtctttctctctatctctgttgctagctggactgctgcaaaggcttcctcatcagctccttgtttctacctttgccctttcaccattcattcattgcacagcagccaaagtgatcttttaaaatgctgtattaggtacttccctttcctgtatcacaccttccaacttgttccttctgtctggactcatcccccctcactgattttcagagtgctcgctctatcttgtcattaggttctcagtttaaatactagttttctcagagaagcattttcaaggagcagtaaccctgtcactctcagttacatttattccctccgtgttatagcagtcatcactatcttacattgtgtataagacatacatgcacttatttatttatattaatatgtgtatatacataaagaaatactgcagccttgacctcctgggcccaagctgtccccccagctcagcctcccaagtagccgggattagaggtgtgagccactccacccgactcagacatatatttagatgcatgtatgtttgtatatcattgtctgctagatagcagggagttttctgaatcgttggcctttgtagcctgcagagagccagataaggcttatagtgtatattcagtaaacattttttaaactgatgaatacaaatttgatagtagagttagaaagaaggctgcttgctttgtggtagaaagtaagacgcactggtagctgggaggtgagggacccagagaagatgtcctgtcctgcacttaaacctgcccttgaaaactgagtccagaaaagtagcaatggaaactttgtagtactttgctaacctaagtttctgtattttcttcgtatattttgtcatatagtattagtagatttcttttcggaagcattagtgcctcttttattgtgcagaagagaataaggagtggagactgtctctgtgttggaggttcagtgtcagtaggggagtcacttctgtgtctggggtgaggtaaggtagtagcagtaagcatcccatgagaggacctggaaggtgaggaaaaacttgggaagggcactagagcctgatttttttttttttttttttaaagcagtctcttctactaggactttcacctccttttacgagtagaatttgtattttgttatgctctgtgtattagtccattctcacactgctaataaatacatacctgagactgggtagtgtataaagaaaaagaggtttaatgggctcacagttacacatggctggggaggcctcacgatcatggtggacggtgaattaagagcaaagtcatgtcttaacatggcaccaggcaagaagagaatgagtgccagcaggggaaataccagacacttacgaaaccatcagatctcatgagaactcactcactatcacgaggacagtgtggggaaaaccgccctcatgattcagtcacctcccgccaggtccctcccacagcacatggggattattacatttcaagatgagatttgggtggggacacagagccaacgcttatcattctgtttcaaacatatgtcagctgaagaatacaaaattaaacaaatacagtatagacaagagtcaagcacagaagtaagtgctccagtggatgagaaaatgtgagagaacattagtggaaatttcatgtccagatgaggtgaggggtaacaagtaccatcaacttgatcatttctgatttttccaggaatgccaacttttgactaaatatttttttccttccacttcccatttacttatcttaattagagtggcagggacacaagaaagtagggatgagggactgaactgttggatattatttaacattatctgtgtggattattcttttccctcctcttcagatttctaagtattgtttctccatggtgtggtgacagcatatgtactgcctgaaatcgatttggcataagaagttgagtagaaaaccttactgttacattatttcagaatatagctcaatggttaaattaagagttagtatcagccaggttcagtggcttatgcctgtaatcccagcactttgggaggccaaagcgggaggattgcttaaggccaggagttccagaccaatgtgggcaatataatgagacccccatctttaaaaaaaaaaaaaagaaaattagctgggtgtgttggggtgcacctgttgtcccagttactgaggaggctgaggtgggagggttgcttgagtctaagaggtcaaggctgcagtgagccaagatcacactctgcactctagcctgggtgacagagcgagaccaaaaacaaaaaagctagtctaacttgcatcagtttcttccttcctcccaacatttttctgtttggcttgtgagattttggtcagggaatcttgccttcctgggttacatgtattcacaggtctaatgctgtgatgccagcagcactgggagaccacaatgccttattatatattgtcctattctctaatgacttcccaccttttctgagcatctgataattttttgttgataaattgttttatgtatcttgtttccccagcttgttccttgtgagcaagaatgatttccatgtcatattttgaaattcacaaatcactgtatagtccagggtccttagtaaatgactaaaatgcgattagtactggaaccagaaaaactgcaaatttcctaatcgtcagagggaactgaatgtagtggagatgtgggctgtctctcagctcttgtggcttcctgttacatggataaatggtttgtgatgatgcattgataaaatatttttttgagaggatgggggtaaggatctattaagttgttgtaaacagggttttgcaggtataccagtttcaaatttttagattgcgctttttcactcccgtaaaacaggctaattcttctctactgatttcattctgattattttatgcttgttattgtgaatgagacaaataccattcttgccattctcatgcaggattaaaactcgtgcataatctcttgcagaatcaagaatcaaagcatgcacaatcttctatgctttgtccccatctatgttttctattgtgttttcccctaccatcctgcagataactctgtacttcaactgaattgtttcagtcattccttaaacttgtcctataatctccacctctgttttccccactattcctgcctgaaatgttcaagtcctgctcattcttcatagcatcatttaaatagccctttcttttttttcttctttggaaacggagtcttgcgctggagtgcagtggcgtaatcttggctcactgcaatctccgcctcccaggttcaagcgattctcttgcctcagcctctgagtagctgggactacagacgcacaccaccacacccagctaagttttgtatttttagtagagacggagtttcaccatgttggccaggatggtcttaatctcctgacctcgtaattcgcccacctcagcctcccaaagtgctgggattacagacatgagccactgtgcccagcctaaatggcccttctgataatacacttttcttaattatttttctctctacctccctgtgatcctttctgttttgaattgccagtgatagaactatttgggtcctttgcttttctcttcttggatttgaaggctcccagtgtaagagcatgttctttatctgtcttctcagtgcactgagcattgtttcaaaaataccagcccatataaacatcatgaacagaaaaaaattttaattgaattaattataaaacgcttaggaagcaggtgccattttaactaagttgaagttaaagagtgatgttttgtggtttggggttcaaaaggtctatgacatttggccttctcttcccttttcctctaaggatcctatagcttgagttgagtgccagtagagcattacaggccaggaaggatcctgtaagggctcactgagctcttttttcttcagaaaagatcataaacaaatggtcccaaacataggagtatctctaccttgtttttagaaaacatctaaagaaggagacttgtacacttttcttgataaatcgttgtaaatgactcttgctgtcagaagttttactgtataataactaaatacttaatcatgtaactgatgacaattttatgagtttaaaactttagctggaagtgtgctttgttttgaccttactttgtattttcataacaccctgttaatgtacggaacagtggaatagcttctccattgataccagtgagccctggagcttctgctccagcccatagcatcgtagccaggtttggattttccccaataccatcatgtcacttcttgctaataaaagctgtaggggttgtctgtgactcttcagatgaaaataccttaagtacctgaaaatcaccatttttgaaaaaagggaatttgttatgcatgcaaacctcagttttggagatgtttcctggtgctattataagttgtttcttatatctttgattacttaatactgtacttctgtttttggaatccactgttaatttatgtgtgttttcttagcttttattactggggaaagtgttatgtttattggtacaagtacccttttttcttttaaaatggtcacactctcattttttaaatacatcattacactggtgttactttcctggtgttattttcctgactctaaagaaaggaacttttaaataaattaattattgttttctgcgttattgaacatgtggtcaattgtcatgttcatacatcccaatgatcaaagtctgaacttctgtctaattcttccctgctgttaggctaccctgtcatgatcaaggcctcagcaggtggtggtgggaaaggcatgcgcattgcttgggatgatgaagagaccaggtgagaggctgtccaaaatatacttttgatgaaaattgcagttaccagagttttattaaactgacaggtaaacagataccaaaagcataatggagtaattacagtaaccatctaatttttacacttttgaatgggaaaaagattgaaattatgtggaaaccttccttatttatattttgatgatgattatcttattatagaaagggttttactgttttaaacattaacaaaggattttctttttgtttttaccgtatatttttaaaaattacagtcaggattctattttctgggcataaattactaacatttggctatataattctaaatgtcatctaaagatttaaatcaactatatttaaaagcagttataatttcattgagacttaatgtattacctcaatatgtagttgctttcctttgctagtgcataaaagtagtgaattactttgataattttagagtgtgaaatatattctttttccttgagtttgaaattactgtgtcctttatatggaatgcgctcttattataatttagaatactttttatggcccaatctcagaagttacacaggtttccctccagtgaacacagcttctgctcaaattcaaggggaggggactgagtcttcacttcttcatgagagcgtgggcaagattcttagaagagcacgtggaatgggagatactgttgtggccatctttggaaaagacaatctgccacagcccgttttgtgggaaagaatggtatcataaagaagtcgaatacaacttaatggttttgcaagagatgtgtattttgtggacttcaatttttttctcattgtttttctgttttgcacagtacttacatagcaatttcactgaacgcttagcgcttatttttcattattcatcttaggatctcaggtttcttatcagtcatttctccagggctactgttagtaacttactcttttatggtgcggattactctttatagtttcttggaagtgaggtttgctgtgctgctgttgatttataaattttaatttacagcttaatattttgagaaatcactatatccattcatatattaggcatcattttgtaaataatttagccctttcttgccaagtaaatagcacattgattcaaaatatgtttataaaattaataaaaatacatgaataattttctacttaaaatattactctcttcagcttgataaataaaccatctcagaaaacttgttgagatcaacacaggcgtgcctattagatttaataatacaagctcctcattttaagaagttgctctatgtcccttatttatttgggaaagtcaaaactacctaaaaagggaaagaacagtactgcaaacatgcctatgcttgtcttttggagccactaaccgtgaacaccataccacaacttatccaccccttcttttcctctctccctctcgaggaagtaattggtttttacataatccacaaagatttcatttttcaggtacaaaggaaaatttggtagcttaattactttattcctttatcctaaggggtgtctttttcttgtaacatctttcctatgttttttggggggaagtagcatctatgacttgtcttggaatctgtaggacatctgaaagattttttttaaaaatgtaatggtttttttttttttttttttttttgagacagagtctctctctgtcgcccaggctggagtgaagtagcacgatcttggctcactgcaatatccgcctcctgggttcaagtgattctcctgcctcagcctcccgagtagctgggactacagctgcacgccaccacacccagctaatttttgtatttttagtagagacggggtttcaccatgttggccaggatggtctcgatctcttgacatcatgatctgcctgcctcggcctcccaaagtgctgggattacaggcgtgcaccactgcgcccaacctttattatatagtaaatttgggtgagaattatgaagattgttgaaggttcacttagatattttcatagtaatctctggctttcttttccctattcaagtttaaatgaagcgtatggcatgattgggaaactgattgtgtctatatttttgaatatccccactaagacttttggcattgtgagtgcaatttctgttttatttttgtattcctagcatctaaaatatatccaggcacaaagttcagtaaatacttattgaatgaatgtataattgaatgtcaccagtgatattcataatagagtttcccatgagttctaaaataggttgttggcgatgctttcaaacttgctgcttattttattttggtgactttgactttttacttgtggtgttctgggtttaaatgcaaaatgaaagatctcaatcattatagtggaggcaaactgtaaagtgctatattttttctttctgttattatatccaatctaataaaaagttgattatatggtatcgaaaactaattcattttgcttccagtttctttgaagtttgcagcctcctaagattcccctaaatcaacaatgtaatggaggactttattcccctaaatcaacaatgtgatggaggactgagaaaacctaataccttttctctgagacctctgagaaatgagttttttgcaatgttttgaaatttgtcttctagtcagttttacctgcagtgttgtacaaaaacaagcaaattagttgtgtgtgtgtgtgtgtgtttttttttttttttttgagatggagtctcgctctgttgtccaggctggagtgcagtggtgcgatctcggctcactgcaacctctgccttttgggttcaagcgattctcctgcctcagcctcccaagtagctgggactacaggcgcacactgccacgcctggctaattttttgtattttagtagagacagggtttcaccgtgttgcccaggctggtctctaactcctgagctcaggcaatccacccgcctcagcctcccaaagtgcttggattacaggtgtgagccactgcacttggccacaaattagttgtttccaatattactaggtggactgtaggattaaatgatattattttaaagttgtaataattaaaacgcatcttaagtgtaccaacctggattactatatgacaaggattatcattaaatttttctattagtagtctgtcatcgccaaaactagaagcagcttttgagatgaaaaaccatcctttaaaaaaaaaaaaaaggaagaacggtcagactaacaaaacaaatagagcaatagggctgacatcattaaagaaaacacaaaacaagcaaatcagatagttgttttttatattactagatggaccatttgcaacttaaaggactggaagaatttggtttcagtattgtacattaaatacagacatttagtcttcagattaagaaactttattaaatataaaaggaattaaagcacaaaaataagcaaattggatagttatttctaatattagtagatggaccatttgcctcttaaaggatcggaagaattggctttaatgttgtacattaaatacaggtatttaatcttcagattaagaaactttattaaatgtaaaggaattaaattttatatgctgattatatcaatggatagaaggcaatatatgctcaattacttttaggcaagcaagtttgggttttttttttaattgttttttcttttcttttttttttgagatggagtctcactgtcacccaggctgtagtgcagtgacataatttctgcccaccgtagcctctgcttcccaggttcaagcggttctcctgcttcagtctcctgagtagctgggactacaggcatgggccaccacaaccagctaatttttgtatttttagtactgatgggatttcatcatgttggccaggctggtctcgaacttctgacctcagggaagccactgtgcccacccaagtttgcgttttgaaaagattggtcaaatgagccctaaatatttgaataataggcatattttaatagtaatgatttaaattagtttgtaaacaaaatatataaagcaataattaggtccatatttttattttaaaaaactatacttttataattactatttttgatcaattttatagaagataaaattgtaatgatctgtgtgggtgtatgtgggaggcaactgcatttcaagatgtggatttaaaatattaagcagtgttcttaagaatcttcctgttggatgttcaatctcaatgagtgtatttgctgtagttccactccagtcatgcaggtgactagaccctttacatttttctttgcatcttctgacttctgaatcaaacagatgtttttttatatttttgctagtggaattaaggtatattatggttgaagaaatggaattaattttacttgctctgtatggtttattaaaatatcatatttaggctgggcactgtggctcacacctgtaatcccagcactttgggaggctgaggcaggtggatcaccttaggtcaggagttcaagaccatcctggccaacgtgttgaaaccctgtctctaccaaaaatataaaaattagccgggcgtggtggcacacacctgtattcccagctactcgggaggctgaggtggaagattcacttgaaacccggcaggcagaggttgcagtgagctgagatcctgccactgcactccagcctgggcgacagagtgagactctgtctcaaaaaaaaaaaaagtgatacttagcagttggtaaagtatcggcattcctgtttcaatggaaaatctaggatctgagaagttaaataactcatccatggtcacagagttagtgagtggaaaagtcacaggtcaaccaaaattaacttagttatttgtatattgagtaaaggtttttgcttttttcagaataagccaaaataaatatttaatcgattgtgttttcttttataatgatagctctatttgttttgttagtctgactcttcttctccttcttccccttccccttcccctccctctccccccctcctccttcttccttctttttttcacagggatggttttagattgtcatctcaagaagctgcttctagttttggcgatgatagactactaatagaaaaatttattgataatcctcgtcatatagaaatccaggttggtacatttaagatgctttttcattattattttaaaataatatcatttaatcctattggaattatcttttcttccatttagaatgattgtgagttgtgcctttagaatctgttgtactttccgttaaagtgctaggatgttggttgggattgggaatgatacaaaaatctacctccaaaaaatgcattcctaagatagccgaccaggctaatctccttccaagactggaccattatagggcattttttaaaaaagaaaagtgcctgacctggactcctgtgctacttcagtttaccaaatgtccgtgtagcttgctgtgacaggtgttctgctaggagcttgttgtatagagatctgtaaatcatttcttctattcagtttaagatattcatccttaaagtggttacgtaggggcatagattttggcaaaacaaaatgggttttctaaaataaaacggggaagaagacaagtctgttgaagttttcatttgcctgttgaaaatgccttcatgctaattttatacattatgactatgaattgatatgtaatagctaaaattgataaaaacaaatgtcaaattagaaataatgaattttaagtatttttttaaatcttaatttggtgtggagagggaaccagataaataaaaggttatttgctgaccttatattttctgacaggggcatgatacaaaaagtcctagattctgtcagtttattccttaagtttaatggtcactttcatagatattatttatgggtggaaaatcatcatttcaatcctcaaattttctaaagtgagaaaaaatatccaaacttatataatcagttggatgttttacaacattgaacacagtttctttctgaggctagcaggctttgttttttgcctttttaaaaagattttctaaattgatatatcacatataatatctgtatatcatatatacggtatctgtatatcatatatacagtatctgtatatcatatatatggtatctgtatatcgtatatatatatatggtatctgtatatcgtatatatatggtatctgtatgtcatagatacagtatctgtatgtcatagatacggtatctgtatgtcatatatacggtatctgtatgtcatatatacggtatctgtatgtcatatatacggtatctgtatatcgtatatatacggtatctgtatatcgtatatatacggtatctgtatatcgtatatatacggtatctgtatatcgtatatatacggtatctgtatatcgtatatatacggtatctgtatatcgtatatatatggtatctgtatatcgtatatatatggtatctgtatatcgtatatatgtgatatctgtatatcatatatgtgatatctgtatctcatatatatgtgatatctgtatatcatatatatgtgatatctgtatctcatatatatgtatatatatatacagtgaaatccataaatcttaagtgtgcaattgaagacaatttctatacacacacatctaattgtgtaacaaccatccaggtctagatagagaatgtcccatcacaccacttcctagtcagtccctacctgtggccgccaaaagtaactgctgttcctatctgatgtcagagattagttcttaaattgcataaatgaaatccagtgatatagtctgtcacgtcttctttttcacacatcatcatatctttgagattcttccctgaggctctgttgtcctttgcttctaagaattgctctgtgatctcccattatttgactcacctgcagtttatccatattgttgttgatggatctttgggtttttagtttctttatattagaaataaattgctgtgtctttttatgaacatatatacatctctaggatagactgaggagaggtattgttggattacatagtaaggttatttttagttttagtgggtactctggttgtgctaatgtatactcccaccagaaatacatgagagtttccattgatgccacccctgccaacgtgtgatattttcaatttttgaaaacatttaaccatattagtggacttacgatggtatgtctgtttaatttgcatttcctggatgagtaatgatgttaagcatctgtttataagtttattgaccatttgaatggcttattttgtgaagtgacttctcaaactttcatccttgccttcctttttcaaattagatttttaaaaattactggagtgtccgagttctgtatcaattttgtttatgagtcctttgtcagatgtatgtatagtgtatccttctcccttcatgcggcttgcctgttcactttgataataatgtctttcaaagaacagaagttctgaattatagtgaagtcaagtttaagtctactttgtgtaccctagttaggagtttttttgttttaggtatgatatttaagtctgttactctcctttacttattattattttgtttgtttgatgtgaggcagggtcagagtaatttttaaaattctgatatccactttttccagcatcatttattgcagtgaccttttgttgcatattaagtgagacttcgtcattgtcttaactattttgcttttataataaatctagaaacctgattctgtaagtgatctaaatgtattgtttttctgcagatagttttcattctctttaggttctttgaatttccgtgaaaagtttagacttcacctgtcaacctgttccccctacggacacctacgcctacacccacccactcccacctctacctccactcccacacaccccatctgatgggagatttgtatttgggtcgtattgaatctagagattattctggggagaattgacatcttaacaatgttgaattttctttcttccctctctccctccctccttcgctccctccctccttctttctgacagaattttactctctctcccaggctagaattctggatattttgtgaaggtagaccagattttctaatagatggatgttatgtacaagaaaaaaaaataaggtgattttagggttttggcctaagaaatgagaagaatggagtgggcttttactgagataggaaagactgtgagatgtgcttgtttttgagggaggaaatcaggttataaagttggataaatcaaggttgaaatgcccattagatatctaagtgtagatgttgagtagacagttggctatttaaatctgtaatttaagggagatatttagattgtccttcttgtaagatcgtaggggcagaattaattttgtccttcactgtattccccatctagcacttgttcacactactggaagaccacttaggtaggctgttttatctttaactagttgaatttcgtaacaggccatgaggtccttaagggtagagagtaggtcttactcatttgctgtccccagcaaccagaccattgtctttgacattactaatactcaataaatgtttgttattttgtgttaaataattacatacctagatcagctttttagtttattttatttagccatggcatacagcctgggtgatatttttaaacataagtgaaaatgcctcccagttaataggccacacagatgttctcatatctcatctatacttagaagggtttttaatttacttttctttagttttcacttatttatattaagtaatttatgcacatgataaagggtaattaataaaaagtaagcatcccttttactctattctaagtcctctagtttctgtccctaaatgcaggcaccgttactgtttcttggctattcctccatacatagtctaagaagtatatgtgtgtatgtcacctattatttttcacatgagccattatatactatgtcctttccacaatgaaactgcactggtagtgtgaatggcacctctctttgtggcataaaccagtatttctcaaccagggcactactggcatttcctgggttgggtctagggataccaacaggcttgcattatgtgacattgtctattataataaagctttttcaggaagcagtatagcttagagatttttctacattcagtacgtgtaaacctataaaatttttaaaaaactcatgatgcatttaaggattaacttcccttaaaagcagtatttatttataatgttttctgattacatggcttcctcatttatttaatggaataaataatcagcaaatcatttttgttgaatgcctagtaagtgcacagaatttttaaaaaatgaactgggagactatacagaatttagagaagaacaaactcttgattctgtatatgaatctgatattttatagttggaaatatttctgagaattcttggttattttggctttatttcttggagactgtctacttttactttcttgtcaactagaatttaaaaagaggttgagagttattttaatgatttcaaatatttttagatttacttcatgcagccacctttgagtcttagaaaattccagcttattggcattttattgctgttatgttttccttcattgcttggaatcattcttgagtttcagaaagggtttgttcctaaaaattaactttacagtcatatattaactatttattttacattttaccaattatagccatgatctttatttgatttttttcagaagccatatcaaatattaagattgatattatctgctatttataatgcacaaagaaacagaatgacttgttcagagaagttgcatagctgtttggaactaaaattagtgcctggtctttgggcttctaaaacagatcttacctctgtaaacctaatatatgtattcagaaatataaatcaacaccttaaatctgaaaatagattggtccgtttctgaaaatcagatgttctaggcaaaaactttaatgaagagctgcttttgagtttccagatttagctgaaaaagatacatgttaaatttgaatttcagattaacaatgattttttaaaatcactgttccatgtagtacttgggacatagctagaaaaaaattattcattgtttatctgaaatttaaatgtagctggatatcttgtattttatctggcaatctcagcttattttccattacaggttgaatgtatctcttaactgaaatgcttgggaccagaagtgtttcagatttcagatttttttgggttttggaatatttgcatttatacctgctggttgggtatccctaatctgaaaattcgaaatgctccagtgactgtttcctttgagcgtgatgtcaaaaaatttcagcttttggagcattttggatttcagattttctggttagagatgttcaatgggaaaaactattatgtttgtatattaactccagacctttagcagtttcctagaacaaaaataaaccacagtacagacatccatagatagataacagattacatattgggtggaaatgcatacaatgtcatttcccaatcaacagacatttaataatgttaacatcaagcagatgtttgtaataaagctgcggtggcactcctcagcaacattgacatccagtgtttatccccttcactaacactcagtgtccttcacaaaatttgtacaactgattctgatgttttactcgttgtatttgaaaggtgatatgaacactttttcctcaaatctttttgataaaaatgttttattgagctttggagtaataaatatagttttcctttgttaacatgaatcaaaataatgttttgagaggtatgtatatactatgaagtttgaatattaaaaaccaagagatgttgcatgcggaaaatattaaccatcatctactttgtgggtgtggttatatggtttttcaaatggtattgctctttcaggttctaggtgataaacatgggaatgctttatggcttaatgaaagagagtgctcaattcagagaagaaatcagaaggtggtggaggaagcaccaaggtaagtctcctaagaaacatttataaagcggctgcttttatgcatttcattcattcattcattcattcatcattcactgacgcatgcattcagagacagggtctcactctgttgcccaggcagtggtgcaatcacggctcactgcagcctccacctcccaggctcaagtgatcctcccaactcagcctcccacgtagccgggactacaggtgtgtgccaccatgcccagctaatttttgtgttttgtagagatggggttttgtcatgttgctcaggctggccttgaactcctggcatcaaaagattagcccacctcagcctcccgaagtgctgggattataggtgtgggccactgctcccagccacatttctttttttatttgtttgctttatcagctacaattgcactaatgttcatgtagactctgttactgcatatttttataattaagaatttgttacttgatttcctcagtgctttaatgtgtaaaagggagagaatacttgaaaaagaagtgggtttttattagaggagaaagttgggtagacagccaactgtgacttctgcaggcttctaggaagtatggaacctgatggtacttcacgggatttctgagatatatgccttctagactttcatgttggtgaagggttcataaagttggtcctgaatttatcctaccatgaaaggcttctggagtgtggttcttggaaattccttgaattatcagagccactttgggtacttctccagggcatctttcatgagtttggtgtatggggcctcatttctcatttgatgctaggttgctatttgtatatactctggtattctctttgttcttaaaaatcctcaggtgagtgttcctagtaatttttaattaccagacggtaagaagtatagcttattgtagctttaatcagcagagctagcatatcttgatataatgcctatatagtttctgaaaatagtaagtgagaatgtgagtatatttttaatcccggagtaatggtaaaaattcaactctattttagttacattggtttttaaaaatatggcatggtgttattagttttaaaacatggaccccaaatcctttgccatttttctctttgagcagtgaggggaaggatcattgttcccttttcttgattctgtgctctgtgaaggcttgacccgtagactacttagaagtgatgctgtgccagtttccagcccaggccttgggaaactgccagcttccgcttcctgttctcatgggatgcttgtgcttacacaccagccagtatgctgtgaagaactgtgtagcttacataagatgtggccatctagttctcaaggcccaggaacaggatgtaagaagggaggaagaagaaaagccaaagggaatcctcttcctgtgtctttaggaagatcctggaaggtgctgaagctaattacttggtgttgatctgaagttagacacttagctagggagacttgttagtatctttttcttaagaaaccatgtgctgagctagaactagtactgtagtactgtagtatggaggaaggggaaaaaggatacctgtggaacagtaagagtcttcaacacacatgtcttgcaattttctgtttccttgactgattatcaattccaattcaattaacactctgtttttagtaaaaacctactcaagtgttacctgggatagaaatctttcccagactgggaaccttgaatcataaaatgtgtttgttttttctctttgtctagaaatacaaacttttcataatgaataccttatctacttatttagagaaaaaaaggaaaatatacagcagtaggaatcaaaatgaaaaagctagaactcatcattaatactgacctgatatgtatttgtacactgtgaaatgttaaaataaatggaatgtgtagttttcagttcctggagtaagaatcggctgggcatggtggctcacacctgtaatcttagcactttgggaggctgaggtgggaggattgcttgagcctaagagtttgagaccagcctggacaacgtagtgggacctcatcttcacaaaaaagtaaaaaatcagctgactgtggtggcatatgcctatagttccagctacttgggaggctgaagtgggaggattgcttaaccccagaggtcgaggttgcagtgagccgacatcatgccaccagattccagcctgggtgacagagcaagaccctgttctcccccaccccccgaaaaataaaaataaaaaaaagaatctactaatgtgctttgagggcaatgctagctagggtcactcatatctctggatatctagcagggcttttgaaaagggcaagggcaagatcaaataggagaaagatagtttcacagagctgcactgagattctccagatgttatgctattaattgttagttggggttttttttagttgcattaattttgtcagccagttattgttgaaatgtcatctatgtctatacattaggttaatgcaaactatattatagataattcataacacttgaacccattgatttattgtaacttcaccaaaagggagacagtaggaagtacacttcccacctgtgaactcttccccctcccccaccccaatccaacttgaatatattcaaggctctgagtctaactagcaatctatatgaaatagaaatgtaatatgaatgttaaaagacaccgtggggttgcatgcagttgaaccaagaatgtgagaaataagacagtaaaatgaccagatccttggccagaaaatggggaaggggcattacagattaaaagagtcttaagatacaaaagccaatcaaatgcagttttggaccttatttggatcctgattcaaagaaatcagctgtataaagatatttatgagatagagaaatttgaataccaagtggatattaaatgcttttaaggagttcttgttttttgtgtagttgtgttacaaaagggtactttatctcatagaaacagacatgtatgtttttaaaagtgaaatgatacctaatttgggatttactttaaaaacaataaagggtgggcctggtagagaagtgggcaagtagcatagataaagccagagtggctatgtattaataattgctatatattggaggcagcttcatgcaagttttttatactattccataataaagcttttatagcatgtcatctcaatcctgctcatttgagaataattttaatccacaagtagaaaagtagttaatgttttgtttctcagagcctttctttcatagaagcaaaatctgtgaaaatgcaaagtggtttgatgatatttttttcagggtttgttgaagtcattttagcttaacttgcctgcttgaaggtgggtttggtatcttgaagccaaacgtgcaggatttagtggatgtattgctgattcttgttatttgtggcagttatgttctctaaagtcaccttgattactgaattagtgaacactgaataatttcccctaggggaaatacagggttaggttcctgcgagcctttgcttataacattttcctcagtggattaatacataattttgttttttgtgtatttctcatttaatatctgtggttgattcattaacagtgaactcacaatcctggccaacaagactataacacgtgcctgagtaaagcttatcccacacacattttctccagacagtacttcatggccttcttgcacatgggaaccccagacagcacctaaggacaatgcttgatgggccatttcacaccatgaaatgacacacacacacacacaaatgcaaaaaaagtgacactaaacagaccttgaaaaggatgcttgttatagtatgagcattgaaacgagaagggagagcatcaccttgttcagccttagcatactggagtctcaaatttttcacctctctgcacttgttcacaaaggaccatgaaagcgccttaagtattgattttggggttacaaataaatttcagcaagtaggcagatttgtaaatatggactacatgagcaatgaggattgattgtgtatgttagatactaataagttatttttctcccagtttttggctcgaagcaattctgaatatatatgttaaatattagaagttgaagagtagttatatattttgtgaatggattgaagttgcagagtaatgtgaaaagttcaaatgttttatacaaatctaaagttgacttatttgagcatgttatgcttaataatatagtcaacatatattataaaacatatataaagcacaatattttgaattcttaaattggtatagatgatctatatctgagtaaactttaagaaaatgtttatgtaatgcacacaaaagataacttgatttttgtccgaaatgtagacaaacatttttttgtatatgtagcatttttttggatgcggagactcgaagagcgatgggagaacaagctgtagctcttgccagagcagtaaaatattcctctgctgggaccgtggagttccttgtggactctaagaagaatttttatttcttggaaatgaatacaagactccaggtaacaacaactgttatttattcctctccatgcctctgtactttacccttccttctccacccttttttgttttataaatgttaaaaaattaactccataaagtgttaaataaagatttagtttttatgcttgtgctaagacatctgttaggaatgacggatagtatccctctaaagttcaatgtctagacctctgctttgtcactgttaatactttatgttggaaataccactttgtttttttcttgaacctttctagatgaactgtatttgtcagtgtgtatgtgctgttaagaaaaattactctagatattacaaataggaagtgatacagtgattgcaaaatctttggaaggatggaggaaggaagggtacccagagtgaacttcggtggtgactcccactgctgtaccactcagccaggctcccagaggaaccggcacctctgccacagtgaggacgttgagaatcaagtggctgcccttggaactgttggctttgggggacataacttccttagttctaaccaaatctcaggaagcgactggcgttgtaaccggtggctttatttccttccttcttcccttttttctttcatttaaattgtgaactatacagaaacatacatagaacacaggtgaataattgaatgtattattataaagcaaaaatcaatgtaaacatcaactgggcctagaagtatttacaaaacagccagctctttttacactagcctcattttcttctccttctcaatgattctgattccccctccatcttccctagagctgtctcctatctgactgacttctcagaaccttcagttttcatatcattcttcctttgaattacgcatacctaagcagcattattacttttgtttgttttttaaaactatattaatgggatcgtatagtattcgttcttttgtgcctggcttcttttttcagcatggcatttgtgagatttgtgctatttcatggaactcctgtatgatacattttctaagaaaatgccactatttctttatctgttagatttctgtagatagtttatttccagttttatggaatttgtgttagtttgctaggactaccataacaaatgatcattaactatagcttaacacaacagaaatttgttctcgtacacttcaggaggccagagtctatcatgcaggttccagccgagtgggttccttcctggggggttggagggagaatccactccatgcctctctcctggttctggtgttgccgacagtccttggtgttccttggctttggcagcataactctaatccctgcctcagttgtcatattgccttctctctgtgcatctctgtgcccagggttcccgttttctgtagggacactagtcacattggattcaggacccttcccatttagtacggcctcatcatacgtgatttcctctgccaagatcctgttttcaagtaaggtcacagtcacaggttgtgagtggatgtgaattttgacacgacactcttcagtccaattcaccattcaaaaaacacatatggcctacagagataaatagattagtacttgcctaggactggggtgggtgagtggggggattatgggctgatggctaaggggtggaataggacaggagagactgaggaaggcatacttatgcctgaaaacagtgtcaactcttcttccgttaggcccttgggggagggggtggggggggagggggtgttgagtcactgcaggcatgagctgggtcgagcttaagccttcctgcagtggttttctcacgtgcaccaaggggccgcttgtgggatttctgcatgcctgcttcatcctgagcttgagggcttgcctctgaccctgtgcttcatgggagccgtgtcttcatgcctgtgcctctttcccagagggagactcctgtgggccctggttagccctaccatgggtgcaggagggctgttttctgttcgctgtgccgtggcggtagaccgtccttgtgtccttgaactttgaggtgagttcagtagtggccctgctgctccccagccgtggggaagctgatgttctgggctccaggtggatttctgcctctttcctgatggttatcttttgcgtgctatggctttcttcatgcttttactctcgacctacctgtttgaagacagttcacgtgtgcctctgtaagcagtgtataatttttcagcccagtttgatatgtttgtcttgtatcttgaccatttgctccttagaaagttgacagaaatgctggtatttttgagtttaaatttctaatttttaaaaatgttttcttcttgtccaatctctggcctttttcctttttttttctttcttttgcagtatttatcatttaattttttcctgtacaagtttgggggttataaatactgctgatcttttggtagaacctctacattacaacacacatccttaatttatcaaaaactgataacagtgtcttttcacctgagctgccagactgacaagggagcttagaacatttaaagtccgtttactgtctcctgacttgggtacaattatcccccgaggccatttctcttattattttagtcatcattcattccattcctcccacatatttacctttctttgtctttgtttctggtagtttcttttagaggtttacttgggacaatctctttttgttgacagccaatgactttatgttgccttgttcatgaaatgcgtttttactcttcttagacgtcttggctgtgggccgtggctcacccctgtaatcccagtgctttgggaggctgaggtgggaggatcccttgagcccaggagttcaagatcagtctgggtaacatagtgagaacttgtctgtaccaaaaaaaaaaaaaaaaaaaaaaaaaaaaaaattagaaatcttagtttggccagtatttttttcaatttattgaaaatattatttcactgtttctggtgagacttccccactcattctgcattctgcttatttggacataattgatttttccttttggtagcatttattaatttctgtttttgttagatttcctttaactttttgctgattcgtgtacatgtatacatggaattcattgaatattttgtctgtagattaatgtcttttaattttttttggaaattctccaccattattacttctggaacaatctcacatacacagatgaataaacctataactttcattttagacctccttaatatatctcttatgtttcttatgctctctttgatatttttcatcttttttggataatttcttctgtctttcttaccttcccttatgctgtatttaattaattaatcacccattgagttcctgatttcaattgtttatatttcagttctgaaatttctatttggttcttttaaaagtatgattcattggtttttatcttttcttgtctcctatttgaattttcaattttgacttttattttttgaacataattaacttatttgttttgtagtacatgtctgataatgttgacatgtgaagtcttatgactacttgtattaactgctttttatgctgtttcttggttctgctgttgagttcctgttgggccttgttattatactgtcatatacagttattttaaaaattgttattaatcaaaacctaagatgatggattctttcttatagagatttttcaaatttttttctgccacatgcctatggacagtagtatttgtgactacggcaatctaagctcaaagtgtaaggctccttgaactcctgaggggatacacagcccggttgcagttctagagaatggttggttttattccagttcagtcttatcttgaggttgcattcctttatggtgcccactaaaagtgggggtagtttatcaaggttctttgataaactgatactttggtggcctcttatcttcgtggttatgcttttgatttgttgatgccaccaaaagtatagcttatattcatagtccttttttcctggaatggcaaatgacgttagggcaaaaatggtgttgagtgttgggtttgcaaatctgtgttttcatcttggttttggctgatcccttcctatattcttaccctgtgatgtttttaagaagacctcccccatctcccattccccaccagttgttttctagtccccaataagcccaagttccaagctgagtggctttagaggtacattatgcctatagattaaataagtttgtgtcctgactctcaacaccccccaaaagcagtgagcgggcagtggaatgacagtctgtgcctcactgctatctcacttttcctttccaaatctcatgcatttgcacatccagaacctcatgcagtcacatggaaacctcagctgtaagggagtctgggaataggctttttaaccatctgtattctgcagtgtaagagtataccctagaaggagtttggagggaaagttcagtgccagcccaccattttcacatgaatataatcaccaaaattttaatctgtaagttatatgtaaaaagttaaaaacattgctgtattttcattgtaaagtataactgtcaaataatgtggctgattttccttaagtatggcaaaagtgatctatctagatgcattttgagactagtattgtaaatacttgtagcattttataggtagtagctcagtagttgttgcttaaaactcatacttcctttgaaatcacctttgtagcctatattttattttgtgactatctttagaagtgacagaattttgccttttgaaggttaatttgattttgattaaaatgtatctttataactaagtatgtctaattagattattagctgggaaatcatgtttttggttaaagtgaagactttattttgtcataatgagaaaaatagcttgtaatttgattctgaagacaatttgagacgactgcaaaatatttgtattctattctagaccaaagagatctgagattttttaattgaggtacttatcagtatttatggaattgacaaatgggcagtttgttattctgttcttgtgttatctttttttccatttgtttctggctcatttatctcaggttataagtttgttcaagtttgtaccatggttgtttctggtataaaacccgatagttgattttttttttttttttaaacagagtctcactctgtcaccaggctggggtgcagtggcgtgatctcggcctgcaaacctccgcctcccgggttcaggcaattctcctgccttagcctccagagtagttgggactataggtgcgtgccactacgcccagctaatttttgtatttttagtagagacagggtttcaccacgttgaccaggatggtctcagtttcttgaccttgtgatccacctgcctgggcctaccaaagtgctggtattacaggcgtgagcctccgtgcccatcctgtagttgatatttttatcgaataattctatgcagttggtcaagactatctaagtacctatgttttgtgtattggatagcttgctaggaaattatgttctataccctcaaaaaattataaaaatatttcaagaaaaaaaatcaaattcacaaagattttgtcatattaccagatctaatatgacaaaaattgtgaatcattaactcataatgatatgaatcagtgctatagaatgtcatgtccatgttcggcctgaaattgccccacttctcaccggtggtctgggccccacactgtgagaaaatatttcactaatacctgcgcttagcaaacgtcccaaggtctctgactgattagagctcttgttcacgaacagagctctgatagtacctaatgctgttaagcgtgctattttaatagcattctatgatatttaacatcatactttgagacatttgtctcccatgtagtgtttaatcatatttttctctcttgtggtttacttccagtgactgtgatcctgtcagttaccagaataagttaattttaattttttagaatgtatctgtgtgatagggggtatttgatgtggaggatataattaaatgggagcatgaacaaagaattttggacttcatatgtgttcagaaaactattcttacatattccaaagatttctttctgatattgtttaaacaatccaatttgtttttttttgagacggagtcttgctctgtcaccaggctggagtgtagtggcacgatcttggctcactgcagcctccacctcccagattcaaacaattctcctgcctcagcctccggagtagctgggactacaggcgcataccaccacgcctagctaatttttgtttttttagtagagatggggttttaccatgttggccaggatggtctcgatctcttgacctcatgatccacctgcatcgacctcccaaagtgctgggattacaggcatgagccaccgcgcctggcccaagtgttcttttaatagtagacattctctttcaaatttctttactaaccttaaattataatacttaaggcacattcaccaaattctttatctcccaagatatatgttatctctaattagtgtttcagtttgaactagagggctataattttctttgttctttttttattttctttgaaatttcctgattgaactttcactttttccagcttcagaactgtgttttgtttttgtttttgttttttttttttttggtaacagaaatgcatcttcactttctacattttcttaagagtgaaatttgaaataacaatacagtttctccataaagagatgcaacactaagaaagtcaccgcgtttggtgcattaatagttggttccgttgactggttttgttctcaatctggtcacagtttatgtaactgaattacctttgctatcttcacatatttttgctttattttttttaagtcactggttttctgttgcttaaagataaaatttaaatgcttttgcatcacaacacaagcttttttttttgtagccctgatttttcccccagagtcctgtttcttgccagtgccgatctctgtgtatgaattgcaagagactcctttctttttcctgaaggtgcctttcagtttgacttctttgtgccttgtatcatgccactcccattgcttggaatgttctctgttcacctctcacagtgaacactgagctatgtatctacctgcacacccacaccacacacacctgtctcccctctctgaccatacttctccctcatctcacctctctccacatttgaaagatggacagctagatggagaactactctacggacactaggattttgttaaaatgctattttattgaagtgtattctagtagtcccccttatccatagttttcctttccaaagtttcagctacacacagggtctacttcatttcaaatatattaaatggaaaactttagaaataaacaattcataagtgttagattgtgcactatcctgagtagtgtgatgaaatctcacaccatcctgctccatcctgcctggtacgtggatcctctctttgtctggcatctccatgctgtagacactccctctccatgagtcacttagaagctacctcactgcaatgagacatgatggtgccactgcactccagcctggacagagcgagaccctgtctctgaaaaacaaacaaacaaacaacaacaacaagaaaaaacagaaggaaaaaaaaatccgcctcggtgatcacatcgactgtatgatacctcagtgcttatgttcaagtcacctctactttatttcataatggccccagcatacaagagtagtgttgctggcaattcacatatgccagagagaagccataaagtgcttcctttaagtgaaaaggtgaaagttctagacttaataaggaaagaaaagagtcatgtgctgaggttgctaagctctgcggtaaggatgaatcttccgtcggtggcattgtgaagaaggaaaagaaatttgtgctacttttgctgtcaaaagtcaaacttcaaaagttatggccacagtgcatgataagtgcttaagatggaaaagacattaaatgtgtgtgtataagacatgaatagaaaagtgttctaattgacagcaatcatgttctatactatccacagtttcaggcatttgctggggacctaggaacatgtcccccaaggataaggggggactactatatatgcaatttgctgggataattttagtttcttattttgttgaatggtaatactcagaatttataatactttgtttaaaaaaatctagtggttcataagagtctacaatggaaaagttactctccataccacacttttatcacagccatttatttttcctctgttgaagcaacctttgttttttttaacatactaatttgggagtattccatgcctaatttaaagcattatctttttcattttaatgacttctaataacctgtcatagggatgtaacagtcatataatttcaccagatctctatcgataatttttccagtattttgctatcccaaataatgcaattatgagtgaccctttatatccactttgcacgtgcagaagtagaattgctgggaatatatgtgcttttataaattagttaagtattatcagtttacctcttaaatgagagcttgtttcttctctccctggccaaaagtgttttttgccttttgatctttgtgtgatagtgaaaaatggtatattgttttcattgtttatcatgaatttttctttatagattcatttatatttctgtgaattgactattagatcctttgccctttgggttttcttattgatgtgtaggtatttgcttattgttgggggaaattagccctttgtgatattgtcagaaaggaggggctttgtgaatattttcatagggctacagggcaggtgctttctgagcaaagaccctggcagttgtgagaggtgacagcgtgctggcagtcctcagagccctcgctcgctctcggcgcctcctctgcctgggctccaactttggcggcacttgaggagccttcagcccaccgctgcactgtgggagcccctttctgggctggccaaggccagagccggctctctcagcttgcagggaggtgtggagggagaggcgcaagctggaactggggctgcgctcggcacttgcgggccagctggagttccaggtgggcgtgggcttggcgggccccacactcagagcagccgggcaatgaggggcttagcacccgggccagcggctgtggaggttgtactgggtcccccagcagtgccagcccaccgtgctgcactatggcttggccccaatattttctctctgatggggaaaaatggccacctgagggaagtacaaattacaatactatcctgcagcttgaccttttctgtaagagggaaggcaaatggagtggaataccttatgtccaagctttcttttcattgagggagaatacacagctatgcaaagcttgcaatttacatcccacaggaggacctctcagctcacccccatatcctagcctccctatagctccccttcctatgaatgataatcctcctctaatctccccccgcccagaaggaaataagcaaagaaatctccaaaggaccacaaaaccctcctggctattggttatgtccccttcaagctgtagggggaggggaatttggcccaacccgggtacatgtccccttctccctctctgatttaaagcagatcaaggcagacctggggaagttttcagatgatcctgataggtacatagatgtcctacaaggtctagggcaaaccttcgacctcgcttggagagacgtcatgctactgtgagatcaaaccttggcctttaatgtaaagaatgcggctttagctgcagcccaagagtttggagatacctggtatcttagtcaagtaaatgatagaatgacagccgaagaaagggacaaattccctaccggtcagcaacccatccccagtatggatccccactgggaccttgactcagatcatggggactggagtcataaacatctgttgacctgtattctagaaggactaaggagaattagaaaaaaacccatgaattattcaatgatgtccgccataactcagggaaaggaagaaaatccttctgccttcctcgagcggctacgggaggccttaagaaaatatactcccctgtcacccgaatcacttgagggtcaattgattctaaaagataagtttattacccagtcagccacagatatcaggagaaagctcgaaaagcaatccagggccctgaacaaaatctagaggcattattaaacctggcaacctcggtgttctataatagggaccaagaggaacaggcccaaaaggaaaagcgagatcagagaaaggccgcagccttagtcatggccctcagacaaacaaaccttggtggttcagagaggacagaaaatggagcaggccaatcacctggtagggcttgttatcagtgtggtttactaggacacttttaaaaagattgtccaatgagaaacaggctgccgcctcgtccatgtccactatgccgaggcaatcactggaaggtgcactgccccagaggacgaagattccctgggtcagaagcccccaaccagatgatccaacaacaggactgagggtgcccggggcaagcgccagctcatgtcatcaccctcactgagcccccggtatgtttaactattgagggccaggaaattgacttcctcctggacactggcacggccttctcagtgttaatctcctgtcctggatgactgtcctcaaggtcccttaccatccgaggaatcctgggacagcctgtaaccaggtatttctcccacctcctcagttgtaattggaagactttgctcttttcacatgcctttcttgttgtgcctgaaagtcccacacctttattagggagggatatattagccaaggctggagctattatctacatgaatatgagaaacaagttacccatttgttgtcccctacttgaggagggaatcaaccctgaagtctgggcattggaaggacaatttggaagggcaaaaaatgcctgcccagtccaaatcaggttaaaagatcccaccacttttccttatcaaaggcaatatcccttaaggcctgaagctcataaaggattacagaatattgttaaacatttgaaagctcaaggcttagtgaggaaatgcagcagtccctgcaacaccccaattctaggagtacaaaaactgaacggtcagtggagactagtggaagatcttagactcatcaatgaggcagtaattccactatatccagttgtacccaacccctataccctgctctctcaagtaccagaggaagcagaatggttcacggttctggacctcaaggatgtcttcttctatatttccctgcactctgattcccagttcctctttgcctttgaggatcccacagaccacacatcccaacttaggtggacggtcttgcccaagggtttagggatagccctcatcggtttggtcaggccctagcccaagatctaggccacttctcaagtccaggcactctggtccttcaatatgtggatgatttacttttggctaccagttcagaagcctcgtgccagcaggctactctagatctcttgaactttctagctgatcaagggtacaaggtgtctaggtcgaaggccccagctttgcctacagcaggttaaatatctaggcctaatcttagccaaagggaccagggccctcatcaaggaacgaatacagcctatactggcttatccttgccctcagacattaaaacagttgtgggggttccttggaattactggctttggccgactatggatccccggatacagcgagatagccaggccactctgtacgctaatcaaggacacccagagggcaaatactctggtgggaatcagaggcagaaacagccttcaaaaccttaaagcaggccctagtacaagctccagctttaagccttcccacagtacaaagcttctctttatacgtcacagagagagccgggatagctcttggagtccttactcagactcgtgggacaaccccaccaccagtggcatacctaagtaaggaaattgatgtagtagcaaaaggctggcctcactgtttaagtgtagttgcagcagtggccgtcttagtgtcagagactatcaaaataatacaaggaaaggatctcactgtctggactactcatgatgtaaatggcatactaggtgccaaaggaagtttatggctatcagacagccacctacttagataccaggtgctcctccttgaaggacccatgtttcaaatacgcacgtgtgtggccctcaaccctgccacttttctcccagaggatggggaaccaattgaccatgactgccaacaaattatagtccagacttatgctgcccgagatgatctcgtagaagtccccttaactaatcctgaccttaacctatatactgatggaagttcatttgtggagaatgggatacgaagggcaggttacgccatagttagtgatgtaaccatacttgaaagcaagcctcttaccccagagaccagtgcccagttagtggaactagtgcatcaccctctcaccctccctctccccaccaccaaaagttgagaaggggcagatatgccagcaactcttctacaagctctaattttaatagtctgagctttcctttccagatgtgcatacccctctgcatgtgtgtgggggggaagcaggccattaactacgctgcctcatggggaagtggggtatgaggaacgggactaagatgttctgtgagtaaacaattgcactgatctatgattcagaaacctttttatttttaataaaattttctttttaattgtcagcaaggcaagttatttctatagaagggtgtgcccttacagatggagcaatggtgagcacacactcggacaagggaggggaaggggttcttatccctcacgcacgtggcccctgctgctgtgttgttcccctgttggctagggttagaccgcagaggctaaactaaatccaattggctaatttaaagagaatgacggggtgagtgctttggcgggagtcagggcagagcaggtagcaggtgatcggaatgagttagggtggagtaggtaactgaaaaaggttgctttacgaggaacttaagtttaaaagtagaaggcaacgaattgaacatattgacatattaattctttgaaacgaaatttagaactcatatctaacaacccctccccttgtatttccttacagctttcttttcaaacttttttttaatgtgtcttggcttagttgttttgcttgattttccaaaagaagaagcttctctggataaggtggaggatagttaagggaggagaaaccttttttttttttttaatgtcttggcaggattaacaaatactcgtatgaaaacataacagatatgatttgtaggtatttttccttatctattgcctttttaactttgtatgtgttttttcttcttgtatagaaagtttttatttgtatgcagtttaatttttaaatcttctctttgtgatttcaggagtgacatacttaggctttctgtgctctatgagcaatcaaactgttttctttcatgttttcatcaaatatttcatctttaatggtgaaatcttcacttcatttggaattcattttattttattttccaatggctacctgattgttccaacaattattgaataatcagtcttttctgtaataattcgaagtgctatctacattacatactgaaattgcagatgtatgcagacctattacttcactcttctttttttaatttttctgcttattcatctcctagcaccacactggtttaggtattatagctatatattatagtacagtatctagtagaactattcctttctcattacttttatttttcatatgaaaaattagcctatagattagcttattgtatttatatttaacagaagaaaaagaaattaaaatgacagaatctctggactattagataaatgtttataactttccacagatatattaattcctaaaatatgttctttttttcccttccagtgacatggaactaaaatatgttcttaataagaaaaatggttatgaaaaacatttatatttttgtcatcattttccttcatatttcaatctgaaagagtatattgtttctcttttacaaaagtaatggaaattggcatacttatatttaatcccgctgtctttacttcctaactcttcatgtttgctagttttattattagttctatgtgattgtagcatttcctttcttttctgtaggcatggctctcctggaggtttcatcttacttgtgtattttatcactttatggtcactgtcagcatcttaccatagcttcatgattagtgagttctttattttgatttgttttatataaagttagggggtttttttaatcaagaatttattttttagagatacctgtgggtagtgtatttgaattcttagatggattaaataaggttacccttatatttgaaattttaactcagatgcaaaccgtttgataccttcacaattgtaggactttaaacatctttctgtggtagaccttcagaattttatgagggagtatcaaaatttaagattatcgattgttttattcaattcctctatatatcttttctttttccctttaaaaattgaatctgtttgattaagaaagagatagacggagtttttatcataattttaaaaacgaactttatttgttagagcagttttgggtttatagaaaatctaagtacacagaattcccatatgcccctccctcatgccacaccatttctctacttaacatctcatattagtttggtgcatttgttacaactgatgagccgttatcgatgcattgtgggttttttgtttgtttgtttatttttagagagaggggtcttactccaccacccaggctggagtgcagtggtgagatcctagctcattgcagccttgaactcctgggctcaggcaatcctgccaccccagccgcccaggtagctgggactacaggcatgcatcaccacgcctggctaatttttgtattttttgtagagacgaggtttcaccatgttgcccaggctagtctctaactcttggggcctctgtctcctaaagtgctgggattatagccccgtgccagggcacccggcgatacattgtttttaactaaagtctgtagtttacactagggttgctctttgtgttacacattctatgagtttggacaagtgtatctaccattatggtatcataagaataggttcattgcctcagaaatctttgtatccaagacacctttgcatttctttccttctttccttgtttggttctttctgtctctcttctttcctttcctttttcccttcttttctttcccttcctccttccttcttttcctttttccctctgtgtgtctgtctcactttcttttcctcattgtaattttcacacatacagaagtacttcagaatagcaacagtagtagagtagagccctaggaatctgcaaccagcttcttatttacttcccagtgttgtttcacgtatgccttcttttcctcagttgttcctctcttggctggagtatcagacattatataaattcacatcatactgaagtatatgtctttaagttttccctacattcctaataatgcatatttttaaatatttatatacagtataatttgatgtatgtgggtttatgactcttgtacatgagttatgtggctattttcttgcctgaatgtttatcttgtttaaatgtttaatctgaaatcctactttgactcatgtcatactgtatctcctcctgttttgtctggtcctttattttaaagccttctttattagttgttttgtttttttagtttagaaaaaattatgtgtgtatgtgtatttgtatagatggggtctcaacatattgcccaggcttgtctagaactcttgggctcaagggatcctcctctcttggcctctgaaagtgctgggattataggagtaagctgctggcgcctagcctgaaaaaattttctaagaacctaatccaacattttcttttagtgtgaaaatttaattcttcccattttaaatacttgattttatttattttatcttatatttaaaaattttttttcttgttttccattttgtttttccttttctgtttgttgcttgaaataatggttaattatcccttttgtttcccattgataatttggaaatcctattgtcctttaaaattttatttatgtttatttttctattcagacagacgttttctctgtcatttgtaaagatgatgtaactagtttccttgactttccaacactgaagatttgctaagataatttaatacttctaagctatttttagtttatctcttcttttttagcttttttttagctcccatgtatacagcccagacacatctttcattatttgctatatcttcagctttcttttttgagatttctgccctagttcacttatttgtgtagcacattttttcatgaaatttcttcagtagaatgtgtggaatatatgctctgaaatgtcacatcctcaactatgtttctttagccctgaacgggggatactgttttgattgaatacaggattcttgattaggattgggtttcggttcttgtctttcaggagcatatgaatttcagctgtgttctagcttctagtattatgtctggtgtcattctgatttctttcccattgtagataatgtagtcttgctgtctgaaagtttgcccaattttttttatttctctctctctctttttttttcttgagacagggcctcatcctgtcacccaggctggagtgcagtggcatgaacctggttcactgcagccttgacctcctgtgctcaagcagtcctcctgcctcggcctcctgagtagctgggaccataggtgcatgctgccacgcctggctaatttttaaatttttttgtagagacgagatctcactttgttgcccagcctggtctcaaactccaggtcttaagtgatcctccagcttggcctcccaaagtgctgggattacaggcatgagccgttgtgtctggctctaattttcttttgatcattggaattcagggacttttttttccaaccaggatatgccttggtttgtgtttgtatacattaaccctgccttttagtccatgccctttttcagtgttcaggtttaagtattgcttcatttcagaggaagtttcttctgttatttaactatttccttccatcagcaattttctcctccttgtggaacttctagtttttgcaatttaggtctactggatatgtttctcttatgataactgtcattttatatttatgctgtgtctcttgacattatttctttattgatcttccaggttactaattcaggttgcaacagtggttatcctctcctataagtaactgactaaattgtgcaattgggaaatcacattattttagctcagaaattctaattgtgcgttacagttagccctccttacctactagttctgcatctgtggattcaattaactgtggcttaaaaatttaaaaataaaatgaaaatatcaattcaacaattaaaaaataccaataaaagcacaatatagtataacaacagtttacatagcatttacattgtattactataagtaatctagagatgatttaaagtatacggaaagggctgggtgttgtggctcatgcctgtaatcccagcacttttggaggctgaggcaggaggactgtttgagcccaggagatcagtgctgtgatgaaccatgatcatgccactgcactgaagctgggatgacagagcaagacccatttcttaaaaaaaagaaaagtgtacgggatgatatgcataggttacatgcaaataccatgttactttatatcggggacctgagcatctgtagagtttagtattcacaggggtcctgggaccaatcccctggggagatggaaggaggactcaggggatgtgtgtgcacatgcacatatgtgcattgctacttcttaagtttttaagtgcctttactgctttttgggcaaagttgtatttttctcctgtccttcagcagctctgtttcacttggtctgtgtaatcattattctgaatgttttttctttcttgtgctagtaatccccctgctgtggttttttgggggttatcagtactaagttctgcttcttgaaatattctaagtgacagcagcccttcagatggttgaagacatgaccatatctactccagaggcctggaagagcatatgtctcctagcattctcatctcaaggacagaattgagctaatttttattgactacttggattcctgggcaaagagaccacggacccatctggagcctttattgacttttcccctgaggtccatggctctttgcaagccagtctgtctccatgatgtgttcctttcacattcttccctagagttctctgaagctagtctccagttttcgttcagccacagagggagaagagcctgttcccagtttttggctctcatcttctccctagatcttggtgcttcccatgtcctcagctgcttagtaactctgggggagatagacagcatggagtttggagtggagaggtgggagccaggctggttccaggctgtttttgacagcttctcagagcaggaatagctaacctgggttatctggatctctcatgagctttagggaagtctgtgaaccctctgaagtcagatatatagttttttagtgagaaattcagtgagattcaaaattgtaaaatgtttcagaacaactgcagctgactaatggaggactcatttaatcattgtttttgttaattgcaaacatctactgttttcactcagagcaagtaaattctagttctcttccttcttagctgtgtgaccataagcaagttccttaacttctgtatgttttgatttcctcattagtaaaatgacattaattatagcatttgctgtataggattgtcagcattaaatgagtttatatagtttacaaattcaaaatagtacctggtttatactgagcacacattctttctgctaactgtgagtatcttatccataacatttgcatgctgtttattatatattggttgacatttttactcttactgttgtcattattattaacattattgctattactattgtcattaatataaagcctgtctgacatctgaaaagatggcaagccacatattaaataataactttctctcattcttttgtcagttaactgcaaaattattgttacatgtgaacaaacatatttgaaatattaaccacttttaaagagatctcctttctgttataagggtgtttgtgtaagaagagtctgggaggaaaaatggaaactgaaatcttccaaaaatgaagctgatagagaaaagtatttactacatggcttaggcctttgtgttaagattaatattaggaccctgaatacacctttccaaattcgtgtgtgtgtgtgtgtgtgtgtgtgtctgtttgtgtgtgtgtaattaataatttccagatgctaggtttttttttagatttaagtgttttggaaaagcatcctctgtatagtctacaaagtctataggagttagaaaattcccaaatagagaggaataaaatcttaataagtaagtaattaaaaccccaaacatggtcagtcagctgtccatatctttgagaacagacaggtaaactgtcccacttttgttagacttagtcagttgcttatgttgattggtacagtgcaggaggaatctacttttaccatggaaggaaaggtacagtacaattgttgaaattctgtgaaggctatacactctaatctcatcagggggaattctgcatcacagggaacctttatattccagaaagattttagaaatttttttgtaacttgattttgccctttgccatttgtttaaaaattaagaattattgcaacctaaattctggtttataacaattaactataattgaacaaataccatattctaatttcagactagttttggattaaaaaaaaatttctagacctgccagatgaaaatattttggtcttttatggaattggagtgtttgatagaaagaatgaggagaaattattgggaaaaggatttctaactaattgtaaaatttcattcttgtcagaaggggcattttggatgtgagcaaatgttgacctttttgattgtatttaaaatgatagaggccagggctctcaggctgtttagagtgagccagaattgggatgttttggcatgttttgttctgggaaactgaggatagaaggtaggatgtgttataccctcccttattatttactgaaccttagtagaaaatgaaggaaagaagtttttggtatacagatatgtatagataagcttttcaggcacttagatttggggttttgttttaaagcatattgtaaatgatattgctgtctgagttctggactctttttatctatgtttaactttttaaaactggtctttgtattagtttgctagggctgccataacaaagtatcatacactggggtggctgaaacaacaaaaatgtgttttctcaaagttctggaggctggaagtccaaaatccaggggccaacagggtcagtttcttttggaggcctttctcgttgcttgtgggtggccatccactccctgtgtcttcctgtggcctctcctctgtgccttgtgttgtctgggtcctgatcttctcttatgaggataccagtcatgctggattagggcccactctgatgatctcattttaacctgagcacttctttaaagaccatgtctccaaatacagtcacattctgaggtggtggggctaggacttcaacatacgaattttggggggtacacaattcagcccataatggtttccttatcatttcttcatgtgattattattcttggggtcaccaggggaaccctataatagaatctgttccgttttcgtggtcactcttttttttttccatgtatacatagcatataaaaattttaaacaacttactagaatatgactggttctaaaaatcctatctcccatccccccaaaatgaagacttgacaccggttagtctattctaaacattctgatttcagctccaaagtgaatttttaaggacaagttccagaaatgaattggcagtggtgatattaaatgcatatttagttttccaagatgagctggaaaactaaatttttagtttttagtgctgttggactatttaggaatagccagtactcactttgatgtatagttctgatgttattggcaaaaataaacaaatcaaaagcacaaaacaggcaactgacaatgtcatgtctctgaagagcacatctgtatataatcctacacaggtatacgcaccttcatccatctattctaagcacgaagaatgtatcagagaaaaggggagaaaaattggtttctaagccctgcagtccaactcttttttttgtttttttctgaggtagagtctcactctgtcacccaggctgtcactcttgaatataaccattgtttccaaggtgagtttataggagtgatgtgttggggcttatttcccaacatgcttttcatccttgagtgctgtggatcaaaatctaataaccttagatctttattttgaaatcctgtattctcaggaggtagagcttcagaattttagtaggtacatgctagattctgttccgtgaacagaaagagcagaatctttctgaacagacagagcagaaccaaaaataatggcattgaccatcctttcaggctggaatagcaacaaactacaaagacagaggcctattatgccaaacacttatgaaactgaattttatgtaatgggacagtttcctcatatttcagtgggtaatcatactaaactactttgctaagttgaatccaacaagttctgcttacaaaagatagctttcgaaaaaacaagtctttgtaatacctgtcagtttagacaggatatattgaataaaaatgtcacttaaaattttgttaatttaaaagaacattattttgataacaaaaaatttcagcattctctcaccacaccatatcttgagagcaatctcctatgccttctctattaaatgacagtgatgtattgaagaagtttgtgcatgtgtggaaggattttgtaaatttcaaagtgccacactgatgttggttatacttaggtatggtgggccttacacttttaggggcagtttctgctttgactaagcaactgggccactacttaccagctgccaaataattagagctgcagatatagcactgttgaaggaattttaatacttctcatcagcctcctcctcataatggccaagttaacacacactgcgtctttctgacttctttttacatgttgtgacttttccccttttcccttaaaactgattttcctcagttttaattttcatttcaagtcaactcaggtatataattaaaatttccttgaatcttgctcaccttcaggatgacttgcctgttattcagttactgatcctgaaagttttagaaattattaggtaaatatcacagtaaaatatttaaaagtttaggtcagaggaaacatatcgcacaaactatctgctattgtataactatttttatttaacatagtgggaggattctgacaagaatgttggtcaagtcagatgtctttatttttaataatgttttataatatgaaaaacaagtctttctagggacactatttttatttttattaacttttttattttttatttttttgaggcagggtctcactcccatttcccagactggagtgcagtggctccatcttgcctcactgcagcctcgacttcctgggttcaggtgattctcccacctcagcctcccaattagcgggactacaggcatgcgtcaccatgcctggctgatttttttgtattttttttttttttaaatagagacaaagttttgccatgttgtccagtctgctctcaaactcctgggctcaagatatccacctgggtttttctcccagagttctgggattataggggtgagccaccgtaccctgacgtatttttcttaactttaaattttgaaatgatttcagactcacagaaaagttgtaaaaatattacaggtaatttctgaatacacttcactcatatttaccacatttactttatctttctatctatatctgtatttactggaagcatttcagagtaagttgcaggcctagtggccctttactcctaaatatgtctgtacttcctaaaaacaagtaaattttcttatgtaactatagcaccataatcaaaatcaggatttggacattaacatattactgtcttccaatttagggactatattcaaatttccccagttgcctcattaatgccttttgtggtaaaagaaaaaaaaatctggttcagcatcctgcattgcatttagttgttgtatctctttattctctctcaatctggaataatccttagttttttggtcagttgtgatcttaacattttttaagagcataaaccatttattttataaaatgtcactcattttaggtttgcctcttttctcatgtactagattcagtctttgcattctgggcaggaatagaaatgacactgtccatctatgagcaccatgttggtagcacgaagtgcctctttatcccattattggtggtgttggctttgttaaggaggtatctctggcgtttctacactgtagactttctattttccttttgtccttaataaagtatcttatagggagatactttgagactctataaatagccagcatactttcactcactagctttagcatacttcctagtttgtatttagtgaggaataggctgaagatgacaatggcagtgtcagagtttattattataatttttagaatcatgaggtaggtaacaacacagtgccaaggagatttagttttccctaagcttattctgctaccgaaatgagatacattaagcactcagagatgaagcacaacctaatttacctcacagttgcatttgacaagcttggttatattttgggaaataaatttgaagcaacagatgagtaagagggagtggtaagaggtattagacacgatgctaatagtgacagcttggtggtgattaagaatacaaaactaaaaatagcaagtagatctataaaaagctagccgattgttaccatctagcgtaggtgtatggagctaaacatatttattctagtccatgagggtgattatggcatgagatgttataaggcacgattatgtcctataatatggcatttgataattttttgtacctgtttgaacaaaagattcatggtgagctagggatataaccaatacaaataaatttatcaacaactgttagactctgcagtgtggcactcccttgagaaatttgtctttgaggattcaggtattataacttggtagggcttactccttttttgtgagtgtgaatttttttttttttttttgggttcgggcttactcttgctcactaaatcccaagatttatatattcacatgctaatacgttaacaatgcaaaacagtgctgtctggtggatccctgatttgtgtgctttttagaaagagcacattgctgttgggtaggaaaaacatatgaagccaggttctcaaatatttgtgtggtaaggatggagtaacaataagggaattccattttgtattttgaatgtttttgaggcattgtttccaaaagtgtgttccatggacttggcaactcataaaggtactttgcaaaaggaggaggaagtgctgcgcaaggcccttctctaggagagtcacaggacatatgggcatcctaatgacaagagtctttcctaaacaatctgttgaactgagattaacccggtgtttcccaaatagaagtgacacagaaaccttttccccccacataatagccctcaaaacagatgcatattagcatcagacttctgtagttacatttttcttctaagtgggacaagatgaacttgttggtttaccagacaccaatttttgacttttttgtttttttatttttataaccttttgatcaagttaaccatcttttccctccctccctccctcccctccctccctccctccctcccctccctccctccctccctccctccctccctccctccctccctccttccttccttccttccttccttccttccttccttccttccttccttccttccttccttccttccttccgtccttccttccgtccttttgttcctttatataaccctgttctatcacttaagtattgagcttaacttgcagagagaaaccattgctaagcacttgggaatagggggatatttgtgattatttaagcaatgttgtgcttataagatttctggtaataacacagtctaaaggaaatgcttcatatcctgtggagtagctttggaatcctatgtatttagaaggatttctttcaaaaatgtttaaaattataagttttactttaaagaagttaatttcttttacctggaaaattgaagcaagttagactattttgtggacttatgcagtacttgtcaaaaggtaaatgttttttaaaatttctgttagtaaggattttacctttagcagcttgttattttagttatctgcttagttgcttctaatttgaattacttgtagctccctaatttagattgtaaaatgttatggctctgttatatgacttaagtttagaacacagtgggtccacttttggatcccattcaaagtggatctgatgtacttattttcctacacagttaaagatccctcttcaaaggtgaagcagagacacaataaatttggatcttgaaaccttcatagtaatatgctttttaaaagacatgtatacataattgtatagccattgcatatacttttatacatacatttctttcatatacattactgtcaggaagatcaggaagataatgtcatctctttagtgagataaattccaactccatcgtgaccacttaccatagatgtgactctgtatttgctgttcattcattcaatatgtatttatttgccttgtatatagtatgtacttatatgggcactggtcatagaaagaggaaactgaatggttcacttaacttttgaaattgtcttttcacctatcagggatgtgtgaatagtattgatgtaaagcacttggcacgtggtaggttcacctcttttttttttcctgagatggaatatcgctctgttgcccagactggagtacagtggtgcaatctcggctcactacagccttctcctgggttccagcaattctcatgcctcagcctcctgagtagctgggactacaggcatgtgccaccacacccggctaattgtttttatttttagtagagacagggtttcatcatgttgaccaggctggtctcaaactcctgacctgaagtgatttgcccgtcttggcctcccagagtgctgggattacaggcgtgaagcgccacacccatccaggttcacctcttgagtagagtgctgagatgctttctcacatgagattggtttctagtaataatagagggtttttttgctagttactttcttattgtatttatcttatagagtcttggttcttacaaaatcataatttgctttcaaaaatacatattttaaactacctaataagatctttatttagtgtcacatttacgaagggttgatgcttattttagtgatgatttgtcattaaaattatgtcaaaatgtcttaaaatgttgttgaaactgtaagcaaactcaacacgcacaaagctaattatgggtgccatctgtttatttttacaaagctttttttttaagactatggcattgtctgcttatgataagcttcaagattattataatgactaagtcctgtccttcaattagtgtagttgaagatgggaagataattcgtttgttcactgaccttttcctgtgtcagagtgtatgaaatatgacatgtcatgataaagaaactattgtgaagtgcatttagaagatacttaatttttatgagaaaaaaatgacatcaaagcagcagatgtggccaaagttttgtttaaattcttagaacttattcaaggttttagatgaacggtagacttttccagtgacttaagtggcttcattttaactcaaggttaagaatttctaagtgatcgaccaagtttatgttgacatgtatccctgtttgtgtacctatatgtcagcacatgtttttgtacatacatatctcatgtgttagtgcagaaggccaggtacatgcatgacagcatcagcccaagtagttatcagcaatctgctgagagagcagagcgatcgcactggctctgttttgcaattgtgcatgctaagcattacccaagtcagtgtggagggaaagcaacctgaaggatccatctgctcccttctgctacactgcctcgatgcaagattacactaatctggctgcttgtcaggacaggttagtgaaagcatgcaagtgggtgagacttagggtggactagtgctttggaaaatcataagctgcccctgtagatgccacgttaagtgcagcagaataggttgattatcggccacattgaagattgccgtgaaataaatatatagctttttggttaagaattagtttcaaaattaaaattcttaaatattgttggaccacagataaatcaaaattgagaaaaataatacagatagtttacaaatacttttaggccttagtttttcttatgatttgtgtattgtgtttattctttcattttattcccctagctcaagagttttttagtcaaatatgttcaaatgttacattcgattaacttcattttacccaaaaacttttgtgatttttcttgtttgtttctatttatttacccttttctacacctactgactggcagaccttggccttgcaggttgagcatcctgtcacagaatgcattactggcctggacctagtccaggaaatgatccgtgttgctaagggctaccctctcaggcacaaacaagctgatattcgcatcaacggctgggcagttgaatgtcgggtttatgctgaggtaaaatgaatggtgttgggaggaaggatggtggttatgtccagagtcatgagacctggtatagccaaacaatgaggtaaagttagggttttataatgttgccaactattggattacgtaatccataattaaatcagaaaaaaattagataattttgacctaattccagatagttttaaagaattgggcttagttaattgtcatgtatttgtagatggggaaatagctaccaatcctttaagaggcaacagagcattggttaaatactcttgagcttgaatggaccatggtttttgttttgtttgcattttctttgtttattttcaaacaacactaacaagaagtagcatttatttccatgggttttttaaaaaaatgcccaccttgggtacacattagttgttgatcagatatttacttaaaatttttcccaaccttttttttgtataattttctcctttattattacataaaaataacaatcaaaatttaaattgtaaagcttttagtaaaacatgtactcttaatttataattttaattttgggttttactcataaactctcagttcagtacttctaaatgctttttttcaaatgactaaaacaagaatgcaaggtaacatttgtactatttttacttttcgacatcaaaaatgtctgtcaagattaaaaataaatcagtgtctgtgtttaagaatactgagagctggtttgaaatatttttcaaggagttcaaaaatatgttttggcgtgactgtattgctcttgcttttttcatattttaagtagtattactttcattcttatgacactgaacctgtttattctgatgatctaagatatttacaaatgaagtgcatatctagtagcgtgcaaagttttttttttcaggtctttatttgaagaacccaaattctcaagttttaccatatgtgaactgttttgagaagtaagaaaaacaaatatctttagtataccacatttgttgttctaaacttgagtatgttttgatgtagggcctaggttattttattttttgcccaaggcattctaagaagttttataaaatgttggaattttaccaatttcaataaagtatgaacaaggtcaggctaaattctgcttacagttctgtttgatttttaagtacattctaagttgtctagcgtaaaagacaataatattctgaaatctgtgatttggtaaataccatatgttgaaaatagacctataaatggttcttcattgtgtaaatatttaaccttacttgtgctgatttatatttcaaagactgtgcttcctttcctttgaactttcaggacccctacaagtcttttggtttaccatctattgggagattgtctcagtaccaagaaccgttacatctacctggtgtaagtcattaagctgtaataccagctgaagggttaaaatcgtgatttatgtcatacttttatgttaaagcatgtcaacaccaaagggtgtaaattgaaggacaagtgaaattcatgggaatcatggtttttgtgttgaaaacaaatttttttcagtattttgtggtgttcaagaaagtcaggattcactggacaggggaagcctggggacatctgatgatataaatgatagcttacagtgttcccaattctttcgaaaattataataaaaaaggctgtgaatcctaagaatgagaaatgatgttttgtgttacaatttaatcttttcaataaatcgagtccaaccctgctatatagtcacttgtcaagaaattcaagcacaaaatcagctccttaattgaaatttaaggagattgaattaaggcaaacaaagtgtgcctcagtctattaaacctcatggactttaaagagtaataatatttatatcagttaaataaaagtgaccactgtccattttattccatagctcttctgtatttaatagctattttgaaaatagtttttgttgcagaaaaagagcaaggacataccctttttcttaatcaaggtaataagtgcatatatatatatatatatgacattatgttagctagtagatgacaaggctgtaccatctgtgaatattcaaattattcattttgattactggcatgaagatggtgaaagattacaggaagaattctaaatctgaagatattattggatatatgatttatttcactttttaaattgtttttgcccatgtgctttctaaagggacttgaccctttctgtgcttggagactccatgctgtgttcaaagccagaaggcagaaaaaaaattgtgaagatttaacaggcattatgtgacgttaaatagcacatgagaaaacaagtatcatagggacatatctaaacacttttttaatcaaacaaaagaagtattaaataagaattcataatgattactctagttgttagaagttttcaccatgttgtaatagctaacaggatgtcaaacattttgccctcgcaagtttttgcaatttgcaattttcaaacgtgagacctgttgaaagtacaagtgataatggacaaactataccccctacagtcttcatcccaccaaatctttcttcaattaatgctgcagcaggagttttatgtaataacatttgcagttgtgagccatccatagaaagaaaaaacaattaaaatgccttaaatgttctgcttactgctgttatttgcttgtgtgaatgttgcatgtcagctaaatggaccaaggagtagataaagtgattgggtgcaggagagtgcacactaagctttgtctatcattattgctgggagcaatcaaattgatgtcagcaggacagtagatgcgttgacagctgtaattatgtatctccatggtgatcacttttggcctgtcatggaggcccatgagtcccctcccttggaagcatttaatcagattgggctgtcacttgtcaggtagacatggcgggctgggagttgtgcttagggggagaggtgaattgagaatgaagggtgggagatgtctgatagtttcacagagtccactgtggtactgaagacagaaattttaattatgctagaggtttctgagcagtggtttgagaatctcgtacagaggtgcttgggtgttttgttgtggttgttattgtttgtttttcttccttgtcttattaaaactagagcagtcagtttaccttagaaaacaatttttggctcttaccttttttggtcacaagaatgcatacttaagagttaacttatggtttgtacttttcacatgcttcattaagcctgagatttattaatatggcagaggtgaagatttccttttttatttttgatcatcatgttttgtaaatttgttattttcagaccacagttttgttctgctcagaaatttggttctgatttcatttgaattttttcttaaagtttttagtgcaaatttgtatagcctttcattgaaggaatggagacttgatctgacttcagattggttgttaagaaataaaaatatagctgattattacttggaaaaagcagcataaatagtaaattataaagcagagttttcatactgtggtacagtttttaattgggaatactgatttgcttatacaaagatacgtgtttatatatatcttgattttatcgtatgtattttaaagttaagatgacataacttctgtgatcataatattagtaaataacaaagacagttatatttaattaagatctgtaggtaacaccttataggatgatattattcaaggcaactgaagttttaagtaaggaactgtagaagaacataataaatattctttattgtctatgttattttatttgtgggttgaacatctaagttcttcctagctttgtagcagtttatgtagcaaatgataggatgtagttaaagtcagaagttttagaacttgtatcagtctcgtttgtaaacacagcattagcaagcatgctgtggttttaaagatgacatagtggtcaaattagctctttcactttttagtactaaaattaagaaaatgaaaactcacagatatattttctgttatgtaacccgtttactagttgccattttggggctctttaatgtggggaaaaggtagattgtgattttattgcttttaaagctgctccattaatttttttctagtttttgtcaacactgtgaatttcatagaacatcagtttatgtcctgaaatatgttttcagaaaatagaaagccaagtatatttcgtaagtgtgctgaatgatttttgtttataattaagatttttgtatatgaatgtgaatacgaatacagatatctatatttttgtttgtgcttgcaaatacagaaataaaagcccttcaggtatgttatagtgttccttttacaaccttacaaagagaataatagtagtgtgaattttaagaaaatgaaactatcgcttgtcttctgatgtcaccgtataataaagccatcattataccctcatgtggatatcctagacaagaggttctacatgtggtcccttgataattgcctaaattaaaatattaaaggcctaacagccgctgtgttgacctttttctgccttgctgcagacagatgagctgctgtttattaggaaggcttcttcccacaggtggaaggctacgtgagcttccgctcttctcttcccacccctttacaatgttgggcatcaaagtcctgctgttccagcagctttgattcagttcctccatcctcaagacccctaggatgtgcctgacagtctgaagtattttgattagcttttaaatacttcagattccaaaacttctttctaataatttaataaatgttctgtcctcagtaactgctcatttttaaagttttgcatggctaacctccgtgccttgctgctggtatcaaactgggaaatgaaaacaagaatcagtgatgtactaactcactcgttggctggttaacagcaatcagcctcttcaaaagaatattttgaacttgtgctatccccctaccccccaccccaagaaaatcacaaaatcagaactctaattggggctttacaaagcaaagccataggaaaagctgtgtaaacatgaaagcctcaggggagcaacagtaacagaaaaatagtgttttacagttgagagggtgaggcagaaaaggaaagtgttacagacatgaaaggcccaggcccacattcctatggagctgaggaccaggcttgacgaggggcctcactggtgggctcagaagggtctggcagggagtgcagttagcaagggcatcgtccatgccatgcttcagctggaagacaccatcagagagccacagcatcctggcatagtgatgtaggaagtcttcattttttattttttatttttgctgttttttagtttcgtcattcagtggcagaacaaaaaatgtgttgcattacatattaacggatcaagattttagattgttttcctattttccagaagttgaaatgttatttgagattgaaattctctatccattttctccatggaaatgaaattggtggttacaaaaaaatatctacacaatatgaattacttttctttttttctttttttctcccaggtccgagtggacagtggcatccaaccaggaagtgatattagcatttattatgatcctatgatttcaaaagttagtttaatttctcaatggattatttgatttcttcgaaaaatcaatgatatttaaagagtctgaaactgggcctttatctgaatcataagctataattaaacaactaattatgcactgatgtaaatgtgaaagcagagcaggttttttctcttgagagaaaattcagcgttatgttagtttgtagtactcctcctccccaactaaatcatgccacaccatcacacacatgcatgaacaataataataataaacatctaaccagtggtgccagcctaactcattgccatgagaaggaattaaggttttttttggccattggcagaaattacctgagatggaagtatgaatgaatggcaagagttgggctgataggcagtgtttgttagagtactttttgatcttttctcttcagtttttacaaattaccaattatttaagtagatgtgatgtaagagtataagatttgttttgcccacctgtctttttgaagtttgactttccagaataaatgaattgaatttttggatctttaaacccttaaaaccgtataaagtgtaaaatgctgtaataattaagattgtggattttatttttattttattattatttttttgagatggagtctcgctctgtccgccagcctggagtgcagtggcacgatcttggctcactgcaacctccgcctcccaggttcaagcgattctcctgcctcagcctcctgagtagctgggtggctcgtgccaccaagcccagctaattttttttgtttttagtagagatggggtttcaccttgttagccaggatggtctccatctcctgacctcgtgatccgcccgcctcggcctcccaaagttctgggattacaggcgtgagccacaatggccggccagattgtggattttattttgaaaattctgtgttctctgaaatgatacatctgtattgaggaatgatttgtttttcaagccttgtttctcaagatggcttttccccaagtgtcctttttaatgttatagttgcagtaaacaaacacttttttatctgtctttcttcagttagggttttagtgcttttttttgggatagggtctccctttttcacccaggctggagtgcagtatcatgatcttggctcagtgcagccttgacctcccaggctcaagcgatccacctgccttagccacccaagtagctgggactacaggtgtgtactaccatgcagggctatttttttatatcttttgtagaaatggggcttcctcatgttacccaggctgatctcgaatacctgagctcaagcaatccacccgcctcggcctctcaaagtgctgggattacaaacgtgagccaccgtggttggcctaagttattagtagtattaaaataaaatttaggtcttttgtttattagagaaccaccatttaatttaaaaataaaactatgtaaaaatattatacgttgatttttaaatattccatttttagatgaatgtttttctcttcagaaaaatggcctacaaattaattttcaaatttgcttgatattgaagagctagtaaaacctactaaaataatcacaatctatagattggctaatataactgccagaaaaatctttaatgaatagttaaggtcttatttcattgccaaattatagagatacatataagtaggcactaaatcatgtagaatagtaagacttttctgtttttttgatttctgaaaaagtaccatttgcttctgtgtatattatatgtaaaactgcaaatgatttctaagatagtcgtcttctttctttatacttttatttttgaaactttactttttttgttagttatgaaagtgttaagggctggacgcagtggctcatatctgtaatcccagcactttgggaggctgaggtaggtggatcacctaaggtcaggagtgtgagaccagccaggccaacatggcaaaaccctgtctctactaaaaatacaaaaaaattagctgggcgtggtgacacacgcctgaaatcccagcttctcgagaggctgaggcgagaggatcgcttgaacctgtgaggcggaggttgcagtgagctgagattgcgccactgccctccagcctgggcaatagagcgagactccatctcaaaaataaaaaataaaaagaaaggaaagtgttagctattcagggtatcaaacttggaaaccacagaaaaatagggaaaaaatgtcttatctaatcctcaccactacccttggtgttcaaatcctatctcatatattcacgtttagctgtatctccttttaaattttttctgtacttacttttgttacgtttttgtttttgtaaaatcactctttactatgataatgaaatgtaggagaagagtctgaaatagcttgattctaatatttatatacttaaaaaatcataattgacatgtattgaaaactgaactatcataaaatttcgagatatatttagaaatctgttatgaaatattttaatttttactaaaatgaatcatttaacatagttctaaatatatatatatattgggttttttgtttgcttgtttttagctaatcacatatggctctgatagaactgaggcactgaagagaatggcagatgcactggataactatgttattcgaggtaaaaacaaagatttgcactcgttggttattgtatatggtgtccagttccagagaacagcctgggggtttaccaatgagaatatggcacagcacatttgctcactatgtgcttaaagagaaataagaaaaactcaaatccatcaaaccaccataccaagtatagccgtttccactgttttaagcaaatgcatattttctctatatgcctaacatatatattactctatataaccagtacacattggttacacaggccttcaggagggcgtcttttttcttacagaagtaatattgctgtggagaggtctttagtgcgtatttgggacacacgttcagtttatgtgagtttatctatgtttatctatatatgcgagtttagatagacataaataagttacttgggaagattattcctggaagacattaaagtatttgtaagcacattctatggggattttctccctttttatctctgcatttttattgtggtaattgaaatactagattttggttaatttaatttttactctaatgtgcttgagcagtaaatccatgaatttgagagtctgaataagaatattttgtcaaaactcatttctgttaaactgtgatataatacgacataggggcatggcatctgggcagtttgtcaaaatattagattagttttggtcccaactagaagttatttatctactccatctggcttctgaaaggagtactcttttgtatttacatgaataccatttcatgttttatacttaaatgaacattttcccactaatttgcttactctatatatgtatatataggttcaccagttactacagtttttaagtgactaaaatacaaagtaggcttgccattattctcctaactttatatgtgtcacatataaaaaataaattttgttgtataggtagatttttccaggcttagtctgaaattttgcctttgaattactgtgatgtagtagacagaaaccagacaaagctaggttcatagcccctgtcctgacgccatttaataattatgtgatttttggccaagcacggtggctcacacccgtaatcctagcactttgggaggctgaggcgggtggattgtgaggtcaggagttcaagaccagctgggcaaagatggtgaaacccagtctctactaaaaatacaaaaattagtcaggcgtggtggtgggcgtctgtaatccccgctacttgggaggctgaggcagaaaattgcttgaacccgggaggcttagtttgcagtgagccgagatcacgccactgcatgccagcctaggtgacagagtgagagtccgtctcaatgaaaaaaaaaatttttttttaaataaataattacgtgatttttgtcaaatgactttgtctctctgaatctcatactccacatttgaaaaatggagtgatagtctctgccttataaattactggtgaggattaactgaggttaagtatataaagggcttggcaccacactggcttatgttgttcaataactttagttgtcatcctttcttcctctttcctcacacttaataaaaccatatatttaagaatcaaggccaggcgtggtggctcacgcctgtaatcccagcactttgggaggctgaggagggcagatcacttgaggtcaggagctcaagaccagcctggccaacttggcagaaccccgtctctagtaaaaatacaaaaattagccaggcgtggtggtgggtgcccatagtcccagctactcaggaggctgaggcaggagaatcgcttgaacccaggaggtggaggttgcagtgagatgagatcgcgccatcacactccagcctgggtgacagtgtaagactctgtctccaaaaaaataaaaataaaagccatgtgttataaatcacattatcaatccattagtcatatgaaatttactaaatcatagataaacaatattgaaagaccgttttatgtaatttctaatactgtgtgcggaggttatatgctttcattgcaccctgttcaaatacttctccagagaatttaccgtcactgtaaaattaaagtattaattgtgtaattaactgtgaaatgttgggttatcctataagattattaggcacatgaggacactgatgatctttatcttgtttgtatgcatattgctggtgcttagcagtgtctgacacatgctagatgattaataaatgtttgttggatgaatgaatgagtgagcaagtgatactatccctgatttcaaggagttactaatatacttggtgtgaaaacatatgaaaagataagtataatattaatatagctttgtaggtgccccaataggggattgaaaaagggtagtgggagtttaaggaagaggctagcatatctttcttttctcgcctctcttggtcctttgaaagtaactagtactgctttaggactcatagtgtctctgtgtctctgtcgagagtacctcactttgttctgctttcaaatgatcctcagagtggcaggatttttaaaaagactggtaatgtcctgtgtaggtgaaataaaggggatgggcacgctcaagcgtctttgcagtatcacttgttatagtattttgggaaaataatctggtgttagatgttaaaataaaagtgcataccctctgacccagctattcatcttttgtgaatctttcctatagagttaaaaaactgaattatgagcatgttcaccatgacatttacaacaacattgtttgtagtagccaaaatgctgaccaaccacagtgtccgctaaatggatgaatgactgaataaattacaatgcattattactataaaatactatgcagctgtgacttaaagacctgtttgtatgaatcgttaaagtagaaaagcaatttgtagtcatgtgtagtacattctcatatcacttgaaccatcttctcatcctaaaatattttaaattgtgttggatgagcacagagaaaggtgtggacatctacatatcacaataatttttttaagctcaaaggatttatgagagaggggtttttcttgacacatttctcttagactttttaattttaggtattttcaaatctatagaaaagatgaatgaatagtactgtgcatgcctgtgtactcttcacctagattattatttaataaacttttttttgatatttgctttctctatttctccctttctttgccttttcctcttcctttctcacccttcctctttcctttcctccctccattctcttctctgtttttctcctgatccatttgaaagaaggttgcaaacatcatggcgcatcactcctgaatactttaccaggcttcttaaggggaagaccatgttcctgtaactggatttttcttgcctgctgcacagatagagtctatttattgagacagcgttattgcaatagagaaagagtttaataaacacagggctggctaaatgggagactgaagttttattactcaaataaatttctcccaaaatttggaggctagggtttttaaagaataatttggtgggcagggggccagggagtgaggaatgctgactggttggtttggggatgaaattataggtgcttgaggcagggtcttcttgctaccttcagttactgggtaagatcacagaactagttgagccagtttgctggtctggctgcatgactcctgagccttaatttctaatgttagttttacaaatgcagtctgttccccagacaaggagggggtttgttttgggaaggggctgttttcattgttttacagttaaagtataaattaaattcctcttatagttagcatggcctacacccaggaatgaacaggggcagcttggaggttaaaagcaagataaagttggttaggtcggatttttctcagtgtcataatttttgcagtggccatttcattcctgcaaaaaagcacaataccatcattacacccaaggaaaattgacagcaacctaacagtttcatctcatgtattgtccatatttaagcttgtccctcggagtctttttttattgttttttaatcccatctgtggcccaaagttacacagtgtctttgattatgtctctttattatcttgccgtctttcatatttcatttcattaattttcaggagagtccacggtagttgatttgtagaatgtggcacattctagatagaaagtgttaacgttggttcactaaaggcacttgtgaagtgattccaagaatgagggttgtaggtgataatttgcactatcactcacagaactcgcagaaactctttgcttactattatcagtttattataaagggtacagcttgagagtaacccagtggaggagatgcacagggcaaggtgttaggaaggggtgcagagcatccatgccctctccaggtgcaccaccctccatcacttccgtgtgttcagcaacccacaagtcctctgatccttgtccttgggtttttatgaaggcctgactaggtaggcatgattgatcctatcaatctgccattagtgattaagtcattcttcagtccctctcccctttggagggtgggggtggggctgaaagttccaaccccttaatcacatggttggatcctctggccacctgctcccatcctctaagagtcatctcattagcataaactcaggtatgattgaaaggagcttgttatgaataacagaagacattcctctctcaacagtcatttctatgatattcttgccaaaaatgtacaacctgagtataatcatgaggaaacatcagacaaaccaaattgaaagacagtctacaaaataaatggcttcttctcttcaaacatgtcaaggtcaggaaacacaaagaagagttgagcaacttatgtagatcaaaggaaactaaagacacatgacaactaaatgcaatgtgtgatcctggtttagatcctggaccagaagaaaaatgtttttcttttgtagtaagggtcataagtgggacaattggtgagatttgaataaggtctggagatgaggtgatagcaatgttagcagtgttaggcttgtctgattttgatccttgtactgtgattatagaagagatataccttgcttttaggagatgtacactgacatatttagaagtaaaatgacatcttgtctgcaacttaccttcatatgtttaagaaggaaaattatgtatctgtgtataaatagaaaaaattagtgacaaagcaaataaatgtgataagatgttatcatttgtagaacctccatatatagtaattctgcttactatttttttgaaatttttttaaattttgaattttgaaattatttcaaaataattttgaatttttttattttgaaataatttcaaaatttaaaaaatttaaaatttaatttcaaaataaaaagttaaaaaaatagggaagagcaagaacccccactctccactaatatttaaagaataaaagcagagatgcatttgggattttgaacttacatattactcatctggctaattctgaaggataggcaggtttaaaaacttgctttatgaaaggcagaaaagggaagacaatctactgtcttgtttggtaactgcttaattattcaaatatgaatatttttttcctgtgctgattgtgaacttttgttaagatagagaaactttgaagcaaaaatgtaattcggttaaaatgaatttcaaaatcctcatgaaataagagtgcttttggcctctgtttgatcctggcagcatgtctagctgatgtctgggcagtgttttggaaccagcaggcagtcaggggaaggccactcctaggggcctcttctctgtggcctggtggtgatttcccatacagatgggacctggtgaactctgccagaggtcatccttgactcccagtccacacctcccagtcataatttttatgagtatgtgattaataatatccttgaagttgtaaactaactctcaaagaatacctctactgtccccataccatttaaacaaggatctgttcaaatagtgttgtctttcctgggatgtgaaaagaaagaaactaaatgcaaaatggtaactttcaaatctgtatgatactgtttagtgcttcagtgattcttcccatctagctgatcttttgagctcttaggtataaaatacttttctgattattaccctcttttggctttaggattaattaatggacagtagtttcgggaacagttagtcgaggcatagatgtttgttgtctgccatgagccattatctcaccatattggccttaggaaagaaaaagagataacgatttagttttgcatagtcatatataatattttatttagaaaacattaaagagaaaatggttttgtgttttaattttgtttttaaaatatcatttagtgagataaaagtctgtgtttttatgctgtatttactattcaagtagaaagatttttaaaattccatgcttcatttacgtgcttgatggctctgttctttgatatccaaaatgtaaattaatatttgctttcaattcctttgagttagatttttctaaaattaacacctatttttcagctttggatatagaggacaaatacaacatatgatttatcctgtgaaactgcaagcatgttaactttctgaatattatcagtcacaaattttgggcatcagaaaataatctctttttttgttcaaattgtcattaactatttctgaaaactatattgtattttactgatgacagagtttggttccacctattttaacattggccacacagggagctaaaaaatttataccagcagtaggctataaacatgaaagccagtaaagttaaatatgaaatattaaatatatatgttaatagtattctttttttttttggagatggagtctcactctgtcacccaggctggagtgtagtggcatgatctcggctcattgcagcctctgcctcccaggttcaagcaattctcctgcctcagcctcctgagtagctgggactacaggggtgcgccaccacacctagctaatttttgtatttttagtagagacggggtttcaccatgttggtcaggctggtctcaactcctgacctcaggtgacccgcctgcctcggcctcccaaaatgaacaatactatttctgtttaaccagggcagggaagttcaaaaatcctgagactgcctgctaacttacttactgttttgcaaaaacacttgtaaattgaaatattctgaattatttatttgtacataagatcaatatttttggtaaaataaattgttgatgtaccttggtctaatacctttcatcccttccagtccctcccttagagtcttattttttccagaactttatttatttattgtaatatatgagcgatttgcatattgctggttttatttcacgtttctctgtctcaccctgttttggattccttcacatatgggagatgttcccccataagtaggaacgtctgttttctgatgtataccatcgaatctgcctgcttttctgaaccttaatcattcagacatcatctcacaggcatctcaaatttaacttgtccatgaatctgctattttcctctcaacctgtttcttctctgcaaatggcaacttctctcatgttgcagagccagaactttgggtgttgtgctcatctccccattctttgtaattgtggttgttgttttgagacagggtctcactctgtcacttaggctggagtgcagtgatgggcccagggctcattgcagtcttaacctccagggttcagctgatcctcccacctcaacctccctggtagctgggactacaggcacaagccagcacacccagctaattttttgtatttattgtagagatgggattttgccatgttgcctagactggtcttgaactcctgacctcaagtgacccacccacctcggtttcccaaaatgttgcaataacaggcatgagccactgcacctggccctcatctccccattcttgccatcagtccctgcctgcctcctgaatatccgtcaagtccagctgcttctcccatctgtattgtcagtgtcctagctgtggaccccagccttgccatttttcagcatatctccgcaattgtcccctaaggaatttttccatcttccctcttgcccttcctcagtcccttttccgtatagcagcctaagtgattctggattgcataaatctagtcatacctgccctgcttcccattctagttgctctcatgggaatgtggaatctgtgcatggcctatcacacgctgaatgcctattggccttttcactgcacccagcaccgttctctcctttgctcatactcagaccatggtgttttcctttcattcctctccataggaatacctggtggtaatcatttgctttttgcaacagtgaaatctctctctgtctctgtctctctctctcttttaattatactttaagttctaacaacgtgcaggtttgttacgtaggtattcatgtgccatgttggtgtgctgcacccattaactcgtcatttacattaggtatatctcctaatgctatccctcccccctccccccaccccatgacaggccctggtgtgtgatgttccccttcctgtgtccaagtgttctcattgttcagttcccacctatgagtgagaacatgcggtgtttggttttttgtccttgggatagtttactgagaatgatggtttccagcttcatccatgtccctacaaaggacatgaactcatcattttttacggctgcatagtattccatggtgtatatgtgccacattttcttaatccagtctatcattgatggacatttgggttggttccaagtctttgctattgtgaatagtgctgcaataaacataacgtgtgcatgtgtctttatagcagcatgatttataatcctttgggtatatatacccagtaatgagatggctgagtcaaatggtatttctagttctagatccttgaagaattgccacactgacttccacaatggttgaactagtttacagtcccaccaacagtgtaaaagtgttcctatttctccacatcctctccagcacctgttgtttcctgactttttaatgattgccattctaactggtgtgagatggtatctcattgtggttttggtttgcatttctctgatggccagtgatgatgagcattttttcatttgtctgttggctgcataaatgtcttcttttgagaagtgtctgttcatgtccttcgcccactttttgatggggttgtttgtttttttcttgtaaatttgtttgagttctttgtagattctggatattagccctttgtcaggtgagtagattgcaaaaattttctcccattctgtaggttgcctgttcactctgatggtagtttcttttgctgtgcagaagctctttagtttaattagatcccatttgtcaattttggcttttgttgccattgcttttggtgttttagacatgaagtccttgcccatgtctatgtcctgaatggtattgcctaggttttcttctagggtttttatggttttaggcctaacatataagtctttaatccatcttgaatgaatttttgtataaggtgtaaggaagggatccagtttcagctttctgcatatggctagccagttttcccagcaccatttattaaatagggaatcctttccccatttcttgtttttgtcaggtttgtcaaagatcagatagttgtagatgtgtggtgttatttctgagggctctgttctgttccattggtccatatgtctgttttggtaccagtaccatgctgctttggttactgtagccttgtagtatagtttgaagtcaggtagcatgatgcctccaggtttgttcttttggcttaggattgtcttggcaatgtgggctcttttttggttccatatgaactttaaagatccaattctgtgaagaaagtcattggtagcttgatggggatggcattgaatctataaattaccttgggcagtatggccattttcacgatattagttcttcctatccatgagcatggaatgttcttccatttgtttgtgtcttttattttgttgagcagtgttttgtagttctgtttgaagagatccttcacatcccttgtaagttggattcctaggtattttattctctttgaagcaattgtgaatgggagttgactcatgatttggctctctgtttgtctgttattggtgtataagaatgcttgtgatttttgcacattgattttgtatcctgagactgctgaaattgcttatcagcttaaggagattttgggctgagatgatagggttttctagatatacaatcatgtcatctgcaaacagggacaatttgacttcctcttttcctaattgaataccctttatttctttctcctgcctgattgccctggccagaacttccaacactatgttgaataggagtggtgagagaggccatccctgtcttgtgccagttttcaaagggaatgcttccagtttttgcccattcagtatgatattggctgtgggtttgtcataaatagctcttattattttgagatacgtcccatcaataccaaatttattgagagtttttagcctgaagggctgttgaattttgtcaaaggccttttctgcatctattgagataatcatgtggtttttgtctttggttctgtttatatgctggattacatttattgatttgcatatgttgaaccagccttgcatcccagggatgaagcccacttgatcatggtggataagctttttgatgtgctgctggatttggtttgccagtattttattgaggatttttgcatcgatgttcatgaggaatattttagggcctctctgtattgcctaggctggagtgcagtggcacaattatagctcactgcagccttgaattcctggattcaagtgatctccctgcctctgactcctgagtagctgggactacagatgtgccaccctacgcggctaatttttaaattttttgtagagatagggtctttgttgtccaggctggtcacaaactcctggcctcaagcagtcctcctccctcagcctcccaaagggctgggattacaggtgtgagctaaattcctccctaatgttaccatagccttagctacttatctttgggtccttctcatctttctgttttccttcccagccaggaaaatctgtgtaagtctcaaatactttcctcttcccggaacaccaaagctgtcatttcctatgcaggtgaacctttctggcaagtgatacctcttttctttttcaaaagcactctagtttgtctctttgtgaaacatgatcaagggattaatttcccatgttttatttagcctgatctctttcaaggagctttttacatttttgcctacctaattgatctttctaagcatcctagcatattgccttcagttgcttttcactttcatctaaacaaaagcaacgccacattttttcaatgatttcttaggtatattgatgtcattagaaatttcatctgccttctactatgtttctcattaaaaaaacttattaaagccctctgaaacatagttattatgtatgggccaagtaaatcattacccacagaacaagcatgaaatagctgtgtagatctcatgggcatgcgctatagaagatctgtgtgtgtgtgtgtgtgtgtgtgtgtgtgtgtgtgtgtgtgtgtacataaagcaatctataatatatatatatgtatatagtgaagaatatgatcgattctgatatatataactttttccatggaatttttgtgtagctaaaggaatagcattaatttgaatttgtgaatgttttctaaacgtcttgaggcagttttgataaattgagaattggcctttataaaatttagatacatagcatctcttgagtcaggaacagaaatgctcaggattttccatatggttgtggatatggtctagtataaaaggatgcataggaaaatgcctgggagggtatacatgttaagctgttatcattggctagcttagagatggaaagtcatattgaaaaggtgtgccctgctcgctcaaacacatgcactagggtacagggtaacctgctgtaacaaagatttctaaatacagtgggataaataagagagacgtttatttacctctcatgtaactgtctggtccatgctgctaggaggcaagtcagcctcatgaggtcattcaaagatacacacacccatcctgatgtgccactccgtttgaattgccaaagctgagtttctgccatgtcaggaaacccacagtaagacgagaagaaaggaagctcaagcaagcaatgagagagtcggaagttgcgtacatcactttagcttaccttcctttgtctaggaattagtttgtcatgcctacctacaagctagatgggaaagtggagtctgtgtctgggtgtcttttgctcagctaaaattctattactatggaaaaatgaaaagcaggttttaggagaaactagcagtctgtcacaataaactgtgtcttaaaaattgtttatatataattatatatatgtaactattgtgatatataatgtgctaatcattaggtaaactattcagtctctctggattgcaattttcttttttttaattttttttttttcttttagagatagggtctctctctgtcacccagatttgggtacagtgatgcagccgtagctcactacaacttcgaactcctgggctcaagtgatcttcctgcctcagcctcccaagtacctgggactataggcacatgccaccattcccagctaattttctgtttttattttttgtagagacagggtcttgctacattgcccaggctgatcttgaactcctggtctcaagtcatctcccaccttgacttcccaaagtgctggaattaaaggtgtgagccactgcacccagcacaattttctcatttgtaaggtcccatttttctctgtagtttacttattctataactagttgcgcagtttcccaagagcaggtaccatattgtgtgctctcattttccttcccatgatatctaatggctgcatgagtaatagtgtagaatacatgttgatgcatatagataggtttgctcagattaaagggctagatagtaaatgttttagactttgtgggacacaaggtttctgttacaactgcttgactctgctgttacaacatgaaaacagtcatatgtaagcaaaccaggctggctgtgttctaataaaactttttttacaaaaataggtaggaggctagatttggccttcaggccatattttgccaaccattgtcttgtaggaaagttacactttccaaatagatacaggtgtaaactcagatttcaggagctccattctttttttttttgttgtttttttgagacagagtctcactctgtcacccaggctggagtacaatggtgcggtctcggctcactacaaccttcacctcccggcttcaagcgggaggcctcagcctcaagagtagctgggattacaggcgcctgccaccacgcctggctaattattgtatttttagtagagacggggtttcaccatgttggccaggctggtctcgaattgctgaccttgtgatcctcctgcctcggcctcccaaagtgctgggattacaggtgtgagccactgtgcctggccaggagctccattcttaacagaaaacagaactagaagttaggtaggtcagtgctgaagcttaggatgcaggaaaacttctgtctgatgttttattaattacattttgtctcatgctctttgtatattcccatataacaggatagtaatgttcttttttgagagcccagcattgcattaagcattatatcatttatacctgataacaatcatgcataataggttctattattgttaatttacaaatgaggaaactaaagctttgagaggttaactaacttacctaaggtaagggatagacctggtatttgaacttgactatctgattctttgcttactttatggttattgttgcaaaagtggggattctgtgagacttgaatagtaaaatcagaatcatacttcgtaggtttcttatgcagcatgatggtacagattagaaccatacaagagtggactaaagtaataggaaggaatgaacaaacctctgtttactttgacttcagctgtcatgctgcagtcacctgctcttcttgtggaagcctgatgtaatttctgccttccctggatgtaacatgcttcctcccacttgctttcattcctgtgtaacatctttgtaatctggatgaccaagattagatacttcattcttcacaaaaccttcctgcatcctagaactctcccaatactattagtatcctcttgtggcagttacctattttgatattacagttgacctttgaacaacactggtttgaactgtgcaggtccatttatcttggattttttttcaataaatatatcctaaaattatttgaagatttgtgacaatttgaaaaagctttcagacaaactctatagcctcgaagtaccaaagaaagaaaaaggtatgtcatgaatacataaaatatatagagatactagtctgtttcatcatttgctattataaaatttacacaaatctattataaaagttaacatttatcaaaacttacacaaacagagaccatacctggtgccattcaaagcagagagaaatgtacacaaacagtaaagacgcagcatgaaatcataaccacattaagattcactgtagtacatactgtactactgtatagtttcatagccacctactgttgctattgcagtgagttcaagtgttgcgagtatctgcttaaaacaccatgtgatgctgatcaccgctgtgtgatcagttctctctccagtaaattgcatatggcagtaaaaagtcattgcttatggttctggaatatttttcatcatgtttagtgcaaaccataaactttgaataacaggacagaatccatacaaagtgctactagtaatgctggaggtcctcccaagaagcagagaaaagtcatgacattacgagaaaaagttgaattacttgataatatatggtagattgaggtctgcagatgtagtttcctgtcatttcaagataaatgaatcccatgtaaggaccattgtaaaaaaaaataaaatgaaatttatgaagcatttgctgcagctacaccagcaggtgtgaaaatcttgcacttttttgtgaaacacctttcatttcatattgaagatgcagcttttatgtgggtacaggattactataagaaaggcattcccatagactcgaatatgactgtctatgggaaaagtgaagttgttatatgacaacttaaagcaaaaggaaggtggaaggatataaagctggagaatgtattgccaaccaaggatggtttgataattttagaaagagatttggctttaaaatgtgaagacaaaatgtgaaggggaagctgtttctgccaactaagaggcagcattaagacaccattaagaaaatcattgaagagaaaggatatctgctgaacaggtttttaatgcagacgcaagtgccttattctgagggggaaaaaaaagccacaaggaacatttcttagtagggaaaagaagcaagcatgaggagttaagacagggaggaataggctaactctgtctgttgttctgtgcaaatgcaatcaggtttatgatctgcacttatctgtgaagctgctcatctcctagccttgaaggaaaatgataagcaccggctgccagtcttctggttgtacaacaagaaggcttggacaatgagaaccctttttctggattgactccattgatgctttgtccctaaagtctggaagtactttgccagtaaggggctgtcttctaaagttcttttgatatggacagagccccagccacccagaacacatgtgtttaacatcgaaggtgtcgaagtggcctgcttctccccaaacccaacaagtctaattcagtctctagctcagagtactgtaaggtcctttcaggctcattatacacagagctgtatggaaacgatcgttgacactgtggaagagaaaaagtctggaaagattacaccactgaagatgcattgttgtcatataaaaagctgtgaaagccatcaagcccaaaatttgtgctggagaaaactttgtctggatgttgtgcatgacttcacaggatttatgaaagaggcaaccaaggaaatcatgaaagagattgtggatttgacataaaaggtggagtgggggttgaagggttttaaggtacggatcttagaggaatccaagagcggatagacaccacacccgaggaattaacagaggatgacttgatgtagataaatgcttctgaattggtgccagaggatgaagaagaagacatagaagaagcagtgccagaaaacaggatcacatcagacaatgcggcagaaggattctgattattcaagactgctattgacttattttacgacatggacccttctgtgatactggcagtaaaactaaaacagtggaagaaggattgaaatcatatagaaacatttttagagaaatgaaaaagcaaaaaaggcagacaaaaattacaaagtatattcataaagttatacagagtgtgccgcctctcctgcctccccttccacctcctccacctctcctgcctctgcaacccctgagacagcaagaccagcccctcctcttcctccttctcctcagtctactcaacctgaagaggaggaggaagactgttatgatgatccacttccacttgatgaatagtaaatgtattttctcttatgatttgcttcataacattttctttagctttattgcaagactgcagtatttaatatatataatatataaaacttgtaattgactatgttttcagcaagggtttcagtcaacagtatgttattagtatttacttttttgtagcatcaaaagttatatatggatttctgtctgtgcaggaggcacccctaatcctcatgttattcagtcatcacctgtgctttgaaattgtcattgtgtactaggctcaatttttttctactagattacatgcatctttaaaaaaatgacttattgaggtatacttgacataataaatttctgatatttaaagtattcaatttcatgagttttgacatacgtatacacctgtgaaaccattaccacagccatggtgttgaacacttctttcacctctggaagtttccttatggtctttgacatttaccctccctctacccctttcccagtgtaaccacatgatctgctttctgtcactgtaggctcgtttgcatgtcctaaaattttatattaatggaattatacattattatgcattatttttggtcttgcttttttaactcagcataattatttttaggtttatccttgttatttaatgtgttattgactctgtgtgtgtatgtggaatagaattccattgtatggacaagcccagttttgttaattcatttgcctcttaatggagatttaaattgtttccaggttttgattatagtaaataaagctgctattaacctttgtatgtaagtctttgtatagacatatgtttttatttaacttgacttaatacgtaggagtgagttgtctgaatcagtgaatatatgtttaacttttccagaaactgccaaactgttccaaagtgtgtgtatcattttatattgccaccacagtgtgacaattcttgttccatatcctgactagcacttgctattatctgtcttttcactttggccatgtaaatcggtatattgacggcatctcattgtgtttctttaacaataatgatgttgaacaatttttcctatgcttagtggacattttgactgtgtttttttacttggtgtgttttttgtcttataattgtgttgtaagtgttctttatatgttggtagatacaactcccttgttcaatatatgtattgtgggccagacacggtggcttatgcctataatcctagtactttgggaggccaaggtgggtggatcacttgagcccaggagttcgagaccagcctgggcaacagcaaaaacgtgtctctacaaaaaatataaaaattagctgggtggccgggtgcagtggctcacgcctgtaatcctagcacttcgggaggccgaggcgggcagatcacgaggtcaggagatcgagaccaacctggccaacatgatgaaaccccgtctctagtaaaaatacaaaaattagctgggtgtggtggcgtgttcctgtaatcccagctacttaggagactgaggcaggagaatcgcttgaacctaggagacagaggttgcagtgagccgaggttgcaccactgcactctgacctgggcgatagagtgagaccctgtctcaaaaaatatataataataataataataataataataataataatgatgataataataatatattttatgtgaatatcttctctcaggctgtagtttgttattttattttcttagttgcctcttttgaggagcagacttaaattttgatgaagtacagtttgtcaatatttttatagttcatggtttctatgtactaagaatccgttgcctaccttaaggtaacagattttttcctccatattttctactgtagttatgaaaataggtttgtgattcatttggagttaattttttgtctatgttgttaggtgttagcgttgaggttaattttttttttttttttttttttgagatgttgtctagctccgtcgctgaggtgggagtgcagtggtgtgatcttggctcactgcaacctccacctcccaggttcaagcgattctcctgcctcagcctcccaagtagcggggattacaggtgcctgccaccacgcccagctaatttttgtatttttagtagagatggggtttcactgtgttggccaggctggtctcgaactccttacctcatgatctgcctgcctcggcctcccaaagtgctggaattacaagtgtgagccaccgcgcctggacttttttttttttttttttggtccaaatggttagctgtttgttctagtaccatttattgaaacgacatttattaggttggtgtaaacataattgcggtttttgcattgctgaaatttgctgtttgatattggaatacattcttaaataaatatggttatgttatacatcattttaatgtacatttctcgctttgtttttttgctaatgacttactactggctgtttaatttatatttagagtatggaaatgatgttagacaaaaagcaaatctgagcaattttcttatttgagtttaaaatgggatgtaaagcagcagagacaacttgcaacatcagcagcgcgtttggcccaggaactgctaatgaacgtaccgtgcagtgatggttcaagaagttttgcaaaggagatgagaaccttgaggatgaggagcttagtggccggccttcagaagttgataacaaccaattgagagcagtcatcgaagctgatccttttaaagctacatgagaagttgctgaagaactcagcgtcaaccattctacagtcgtttggcatttgaagcaaattggaaggatgaaaaagctccatgagtgggtgcctcatgagctgactgaaaataaaaaatattatcattttgaagtgttgtcttttcctgttctacaagacaatgaaccatttcttggattgtgatgtgtgatgaaaagtggattttatatgacaaccagcgatgatcagctcaatggctggaccaagaagaagctccaaagcacttcccaaagccaaacttgcaccaaaaaaaggtcatggtcactgtttagtggtctgttgctggtctgatccactacaggtttctgaatcctggtgaaaccattacatctgagaagtatgctcagcaaatcgatgggatacaccaaaaactgcaatgcttgcagctggcgttggtcaacgagaaatgtccaatttttctccataacaacacccaactgcacgtcacataaccaatgcttaaaatttgaatgagttgggctatgaagttttgcctcatccggcatattcacctgacctctcgccaaccaaccaccacttcaagcatctcaacaactttttgcggggaaaacacttccacaaccagcaggatgcaaaaaatgctctccaagagttcgtcaaatcccgaagcatggatttttatgctacaggaataaacaaacttatttctcattgagaaaaaggagctgatgtaatggtccctattttgattaataaagatgtgtttgagcctagttttaatgatttaaaattcacggcccaaaaccacaattacttttgcaccaccctaatacagcccgttgacttgacttggcaataccaagcttcttaaatttatatttagtgttttattgataccacaagttcagatattttttgttgttaatagaattcaaggaaataagtaatcttgaatggtttctgctaggtcatagaacagtgatgataaatttctccagattatcagaattcaatttttcactgattcattgttcttcaatttgatatcattttacttttaggtgttacacataatattgcattacttcgagaggtgataatcaactcacgctttgtaaaaggagacatcagcactaaatttctctccgatgtgtatcctgatggcttcaaaggtttgtatgcattaaaatattttagtgttttaaagttgttatttttatactttattgtaatacataatttcactctattttgaaattaaggccttttggcttatattatacttcatttttagaacatgcaagactgtttacattcatgattttgagtatttatggatgactcatgagtgtgataatctgcagtcttgtggagtgcagaattcaaccatgtgaattgttctatgagtccagtgttttggagcaaaacatgtagatagatcattagcctacctgacttcctggtttctgaaaatcaaatcagatttgtattttctactgaggtgagtatataaggaactcttctaaagtgatttttaagagatatattaatgaaaatagcactgaaaatttcagaaaaccagattctggtcctattaatgaaaatctaggaagatgatgattttattctgaaaaatgaagttttcaataaagtaatgagtggaatgtgaaatttaacacagcaaagttatcagcaagcatttccaggtagtagaaaaattgctcatcaaatgggagatagagaaaaccctttagtgagcattcaaaacatagttaacataagatattgagagataaacaagatttagactgagacttaatagaaatgttactcaggtgaaagcctctacctacatttttaatgagctagtgaggtatgaaggttagatagtctgtcccatatttcaagtgttctttgtatccattaaagtgttttaatgtaaaatgactcacattcatattaggagctatatatagattcaggtcaagttgatgtcgttgagttgttgggtgcatttataaagcagttttcagttcagaatttacaatacagagttttcataagactcaacagagataactgatttgaatattgttttaaaactttagtgttatagagttttatcattagtattaaggcaaatgaagaatggctctaagttgggatcttaaaacaaaaactaatgatttattaggttgtttttcataaacttttgaatttttaaaaatacaaaataaaatacaactaggatagtagttttatacttttgtgactattcttttaatatttgttggtttaatgaggctaagaaccccttacgtcattgcttttcattttatccctagcacaaaacatagtaggtactaagtatttgttgaattaatgaaaaaaaaaaaatcttagccataatattgatgagaaaggattactttggatttttttttttttttttttttttgagacagagttttgctcttttgcccaggctggagtgtagtggcacagtcttggcttactgcaactctgccttccggtttcaagcgattctcctgccgcagcgtcccaagtagttgggattacaggcatgtgccactacccccagctaatttttatatttttagtagaaacggggtttcaccatgttggccaggcttgaactcgaactcttgacctcgtgatctgcccgcctcggcctcccaaagcgctgggattacaggcgtgagctaccgtacctggccgctactttggatatttttaatcatttatacatgtatccagataaccagttcattctattttgatcctaacatttagtttcttgtccttcctaaaattttaattaaaagttgtagtacgttttgaagtggacttaggacttccatgtttttatgtctgcctggcaattcagtgatggtgataagataggaaacagtgggcagaaggagaaaacagggaaaaactacagagaacctttagaacaaacattatatgcatgtatgggtatttatatatatatacacacacacaaatacacatttatatataagtttgtctatatgtatgtatggtgaagtatcccagagaagaagaaaatggggcatttaaattttctaatcagagttgattagtatgtgctggacgtttagcaacaatagagaatatcccaaattctgtagagaagggatccccttcaaactcagaaatgtacttaaacctagatattgcagttttctgtgatgcatataatatattacatttctttttttgtaaggaattaacagcttggacaccacaattttgttttttatgcttagaccaatttttaaaattggcatacattgcttttagcaattatttagttgcagccttcattttacatgtgaggaaactagagctcagagatatcagtaaagctaaatgaccagtaagataataatgccaggaattgaacctaggcttattcaactcctatttgagtagtctttgagttatgctggggttcaaattcataaatcacaaatgttttcaatcagggtatgctacatgttgttatattgcctctaaatactttagaaacacactcctatatttgccattcttaatgtctccctcttgttttattttcttattttcatatcagttcattcttctttgagtggttactgtctgtcattcttcttcagattgctgtattttccccctaaatcaggtcttagatattttaaactgtatcgtcttttgactgtttgatatatgtgcccaagagactgaaggaagtggtaactacagttaatccaggatcctctccatatgtttggggccaggtcattttgcccctttggggtttcccatctgcttcccatctgttcagctatcctaggcactattcacaggcaagcacctatttttatgactgcattaaaattttctattgtatatgtttattatcccacatttatttgtatgtagactaagccagttttactagagattcttagagttaaactttgaaatgattgcttctaaaattaaaaaataggatacatgagaaattattcttgtcatctctttagatgtggatgttgaaaagcggtttcccttgattctgaaaaataaatggaacatgaggaagaagatattttaagaactataatttcatttggcctataatgaacattttgggcttatttctctgataccttcctatacttcaaccccaagccccatcgaaagaaattgtcagaattatctcattcttttaagaagttacagatcttctggtaaaaatttcactcaacacaaaaagtatataattaattatacttctcttttttccactgaatttagtcaagtatatctacactttaaaaaatactactatgatatttggactgaattcaatcattaaagtcattcaacaaataattgatataggctctagaagaaaatcaaagatgggtatattttacctgctcttagtgagctgacatcatgagagaaataataatgtaaagtacccactatactacaggacaggataaagtaagtgcctggtaaagatgtaagcaaagtatcttgacagaagagaaacaaaacaaaacaacaacaacaacaaaacaccggaaacccagttccatttgagggaataaagaaaggctttaaggatgaggtagcatttagactattggaatacctctccggggactctctccatgggagctgggctgcacttgtgagagccatgtgtgcacatctttataagccatcctctttgaagttggtagtttgtaatcagccatgaagaaagtatttactgtaaagaaattggttgtaccctgcggcttttctccttcccccacaccccagttgtttgttaagcatttaccagcaaaccactgcctaactctttggcctgcatattgagcagagtccctgatgtaaaaaggaaaagaattactcatctagggaggaagacctagaagactcactaaggacaggtggtgctcagttttagagctgctgttgtaggaggcagatgactgtgcttactgaaaaatgggaagaacacttaaaaatactgaattagaggagaaagacttaatgaactaaaaaactgtgatttttctaaataaaacaattcagcagtcaatgtggaaggtaggatggtcactactaagatccaaattagtgactcaaaggaataaatggaagtatctcaaaatatgcagcaaaaaggtaaagagaatgaaatcatgtggaaaatgatgagagatatggagggaagatccaaaagattttacacataagtgcatactaggagtttcatgaaaagaaaaatggaaatgaaggataactttgaaagaaataatagagatttttttctcactgttcttaagaaagccttaggtattcttggaaagactcactgagattcagactggattaatttaaaaagtaactccactaggcatataaaaaacaaatacttttttaaatcttctaaaagaaaagaaagaagatgcaaggaatgtacagtgagattatgttcatactctataaactggaagttagaaatcttagaatagtgtctgctacataggaaagaatttgactcaagagtactatacccagctaagatatcgtcatcaatataaacaaatttgttttcagttaaataaggattcagaactattttaccatatatactccttttgaggaaattgctaaagaaagtactttaaccagtttttaggtaagatgatagcttaaaaatatacatatttttccccctacccccaaatccactaacttgagttttttaaagacacaagcccactaggaagaagaaaggaaatagcatttggtaaaatgaacagctgaaagatgattcttaactgacttagtaacctaagaaagttgaatcctaagctgacaatgagagaaactgagaagtagctcattaccactgcagaacccttcagaagtctcaataattattagctccagataccctgggaaattcctaaaggtagcactactgacctaaaatatctgtaaaattttctccatatcacttccctcactcttcagagtaaggcgactctctttccctcatcctggtgtaagctttcagattcttctctgcagaggataaaaaccaggggacaccaggcacagttggacaaaggatcgagggaacatggacataataaatgtggtgacactctctgccccagctttgttcctcagttggttcccaggggactggcaggcagactggtactcacagacatgaaagtagacgatccttgaaaaatctaaccccctggtgagatgacctaaagattccccaacaaaacagtccagccagattaccctacagacaaagctgccagtggtcaacaaagccatagcccacgaagagagaacgggcctggattagaatcaggacctctatctgcattatttaatacaacactgtggccgggcacggtggctcatgcctgtaatcccagcactctgggaggccgagtggggcggatcgcctgaagtcaggagtttgagaccagcctgactaatgtggagaaaccccgtctctactaaaaatacaaaattagccgggcatggtggcatgtgcatgtaatcccagctattcaggaggctgaggcaggagaatcacttgaacccaggaggtaaaggttgtggtgagccgagatggtgccactgccctccagcctgggcagcaagagcaaaactctgtctcaagaaacaaaaacaaacaaacacacacccaaaaaacagaaaacactacatgtaatgggaaccagcgcgtagctgttaaaaataaatggtagacctaaaaccactcgggaaatacacaggtcaggcttcttgaaaactgcatcatgccaatgagggtggccagtagcatgagggtcatagtggcatgtcacaaagcttgtaggtgctgttacatggttttgaactccagtaattagtggcttaatgaacaaggagaggagataataaacattgtttaggggttgggacttttgcatgaaattatccccccaaaagtttaagaaggtaagagttagttgtgaggaggaaggtttttcttctttcagtcacaaatacttatagagcctgttgggtaaaagattgtgctctaggctctgggaatacagaggtaaaactgtcaaaaagcctaaggcttttagaaccaagagttgcagctttttccagccatgtcttcactgaagagcccactgtgcccagcctcgttgacttcgcagtagaggctctaagcttgaatgttgtgaacgttccaaggctgggtttaagaaagccttagaactccatctagacctgtaacaagtacaagtgacttgctcctctgaagagtgcttgaggctgcatgtgtcctgcatgtgaggctggagctctcagtccttctgcctcctcaccacctgtattccacatgcacccagcagcacctctcagtcttctctgtcggggttgggggagagggtaaaccaagtgtcagattacagcactcttggtttacgttcacactcgctaaaaggggtaggaagaattggagagcttttaaaatacttaccgcgcccccaagttttaggtgtgtaggattcatcagtaaacagaaaaaggagctgccctcatgggacttacattccagcaggttagcaggcagcatgcattcccagctcccctcatggcagccaggcagggtttacacattagaagctgctcagaaaagggaatgaggtacattcaccttagcttactagcccagaatgcagtgtcagtgtgtctgactcaacaccaagctggtctaccacccccagagggcaaacagtggagaccgttcaaagggagctcaaggtcagagccagggaagacatgccttacttagtatcaggccgcaggggaacttgcagaagtcaagtccactctggcctgtgatcaggagtagcattatgctaaaatcgttgtaagaataggtcagttatgatcagacttcttatacagagcctgttggaactgagtaccccccttttgaagtggaatatcagtaaaatgcttgaagttgatgtgcatcatatcagtttgcctgggagatgtgatgaatgatggtccattttatttgggagacctctctcaatattgcctgagtccatgcactaatagttggttagaccagatgaaatactgattgagcatcttgcagtgaatgggttcccctaatgcattgcctcctcccttgctgatggtatatacggtgcatatgtgtctaaagaactgacttgtaaaggactttgattgtgaaccaccatgagaaatacattttacatcctgacatagtatgcacatataaacacacacaacattttcatgtaaaatactgtgtttaaagtgctatgataatttgtcttcctgcacatgacacattaaactggcttcatgaactactaaacagtttctttacacagtttgataaatatcagtccagaacagttgtattcaaagtgagatctgctgactggcagcatcggcatcaccctggagcttgttagaaatgcagattattaccccttgccctcataccttctaccagtcagtctgctggtgaagtgcacacagcatctttaatccaggtgattctgatgtttggtgaagtttgagaagcactggttctttttacactccagagagcttttgtgattatatatattgatatttaccacattataaattaaaactgaggaacttgaaaatatttattcattcattctgaaagtaatggtaataaatccattacgtgttgacatgcatgagagcagtgatgtcatcacacaatatgtgtcccttggatctgggaacctctgcagtatactcttgagaaaatgagagttaaaaaagcaaatatattttagtagtactatgaaaatcatttgaccttgcaaggactcctggggactcccagttgttggcaggtcatgctatgagaactgttcttctcaactgtatgttttgacaagactgagagcaaatttttgtaatacttcttatatagagtaattatgtaatcatatgggatgttttcatcactgcttaggtgtcaggggaaaatgaggaactttccaatgcccataagagtatggtttattaggctgttgtgaggatctagtatggaattcccagaaccagttggtagatcccatatttgtattatgttttatgtaatgtctaggtttgtctcaaaagagggtggattacctgtgctctccctgcccttcagggagcagatagattacttccctgtggaaaattgtgctgtagatattggaagtatttgtatcttaattttgaatatttttagtcttatttgtattttgagtgattttttagacataatgtttaaattacttcatttcttccaaataagtttaggcaactagtttttttctttttttgaattgtacatttgtttcttggtatctgtgggtgattggttctaggaccctttcaggtacaaaaatccacagaagctcaattccccagtgtcgtatttacatataacttagacatatcctccctgcactttaaatcatctctaggttacttataatgcgtagtacaatgtaaatgctgtgtaaatcattgttatactgcattgctttgaggaaaatgacaagaaaaaaaagcctgtacatgttcagtacagacaacaatacattttttttctcaaatattttcaacctgcagttgtttgaatccatggagggtcgactgtaaaagtagcaccttatggctgacgagccagcattcaagttgctcatactgtcccatttaatactctactatctatatgtagtactctggtaaataaatagttttagatttgtggtgaagttacagagctgtcaaaggatgtgttaacctatagaccctggagtatttgaatcctaccttgactcacaaccttcttgaagaattacgcaaattcttcaatcagtcactcaccccaggcctttgcggccagccgactatcccaggtccagctgtgtaatggtaggaagatactgtgagtgagaggaggagagagattggttggttgattgggattcatgcagagaagcagaagaatcacggcgtgatattctttggatcttcgcaccagaaagcatggcctcatctgtgtccttgaccagccgctctccttttctccagggacaggggcttcttgcacgctatcctcacttccctcagcagggaagctgggctgggaaaggacagagagaagcagatgtgaggagcttatgcttttcctggagatctctgtgtggatggttttttctttttaattgtctttgttctgtgcatctgttgaatatcttctttcccaaattaaacttctttcccaatataaacttcccgtgagcaggattttgttgtcttatttgaatggtcttgcttcctcaatgtccgcacaccccagtgcctagtacaatcctagctgcataatagatgccctataaaatacttgtttgaatgactagtaattctataggagagaagcacagatgttaaaataaatgattgattgattgattggttgattgatttccctcaggacacatgctaaccaagagtgagaagaaccagttattggcaatagcatcatcattgtttgtggcattccagttaagagcacaacattttcaagaaaattcaaggtatggtagatcatttaaaacagaataaatgagcagaacaatattgataatccagtctacataggaaatactaataaaagatgtggctgatctcagttctagagatcttatgggtctttggagaagtataataaagtcacactgtataaatatgatattgcttacattttgtttaaacaagtttttttaagttcagaaaggataaaaggatcttggcccttttaatttggacataagaagatagtctgaaatccgatgggaaatccattcgagtagtttgtgtttatgatttctgttttatttacttatcttgaaaaacgtttggagaagtatatttaaatgtaggaatgaatctgggcagttaaaaaaatatatatcagaaactagtgaacacacaagaaggaattaacaccaggttgagttagtcatttgtgagacacaagtgtgccttttagcttcctagtgacccaggtaaaaggagaacatgctttatatcagggtaagtagaaacaaaacctcaatgccattggtgcttctagagagaggattgtttattatgaatgtgtgtttacttgctggagcaatccctttaaaggaatcatgctgttgataaattgttacttcagtttcttttcctttttactttttcacaagaggaagaacaaagtttaaaaaaaagaaaaaaaaagatggaaggtgatgaactagctttgaaaagcacaaatcagaaactgaaattacttctgaagaattaggtagaggagaaactaaattggatttaggctgtatcttagtggctaatgtggttttattcaggaaatctcagtgtagttggtactcttcacttgttctctttacctagaaagaataggaagcttacagtgtatctttttaaaagttatgatttggtagctaccagggagagatgagaagatatagaatatcagtaaatgactgaatgactggacggaggaggaaaatggtcaatagaaccgtgaatctgcttgtgcatctgtttaatatcttctttcccaaattaaacttctttcccaatataaacttcctgtgagcaggattttgttgtcttatttgaatggtctttgctcccccgatgtctgtacacctcagtgcttgttgtttggttgtttcccccccacatagttgtgcggtctagtatgggaggcactagccatgtatggcaattaagattaaagtgaatggaagaatccttttcaaagttaccggaaacgtggctacatttcaactgttccatagccacgcgtggttagcagctcctgcactgggcaactctaagaggctttccaccacagcaggtgtgtttccatcaagttctgttggacagcatttgtctggagggatatgtgtgtaggagagaatgttgcttttgttttaaaacctgaatttcatattttttattcttttgataaatgcagtattcagatcctaattcctttaccttcagatgttatttggaccttgattatttcagaagttctgagtgtagctaaatatgactggtttgatttttaagaaatgtatgcaagttattttcagagagtgctgccttactgtgtggaagaatctgaaaagggcttaaaaagatggagaataaaaattacctgtaatcccataattattcaataattacttttaatgttttggtagaacccttcaaagtatatatatatatatatatatatatgtatttatgtgtgtgtatatatatgtatttttatatacatacatgtagcatttatactttgcataattagagtcataaacctgggaatatggtttgaattacttgtgcaagataaacagcagtatattgaacacccatgcacacattatctagcttcaatgactgtaaaaaatctatcttccttgtttcatttttacctctacccactccacactttccccatttgttaattttttaaggtaaaatatacaaacacacatatacacttcttacctgtacagtttttgtttttgttttttgagacagagtcttgctctgtcgcccaggctggagtgcagtggtgcgatctcggctcactgcagccttcatctcccgggttcaagcgattctcctgcctcagcctcctgagtagttgggactacaggcatacactaccacatctggctaatttttttttgtattttcagtagagatggggtttcaccatgttggccaggctggtcttgaactcctgacctcaggtgatccacccacctgggcctcccaaagtgctgggattataggcatgagccaccgcgcccagccttacctgtacagttttaacaaagggatgcttgtgtgtaactcagacgactctatctttacatcgtctcttccagtgcactccctgcctccttttgcttgtggtgctacctgcggtgtgatttcttcagattgcttttttggtaaactttttttttttcttttctttttagagagatgaagtcttgcttttgtcgcccaggctgaagtgtagtggcacagtcataactccctgcagccttgaattcctgggctacagcgaccctcctgcctcagtgtccctggtagccaggattacaggaacataccaccacgcctggctaatttctgtattgtttgtaaagatggggtttcaccatgttgtccaggctagtctcgaactcctgggctcaagtgatccagtccaccagccttggcctcccaaagtgctggaattatagacctgagctgggcgaaaccttgtgtctgctaagtacaaaaattagcgggggcgtggtggcgggtgcctgtaatcccagctactagggaggctgaggcaggagaattgcttcaacccaggaggcggaggttgcagtgagccaagaatgcgccactgcactccagcctgggtgaaagagtgtgactccgtctcaaacaaacaaacaaataagctaaacaatctaataaaaaacgggcagtaggtttgacttagactttttatcagagaagataaatgaatggcacataagttcatgataagatgctcagcatcatcggtcagtggagaaacaaaatcacaaatctataccactacacacccactagaataatatgcatcaagtaatgagtgggtaaataaaaagtggcatatccatactatgagcttattcagcagtaacaaagaataaacagctacattcactaatgtgtgtaaatctcagaaataacatgtgaagagacagaaaccagataaagaagactatgtaatgtatgacttcatttatttgaaatttctagggaaggcaaaaagtataaagaacaaaagaaagatcagtggttgtctgggtctgggtatgggagcaagattgactgcacatgagttttattgttctaaaactggattggggtgatgggtgtacaactgtatgaatgtattacaatctcacttgatcttagccaaaaggccgagaagtgatataaatgtattacaatctcatcagactatacaattaagatgtatagatgttattggccaggtgcagtggctcatgcctgtagtcccacactttgggaggccaaggcggactgatcacatgaggccaggagttcgcgaccaacctggccaacatggcgaaaccctgtctgtactaaaaatacaaaaattagccaggcttggtggcgcatgcctgtagtcccatctactcaggaggctgaggcacgagaattgcttgagcctgggaggcataggttgcagtgagccgagatcacgccactgcactccagcccgggtaacagagcgagaccctgtctcaaagtaataaaaagtaaaatgtatagatgttatacaagtaaattatatcttaatgcaacttaaaaaactgtaaatgtggtaccaacaaagggcttgaaagaggtgggaagtattatgagaagtgttaagatgatggaagatacatgtaaaaataaattgtattcgaaacttgagtagaagcagatattaaggagtcaggttactgacttggaagacctggtggatggtggtaataacaaaagtgcaagagcagctttgaaaagaaaatatgagaagttccatttaggcagttgagtttgagatccttgacaggcataattgtagctcctaaagacttagcaatatgatatattcctatccctttgactgtttcttctttaataataatatatatgcccctttgagcccattaggaaatacttggggcatgcttttgtactcattagttccatgatttttttgtaataatcaaatgcacacagttttagacttcaacggtgttccttaatgtgtgctccatagagcgctagtttgggggagtattaaaatgcattacttaagaaaatgtttctgtgtttaaataaacgtggaaaatcccttgttaagttagaaacctcttagagactgtcatacaggcacacctcatttcattgtcctttgctttattgcacttctcagatattgcattttttacggattgaaggtttatggcaaccctgcattgagcaagtctttttgtgctgtttttccaacagcatgtgttcactgtctctgtgtcacattttggtaattctcattacatttcagacttcatcattattatcatatctgttttggtgatctgggattagtgacctttgatgttcccattgtaattgttttggggtgccacaaaccatgcacgtgtaaggtggtgaacttaattgacaaatgtgtgtgttctgattcactgacctggccattcccagtgtctctcactctccttgggtctccctattccctgagataaagtaatattgaagttagactaattaataacaaagcagtggcctctaagtgttcaagtgaaaggaataagtagcacatctttcactgtaaatcaaagggtagaaatgattaagcttagtggagaaggtatattcaaagccgaggcaggctaggcctcttgtgccaaatggttagccaagttgtgaatgcaaaggaaaagttcttgaaggaaattaaaagtgctattccagtgaacacacaaatgataagaaagtgaaacagccttattgctgatatggagaaagttttataggtctggatagaagatcaaaccagccacaacattcacttaagtgaaagcctaatctagagcaaggccctaactctcttcaattctgtgaagggtgagagaggtgaggaagctgcggaagaaaagcttaaagctatcagagcttagttcatgagatttaaggaaagaagctgtctccataacataaaagtggaggggaagctgcaagtgctgatgtagaagcttgcagcaagttatccagaagatctcactagcatcatcgatgaaggtggctacactgaacagcagattttcaatgtagataagacagccttctattgaaagaagatgccatctcatactttcatagctagaggggaaaagtcaatacctggcttcagagcttcaaagaaccagctgactctcttggtaggggctaatgcaactgatgacttgaagtagaagccagtgctcatttaccatttcataaaccctagggtctttaagaattatactaaatctattctccctgtgctctagaaatggaacaacaaagcctggatgacaaaatgtacatttacagcatcatttactgattattttgactccactgttgagacctacttctcaaaaaaaaaaaaatttttttttcaaatgattgctgctcattgacagtgcacctggtcacccaagagctctgatggagaagcacaaggagattaatgttgttttcacgcctgctaacacaacgttcattctgtagctcatggatcagggagtcattttgattttcaagtcttattatttaagaaatacatttcacaaggcgatagctgccataaatagtgattcctatgatggatctggacaaagcaaattgaaaactttctgggaaggattcaccattctagatccccttaagaacatttgtgcttcaatgggcaaaataaaagatcaacattaacaggagtttggaagaactggctttgaggtgttcaagatgtcattgaaggaaatagctacagttggggtggaaatagcaagaaaactagaagtggaacctgaagatgtgactcagttgctgcaatctcgtgatagaacttgaatggatgagagttgcttcttatggatgagcaaagaaattttgcttaaaaagcaaagtttttaagatggactctgcttctggtgaagatgctgtgaacattgttgaaaaggattttagaatattacattaacttagttgataaagcagcggcaagttttgagaggattgactctaattttgaaagaagttctactgtgggaaaaatggtatcaaacagcatcacatgctacagggaaacctttcatgagaggaagaatcaattggtttagcaaactttattgttgtcttattttaagaaactgccgcagcctccccagccttcagcatccatcagcctgatcagtcagcagctaccctctatcagcaaaaagattatgactcactaaaggctcagatgagggttagcatttttttagtaataaagtttttttttttggagatggagtctcgctctgtcgcccaggctggagggcagtggtgtgatcttggttcactgcaacctccgcctcctgtgttcaagcagttctcctgcctcagcctcccaagtagctgggactacaggcacatgccaccacaccccactaatttttttgtattttttagtagagacggggtttcaccgtgttagccaggatggtcacgatctcctgaccttgtgatccgcctgcctcggccatccaaagtgctgggtttacaggtgttagccaccacgccagcctaaactactttttaattaaggtttgtacattgtttttaagagctatcgcacacttaatagactacaacacagtgtaaacgtaacttttatacacattggaaaagtaacaaattcatgtgacttgctttattgaaatacttgcttcattgcagtggtctggaactgatctcacagtatctccaaggtattcctatatactaaaatgcattctgaaactcttaagagcaggatatagttggactcttacctacactctttttttcttgtgaaaacctttttcctaaaagctctttgaaaaattaatattccaatgaatgcttttgggaaacacagagtatgttatattgtgatttgtagtgttttagatagtttaaacacaacattccttagagattgttgaaatatttagggcaattgctttataaagtggaggttaagaagcaatctttatagtctttgctaatttctagctaaaattgtaaatgtgataattgctacattaaaaaatttaagtatcttattttttaactcattatcttttagaagttagaaacaaaatatgtatttatgaaatatgtagactgcaagttcacttatccagataattgcacatttattttctatacaacaagcaattgttcatttttggtgagtttattttctgttgaaaaaaaggtactatcacttatttagtattatcagtttattgtaaaattgctacaccctataacagtgtagagctgtaacatttagtaaatatagtgttcttcttcaggaagcataatcttgtgtagctaagtgaagctatgtttctggcttgcttactgaggaggtccttgacacctacatcatgaaagctgatgtacggtgtttgaaccttcacattttggctttagagtcatgttttcacaatcggcttgggaatggattctaagagtcaccctccaggtgtggctctgtattgctttgtcatgggtgtgtccgtgaaatgtttttccttccaaaccagtagcccacagcccttcctttgtgttgcttgttttggctgctgatcttattttcccaatttctctatgggcttcactctttcatcatttatgacttggaaaaacacattaataatacatacccctagtatttggatagtaaaacaatagtggttcattttagaaaaaaagaaaagttaatgtcagaaacaatagccattttttgggggatgactataaaatgaatttgatgagctcaatctttttctgacttaccatgaaggcttctttttaataattattcttaaacacttatattgacagaaatgaatcattaaaagctagttatattaaacaaccactttttttaaaagctaaaatgattttgttgacattgtagtttgatataataatttgtttcactaactggtaatgattggaagaaaaaatagtaaaggtaacattttaatcatttttagtaatctttatttttgctcaaaatgtctgttttttcttggatctggattcagctttcttgagaatcagcttttactttccgttttttttcctttctttctttctttctttctttctttctttctttctttctttctttctttctttctttcttccttccttccttccttccttccttcctttctttcttttctctctctttttctctttctctcttcctcccttcctccctttcctttctttcttttctttctttccttccttccttccttcctttcttttcttttcttttcttttctttcttttctttcttttctttctttctttcctcagtcttgctctctcatccgggctggagtacagtggtgtgatcttggctcactacagcctctgcccgctgggctcaagcagttctcctgcctcagcctcccaagtagctgggattacaggcatgcaccgccaggcccggctaatttttgtattttttgtttgtttgtttgttttgagacggagttttgctcttgttgcccaggctggagtgcgatggcgcaatctcagctcaccgcaacctccacctcccaggttcaagcagttctcctgcctcagcctcccaagtagctgggattacaggcgtgcaccaccatgcctggctaattttttttgtagttttagcagagactgggtttctccatgttggtcaggctggtctcgaactcctgacctcagataatccacccacctcggcctcccaaagtgctgggattacaggcgtgagccaccgtgcctggcctaatttttgtatttttcgtagagactgggttttgccctgctggccaggctggtctcaaaatcccaacctcaggtcatccacctgctttggcctcccaaagtgctgggattacaggcatgagccaccacgcccggccactttctggtttctactttatcctcataatttccctcttggtatttgagcaggggttaaagactcagaaaaagaaacaacttcactatggcctataatattaatggaaatacttcagcctgaaaggttaaaataaagcactccctttggtggaggatgactttggctgcatggaatcagtgtactttgtgctcaggcttaggagaacatatcaagtatcacggctggctacacagcctggtgtcagtttaactctttcagccacagtagcataacgggaaattacttcctcttgggttctttgtatgtgcagtcattgtgtctgcatttgtattgtattatctttcctcatctggcttcctgataaaatggagaatcgattttttagtgatttctgcctagcagagacaattatctgtttatttttctttgcctttcctggtttcagatatagaatttattcacctgttattaaattttcaattagatgataaaagtttaaggtttttgaaatatgatcttaaccactgaaagatgagtggggtgagaaacatagaaaaaagtaaccgtgtgaaaataattcccaaggaaaagccggtattgttgaacgggtacatactggctcttttactaagatgtcttctgaattaaaagagcatgtgaaattataacacatttatacgtcaatgaaaataaaacaacttatcataactcgtttcatactctcagataagccacttcactgtgacaatgaaggtgacgtgatacctaactatacaataaaaaaaaatagcactttaagtatatatttacaaacgtatgtatacactctttgtgtttggaaatagctacgttcatttgagcaaataaatcccctaaaagcaacaagatgggagaaaacattaactcaatcattatcacttaagcttgccttactttttactgtctctgttatgatattttcagttacttaatatgactgtgttgaagatggtttagaaatctatgtgagattaagtacaagatactaagtggataagaaagcacatttacatatttttgcttactattacattgtaaaatatttttattttgatcctactataagagctgagggaaaggcagaatagcctgattattgctggagaatttctctgttccctaccatgattccagaagctcttgcacacttcatcagtattattgtaattctttggctgcaggatatttggcagctgttgcaccccactggcaaatcctattcatacttctttcccattcaccattgccattggagaattgatttctctctcctctactctaacctttcccaattcattttggattgttcaatgtgaaacattttaatttcatatcatacagctattcagcttacaatcccttttttaacctgtcaccagggtaacagcatagcatgctttctttaggcaatcaagtttttatttcacatgcttaatgttgcattaaatgtttgcattttgtttaacccccttaaatagtttgaactctggatatgttttatagggtaatgaaatccttgatttttgaattgaaactaaatcaacaccatcagtgcatttataataaaatgtcaaaagattaatttccataatacaaagattattattaaaaacgcaagttagctgatctgtgtaaggcaattttctgtaggtaatggaggaatatttgtatatattatatttgtgttcagccttgttccaaaaaaagatttaaaagtggtttagagattgtcagtgagataagtaaaaaacttaaaaaaggaatagatttggtgcaaatgggaaaatatatcttttgaacccattatttgatttttcagtataatgcttttttctctgttcgtatatatgaagatttgattacttgatttttcagtataatgcttttttctctgtttgtatatatgaagatgtgattacttgatttttcagtataatgcttttttctatatttgtatatatgaagaccataatgatttatgcatgtggagatgggtgaagtaacgagatgtactagaatgagattagacatcttttctaggagaccagtgtgggcattgtgtgctttaatatctcttcatcagtttactttagaactaccttttccttaaaataagtaatttaataataatagattagtgaagataaaaatgcatatgtttagatattgattatttgacttgaattggatagacctcagtttccctttacagaactacctagtcatcttttcagccttatccccaataatatgttcaatgaaatttgttctgtgaataaatcctgtgatatttggaaaatactaagaaatgtgtaagacaaggtagagcagagactagcaaaccatgttgcttggaagcatggttcaaattgtaatgcccggggtaaccactaagaaaataactttaaaaaatagtattagtaaaagaaaagtcaagggaattaaaataagacaatagaaaacgttgatttaaaacaagacaataataaaggaatagagggagaaaaaagatatgacatatagaaagtaaaaagcaaaatggtagatgtaaatcctacctgatgggtaattaattatattaaatgcagatggcttaagcctatcaagagcagatactgacagaatagatttaaaaatatgatcaaaccatatgctttacaagagacacactttagagttaaaggcataaataggtcaattgtaaaaggatggaaaaaagtatcagacagacattgtattcgtaatattattatcagtattttattactaataatgctgatgtcaaacaaaatagccttttttttttttttttgagatagggtcttgctctatcacccagtctggagtgcagtggcatcacaggtcactgcaagtttgaactcctgggctcaggtgattctcctgcctcagcctcctgagtagctggtactagagtgcatgccctaacatttggctatatatatatttttaaatagagatgaggtcttgctatgttacccaggcaagtctcgaactcctgggctcaagtgatcctcccacctcagcctcctgaagtgctgggattataggcatgagtcaacacacccagcctttttttgtattttttttttcttccagagacagggtcttgctctgtcacccaggctagaatacagtggtgtgattatagctcattgctgcctctaattcctgagctcatgtgatccttctgccttagcctcccaaggaactaggactacagatgtactccaccatgcccagctaatttttaaaaatctctttagaggtaggtttttcctatattgcccaggctggtcttgaactcctgacctcaaatgcctggactcaagtaatccttacgcctcagccttccaagtagctgggattacaggcatgagctgccaagacaaaatattgttcaagacaaaattattgctagagacagaggggtattttataatgataaaagggtcaatccatcagaaagctataacaagtataaacatatatgtacctaataacacaattcccaaatatgtgaagcaaaactgagacaaagagagaaataggcaattccacaatacatcactttgaaaaatggatagaacaactagagagaatatcagcaaggaagtaaaagtgtcggacagccctatagaccaaatagatctaacagacatctctagaataatctctccaacaacagcagaatatacctgtctcaagtgcacgtataacattctccaggctagaccatatttaccataccatatactaggccataaaacaagcctcagtaaatttactagaattgaaatcatccaaagtatgtttctgacaaattaaatgaaattagaaagcaacaaggaaaatttgggaagttcatacatatgtggaattaagcaatgtactaccaaataaccaatagatttacaaaattacagaggaaactagaaaatattttgtggttaatataaacatcacaacatctaaaaacgtgtgggctgcacataagcagtgcttagagggaaatgagagctgtaagcacatgtattaaaaaaagaagaggccaggcaaagtggcttacatttgtaatcctagcactttgggaggctgagacgagcagattgtttgagcccactagttcgagaccagcctgggcaacatggtgaaaccctatctctataaaaaatacaagaatatgctgcgcatggtggcacgtgcctatagtccttgctacttgggaggctgaggttggggaattgtttgagcccgggaggcggaagttgcagtgagccaagatcgtactactgtactcctgcctgggtggcaaagtgagaccctatctcaaaataaaagaagaaataaagctgggtgtgggtttggtggctaacgcctgtaatcccaattctttgggagattgagactggaggatcacttcagcctagaagtttgagaccccatctctacaaataataataataataataataataataataataataataataataaaataattcgctgggtgtggtggcacacacttgtaatcccagctactaagaaggctgaggtgggaggatcggttgagcccaggaagtcagggctgtagcagtgagccaagatcatgccactgcactccagcctggctgacagagtgagaccctgttgaaagaaagaaggagagagagagagagagaaagaaagggagaaagaaagaaagagagggggcggtgggaggagggagggagggagggagggaaggaaggcagtcaggcaggcagggaagggagggagggagggagagaaggaaaggaaggatcaattaccttatcttccacttcaggaaacatggaaaaatagagcaaacaaaagcagagggaataaaatactgaaaactagagtacaaataaatgaaatagatactagaaagcaatagaggaaatcaataaaagcaaaatgtgtttgttggaaagatcacagaaatgacaaacctgtagataggctgaccaaaagaaaaaaaactgaaattgtaaaatcatgaataatagggggtatgcctactgaccttacagaaattaaaatggtcataagggaatattgtgaacaattgtttaccaataaacaagataacttagataaaatggagaaattcatagaaagatacagactgccaacactttctcaagagaaagtaggaaatccgaatagacttatcataagtaaagagatggaactaatcgttgcaaaacttcttagaaagaactcaggaccagatgacttcattggttaaaaaagttaaaggaaaattacttaatactaatcctcacaaactcttccaaaatcccaatttacaagaccaatatcatcatgattccaaaaccagataaagtcattgcaagacaaaaactaaaggctgatatccttcttaagtattaatgcaaaaattcccaaccaaatagtggcaaactgaatccaagaatatatacagtgatatacatcataaccaaatgaggtttctcctagagatacaaagttggtttaacatacaaaagtcaatcgatgtgatacatcatattaatagaataagagaaaaaaaccacaggattatctcaaatgcaaaaaaaaaatctgacaaaatccaacagcttttcattatgaaaaacactcagcctactcggaatagaaggcaacttcctcagactgatgaggagcatgtgtaataaacccacacctgaaaataagggcatctagattggagagaagtcaacttacctctttttgcagatgacatgattttagatgtagaaaatcttgaggaattgacaaacaaatctgttagaactaatgagtcctggaaggatacaggatacaagaatgatatgcaaatatcaatttttgtttttatacagtggcattgtacaagccaaaaatgaaattaacaaaacaactctatatagcaccaaaaaatatacaatacttaaatgtaaattttaaacaagaaatgcaatacttgaacactgaaaactataaaatgttgttgaaataaagatgacctaaatgaaaaacaccctatgttttgaatcagaagacctaatattgatcaccaaactgatctacagattcagcacaatccttactagaatcccagctgcattatttttggaaaaatagacatctgattccaaaattcatatgaaaatgcttttgcattgtaaaagaggaatgaagttcagaggctcctacttcccgatttcaaaacactacaaagctacaataatcaagacaaagtggtactggcgtaagcatagacatgttgatcaatggaatagaatcgagactccagaaataaattgttatatttacagtcaattgagttcagtaaggataggaagaaaattgaatgagttaagattaatcttttcagtaaattctgcttgggcaattggatatgcacatgtaaaagaatgaagttggtctccttcctcacaccatacataaaaatgaactttaagaatcatagacctaaatgtaacagtgcatacaacaaaattcttagagaaaaacataggagttaatctttgttacgtttggttaggtaataatttcttacataagatgtcaaaagtacacgcagcaaaagaaaaattagataaattggacttcagaatttaaaacttgtgctttaaaggacatgatgaagaaagtgaaaagacatccctcaaaatgggagacaatatttgcaaatcatatatatttaatagtcttttgtctagtatagggaattcttacaacttaataataggacaaatgatccagttaaaagataggcaaaggacatgaataaaaatttttcaaaaaagatatagaaatggccaataagcccataaaagatgctctgtatcattagttgataggaaaatgtaagtcataaccacaatgagataccacttcacacccatgaagtggtgaagatgtggaaacatgggaaccattacatgttcctggtgggaatttatgactacagtgatatgaacttgggaataatttgacagattcttaaaatattagacgattaccacatgacctagctattccacttcctggtatatacccaagggaaatgaaaccatgtgtgcacagaaatgttgtatacaaatgtttatagtggcatttttcataatagccagtggaaacaaccctaatgtccttcaaatgatgaatgagtatataatagtaaataaaatgtgatacgttcatagaatggattatttttcagcaataaaaataaatgagctattgatattttctgcaacatggatgaattttgcaaaaatgctagatgaaataattcagtcaaagtagatcacaaattttcccagaataagcaaagctatagaaatcgaaagtacataacagttgcttagggctgaggaggggaatgtagagtaactgctctcgtatctaatgtttcccttatgaggcaatgaaaacgttttaaagttgcttgtggggatggttgcataactctgtgactatactaaaaaccattaacttgtacacttcagatgggttaaatgtatgatatgtgaatttcatctcaaactgtttaaatgtatatagtctgttacacattttatatttaagaatttgttttcctaatggtataatagatgttcaaattttaggaattaaatgaggcatttcttccttctagtttgatggagtctttgagaatatttcttttcaaattgtaaaatatgtttctatgtctgctctcaatttagtgcaagagtagctcttgggggtagcaatatcaagtgttcctgggctaccacctggaaggtggaagtagtagatgtatgtgaacccgcgttcttccatcttttctttcctcttctgccttgaaatgcaagtgacataaaattaaaacaacacggaaaagtttcagttcctacaatggcagtgtagtgtattttcaatgaattcctttccagataaataattataaactctggacaaaatataaagcacaactatttgaaggctgtcgatgtacaaccaaatacgacccctaaaagaagaaaactacaccagtgagatgcacatttatgtggcttttcctctgaaagcagtcactattgcatgcattaaggcatggctgtaactcagttattggttttaggtctcagagaatgatgttcagtgttgtcagaactgctggaaattaagcagggatatcatggcagaaagggagcaacagagtgaagagttccatatgtgaattcaggttctctcaaattgttggttgaccctggaaatgtgcgtaacaaagaccccagggatcccagaagatcccagaactgctggaatgctgaatgaactgagctaaaatttcagttgcctaccatggttatgataatgttggaatctgaatctcatcaatttgaggtacttgtaaacaccttgagctttccattaaaaccctggaaggaccatgccttgggagaaaagactgtttctggaataaatggtttggactttttatttattgagagcaaaaccaaatagttcctagtacaacataaaagtgagcctccacaacttcaggactggtaactagcaatgtaactgcctgctgtaataaaaatcagtacttttcagagggagataacatgatgagtgaagtctgacaacatctccacaatacagtttacttggcatgcaatctaagaataaagacaactataatccagaggaaaagcagtcaacagaaatcaaccgtgagattactaaaatgtttgtttcatgggcaagagctttaaagtagctattaaaatcattttcaagtattaaagatgaaaatgagggaaaaatgggaactatcagcatagaaatggaaattaaaacacactactaagtggaaattccatatctaaaatgtcctatatctgcaatggataatttgctggataggctgaaaagcatactggtgatggcagaagaaggaataggtaaccttgaagatagaagaatagagattatgcaatctgaaaaaagagaaagaaaaatgtgtttaaaaaattgaagagacacaaaaggacaaaggaaacttttggaggtaaaacatgtttattaccttgattgtggtgataatgtaatgaccgtatgcatatgtccaaactaatcaacttgtgtgcattaaacatgctgttttttaaaatgtcaaatacacctcactaaaggtgtttagccgaggtgggcagatcacctgaggtcaggagtttgagaccagcctggccaacatggtgaaaccctgtctctactaaaaatacaaaaaattagccaggtgtggtggtgcacgcctgtaatcccagctactagggaggctgaggcaggagaatcacttgaacctgggagctggaggagcttgcagtgagctgagatcgtgccactgcactccagcctgggcaacagagcaagactcctcaaaaaaaaaaaaaaagaaaaagaaaagaaaaaagctgtttaaaaaaaaatggaagacagcctcggtgacttgtgggcactataagttatcaggaagcatgtattaggaaggacaaaaagaaaggcaagagagtgaagaaacttcagaaaaaatatttaatgttgtcttcttaagattgggaacaagacaaagttgtctgtttttatcgtgtttatacagtattatcctggagatcctagccagtgcagttggaaagaaaagaataaaaggcatagaaatcagaaaggaagaagtaaagtcatttctatttacagaggtcataattgtttgcatagaaagccttataagaatctataaaacaattgctggaactaacaaatttagcaagattacaggataaaaaggcaatcaaatgcaagttgtatttgaataaactagcaacaatgggaaagtgaaaattaaagttccacttaacatagcataaaaataggcaaagcagacaccgtcactagttagagtatgaaggcatgcaagaaataacggagcctaatgattgcaaaggaagctttccacaccttaattggttacctaagaaaactctaaggagtctgccatacaatgaataaaactaaggcaaaaataggcataaagttaacaaaagagattcatgactaccacactttatgaaataaattaaaaatcagaagaagtaagagttatatcctgctcatggactggaagagaaaatattaagatgtcacttctctctacagtaatacagattcaatgcaggcccgatagtaattctattgggattgtatctcagggaggatgtggaagaaattggcacattgattttgaaatttctatggaaatgcaaagggacttgtattagtccattttcaccctgctgataaagacatacctgagactggacagtttacaaaagaaagaggtttaattgaacttacagttccacatggctgaggaggcctcagaatcatggacgaggaggggcaagtcacatcttaagtggatggcagcaggcaaaaagagttttgtgcagggaaaccccccccttttttttttctttaaccatcagatctcgtgagactccttcactatcatgagaacagcataggaaagacctgcccccatattcagtcacctcttactgcatccctcccataacacgtgggaattcaagatgagatttaggtggggacacagccaaaccatatcagacctagaatagctaataggaacaaagttgcagtacttggtctacaaattttcctgaaatgggctcacccctgtctcctaccacacaggaaagttagagatgcatcatagacagatctacatgtaaaacatctaaaacatgtgagtatatcttctgaaactttgtatgtaggcaaaaaacttcttagcaaggacacaaagcactaaacataaaaggaaaaattagtgagttagattttgttaatattaaaaacttccattaaaactgtaaaaagataccactacatacctattagaatgtctaaaatccagaacaccgaacaccacgtgctgctgaggatgtggagcgacaggagctctcatgcattgctggtgggagtgcaaaatggtaagccactttagaagacagtttggcagtttcttacacagcataaccttaccatataatcaaggagttgtgctccttggtatttaccaaaatgagctggaaacataggcacacactaaaacctgcacgtgaatgcttacagcagttttattcataattgccaaaactgagaagcaatgtccttcagtaggcgagtggataaactggtatgtccgtacaatggaatattatttagcaataaaaagaaatgagctactaaggcatgaaaagacagtggaaacaaatacatattggtatggggaaaaagctaatctgaaaaggcagcattctgtatgattccagcgctaagtgacattctgaaaaaggcaaacctatggagatggtagagatcagtgattgccaagcattcgggggagggaggggaaataaataggtggaacaggggacttgtaggcagtgaagctactctgtatcatactgtaattctggacacatttcattagatatttgtcaaaacccacagaatgtataacacagtgaaccttaatgtatggacttcagttaacagtaacattgatattggcttatcaattgtaacaaatacaccatacaaatgcaagatgttcataatagaggaattcatgtgggggaggatgtatgggaaattgaaattctgttgagtttttgtcaacctaaaactgctttaaaaaataatgtctttttttttttttttaaatctgctgaaggaaagacattgttaagaaaattcataagcaaaccacagaagagaatacttgcaatacataaatctgacaaaggccttgtatccaaaataaagaactttcacaaatcaataaaaataaggccaatgacctaataaaaatgggcaaaaacttgaatataaatggccactgagcaccataaggtcctcagcattactagtcatgggggaaatatacatgaaactatgataagatgcggtttcccagcctctagcctggctagaattagaaagactgacaatgccaaatggtggcaaggatgtagagtaactcattgcagtggaaacatggaaatgttgtaatcttttggaaaacaatttagcaactcatataaaattaaacctacatttagcctacgacctctactccctagattttttaccccccaagaaatgaagacatacctctttaaggggggaaaaagcaatcaagtacaaagaatatctacagtggctttgtttataacagccccaaactggaaaccaccaaaaatgtccatccacagaaggatgaacttattttggtgtgttggtacagtaaaatacttctcagcaagaaaaaaaggatgaactattcaacaacatggatggatgcacctcaaaaacattatattggtcaaaaaagccacagttttttttggagtctgttcttgtgaagctcagaacaggcaagcataatctctggttgactgttagtggcaggcagagccaagcgactggaagggtgaatgacagaacttaagatcttggaatttgactgtatgttagttgtatgcgagtaaaatttaaaaaaaaataacagttgctgaaacaaaagagagggatttcagatatttctgcacccaattatggtaacaataataactaatttagcatttatgtgccaaacactactctaagcattttacaccttttatctcatgtaagcagcatatgggttaggcattcttattatctttgtcttgctgatgaggaaactgaggcacaaggaggctaagtaagttgtggatggaggtcacacagcttttgtaggtctgcacttggtcagtgagacatggggtctgctggggtgacagctgtgccacagtgcctttcctggctaatcatgcccagtgtctaaattgagaaccttaagcccttatcggtggaagaaggaaagggagtatgcataatatttaaatatatgagattatgagtaacattacgtattctatcctagattcagatgtcatttgtgtaattatttgtaatgctaataacaccaaacttgggggtgttccctgtttctcagcatgattatgtgatacagactcttccacacagtctcatgtatttgaacatacacattttcaattgcatgtaggcagaattctaatcctcctctatgccaattcctagctttgaagaggttctctgaaaatgctgcttttatctttcttctgcagtgatgaactttaatgttggagtgttgtaagttctcacataataaggctcagatttttgtttggtttggcagtagacttctgtttaaaattcctttaatctgttcattctatgctttttatattcattttaataactgatggctctgtaaagaattttttttgaatttattgcactagttaaaaaactactaaaacttgtacttaactattcctccatctcaacgttctaaaagtgagttttccagtgaattgctgaatttttatcttccctgggagttgttcctccccttccccaaccctggggaaataagaaacaattcatatactagatctaaagtttcattaaaattgcttatgccctgtctcaggcattttaagtgggccatctgtctaaacatctctctctccttttttttttctgatcatttcctcgacttattcatgagccatgggagggctcctttgtagtctccatgtagctggttctgtctacccccactgaatacatctatgtgcttgcataacatatcttttcaccgtgctggaaattctctgaacttggttcagatgaatggcccactttctgaaggcctttttcttcctgcaaagatttgtatgcagaaactgacctcagtggccatggaatgcagcatattattctcgatcattttacagcccacccactgtgaaagttatgatgaagcatttcttaatgattccttgaccattagcattgttttaactcagtattttacttctaaagaggtgatggcacaacaaaaaccagcttttttgagtgtctgataattatggtttaaaatgcttataatcctttctaactgaagatgctgagagtttttatgtttatacagtcttcttttagcaaatgacttgtaatagcaaagtatttactcaaaagcacccttttgagtaaaatattccagtaagttaaatgtattagtattaatagtgactatcagctgacagttcttcaccatcaaatataaaaaatttagttatgtcgagcatattcatcctggctggctgatgataaagtggacagacctgggttagagctattattttatttgctttgtgagtcactgtttatgtgagttcttttttactggggtttttggtttttgtttgtttgttgaagaaataacttaattggtatcagctttgcaggtgactaataagttgcacagattaaatttttggtcagatgacagcatctttcactagaaatgtacttcgttaaaggaaactgtatcattactatggtgagttgaagttctaagaccttttccttattgtcagagagttgttcataaaaatcttctttgagactattttgaatttaatggatctgtgtaattcttttctaaacatttagcacataattgtaggtaattgttactatcataaatctgtctgtgctggttaaattaataagaatgtttcaaagtaagtattataaatgtattttcagtgattttgcagaaatagagcatgcattctttcaggtttgtattttttaaaatttatagcttatttctattgcagagcatatttatatctgccagttaactggcatatatgcccaacccatccattttatttaaaaacccaaacaaaactagtttcaaacttatgtcaagccagaaggaatctttgcaaattttgtttgtagaagagtgaacttacaaatagatttcacagtttcgactctgttttggtatttagaggtcttgcacagtgaagcctttttcctatatcctgttaacatatcaccctgaaagaaattgttagaaaaaggctgggtactgtgactcacacctgtaatcccatactttgggaggacaaagcaggaggatcccttgaggccaggaattcaagaccagtctgggcgtcatagcgagatccaccccatctcttaaaaaaaaagccagacctggtggtggcgcacacctgtaatcccagccactcaggaggctgatgcagaaggatcatttgagcccaggagttccagactgcagtgagctatgattgggccactgcactccagccattgtgacacagtgagatcatgtttcttaaaagaaaaggaaaaaattgttagaaaagtgccactgcaggagttaagtttgtagaagaagcagtagcttcctatcacttgcctaactctgatacacttttacaggtgtagaaatattggttcaaacagattgaataagttctcaggtacattgctagtagaacaggctgagatttagacctggatgttttaactcgaaaccctgtactctttccataaggcccctcctgggacaaattataatatatatgaaacagatgtgaatcaaaataaaacaatggaaaaataaatagtacttaggttttggagagtggcaactgtatctcatcaccatctataaggtccctttctgtgggaaaatgggttctgggttggaacaggatgtcaggatcagcaatgttccaatgcctctggaagcagagacttgttacgtgatagaagaaattctcaatccctactccatcaggctgctacagtttgaaaaatattacagcatatgacatagattaaatggaagaaagatctcttgagtttatgctataattaaggaacaatttgtgagggaggcaatattttccttgaaggatctgttagtgtgagaagcagagagatgagatgagaatccaaagtttctataaagaaagaggtttcagttataggggaaagtaagaatataggccgagagccgggacaactactcataataaaagctatagcatgtatacacctaatttaatcaacacctccctatcaatgcagatattgttacaatcttttatacatacataaggaaactgagacagacagtttgctccgggttttgtgtcagcttctgtgactcatcaaggcctgagttcaaaaccactgtcttgctctctgcctcatggtagcttggtttaagagtctgtcctaaccaaatagacaaatcagagaataagcagaaataaaattgaatgcaaaaggtgggttcttacttttaaggcattgaatggtagttaggttaataaagatgtaacttggtgtggggtagaaaacgatcaaatgatcatgagcaagatagtgacataattcttgaggaaagcacagattcaagaaagccaagttgcacggtcatctagatgtgaggctgtttctgcaatcacaatacccctgtgaaattggagtattgaccccattcgaagtgagcaaaatgaagtcttagtgagatgataggcgtagtccagggacacccagggagtatccaggagcttggggcacacagtcctgtcacacctgtgctcttgctctcctgggcaagtcagcctccccttctacacgtgcttggtgcatagtagacactcctcacagtcttttctacttatccctcatctctttgtctccatcctgtgccaggagctggagatacaaaaataaggaatgattttggtcttttaggagcccacaggacactgggagacaaacatataaacaaataaatgccctgtagaataaaggtgctaagaaaaaaaagaggaatactggcacagaagccctttcttcccttcttcctttctgctcagacctccttttctttccctctcctcctcccctccccactgtgtgttgtctccctcaactcccctgcacccccattcattcatactcttctgtgtgaggctctatcccctgaaacagttcttttcacactgccagaaagaatcgtcaaggcctgtgtgtacagtgtgcattattgttgatgcattttttttttacttttatttttacttccatggtatttaaaacatatccttatcttcagaataatgcagatcaagaagtggtaggtcaaatacaaatatgtatttaaattaataatattaatcagatattgaatctagaggtgattggattagaagcatagtttttgtgactctgatttttttaatgctgaatacacagagacttcttttgaaaatttggtgggtttaaatgaaaacataacttggaacattttttcagaactgtggtttaagctggagcccagatactacaaaatgctgatgtttagtacttggtaaatattacttcacaagtataaatatgcaatacctaaattaggttaattctgaaatcattaaattttgttactttaaaaagtcgtgggaaacatttatattctaaaaacacttttgtctttggctgcttgatacggattttctgaaccatgtaatactgataatatgcaagaaaagacccgtatgataagactaacattgttcatagatatggagtcctttctggggggttttaggtgatggggaaaaccagggctagaaaagaaataatgtgtaagtttccaagatgaggactgtgttttatttctctgtggtgccccacaatttagagccaagtgcttagtgtttgttgaactcataagtcatttagggttttgtgtgtgtgtgtgtgtgtgaatgtgctttattttagcaaaatttagatgttgtcctattatataataacataataagtgggtatctgagtaatgtttaaattcgttttttaaatttcgtgaatttttagtaataacattataaaataagtatagttttttttttgtttttttttttttgcaaaaaataattatatcggccaggcgcggtggctcatgcctgtaatcccagcactttgggaagccgaggcgggtggatcatgaggtcaggagttcaagaccagcctgaccaaaatagtgaaaccccatctctactaaaaatactaaaaattagccgcgtgtggtggtgggcgcctgtaatcccagcctctcgggaggctgaggcagaagaatcacttgaacccaggaggcagaggttgcagtgagccgaaatcgcaccattgcactccagcccgggcgacagtgcaagattccgtctcaaaaataataataataattaaaaaaaattatatcctagctaatgtactaagatatttctcttctaattgacatcatgaagaaacattctataagtagaataatgtagagaggttcattgtttaatacatttttagtctcatcaccagtaaagaacaaaatgattctctaggccacatcatgctaactcagtaattcattttatgtctctgaagtttaaggcatggcatacttacttatttcattgtaatttttttttaaaaaaaccattttgaatagtaaccaaatattgaaaaaaactaatactgcttcaggcagatgaatttgtgaatgactgtaacaattaggcaattcaaattcatagatacatgatgattcttagagtaggtgtttaaaatgttcgcaaatacattcaatggcagttttagcctgtgcattttatatcaaagggaaattagtttattgagaaataataatataaaattattaactctttttcttttcattctacttcagaatgcctgttattaaaccagacatagccaactgggagctctcagtaaaattgcatgataaagttcataccgtagtagcatcaaacaatgggtcagtgttctcggtgagttttctttctttattttcttggtaatcttgatgttatctatgaatatttaaagccatttttaacctgttcagtgactctcgtcttttgaatttgtagtacctctatgtatttttcatcttctttaggaagctgaatggaaatggaaatttttgttctcttatgcttattaggaaatacatttctagatttagccacatcctaaactcactttctgatacttgattcatttttcttttatgctgtgagaagtaatacttttgcctttgttacagagaagagcattttgaattacagttccaaatgtatgatagtggtggtaggtaaccatccttttaaaacaaataatctgaagcctcacataacattatctttaaatctcatgctgcaagacactcttgaggctaaatttaccttgtggtgacactctttttgttttgaagaacttaaaccccttggatatagggtccaagatagaactgccacagttggaattctagtctatagtgaacaagattacagtaagatttcagtgtttatactgtagtatgagtgatatgtttaaaactgtgatccgagtgtgccagaaaaataccattaagagttgctgttttaagtcgtatgccttcgtgttttcagcctgaactcaaggaggttgctattaatatatagttagtataatgaatattctgtttatctacatttctcttcttacggctaaattgcattgaaatgtcattttgttttggggaaacaagtgaatttttatcagaatattgaaataggatatgaacatcaaaacaatataatttcacacaaataagacctggtgtggcttgagaggggtacggcagtttcttgatctcagtgagaaaatatcacaagttgaagattcatgagaattcattcattccacaaataattgttgcatgcctactgtgcaccagatcagttccaagctgttgccctggagaagctgacattcttgtgtggtgtcagactcacagatcaatgatgtcagtccatgaactaagggtagtctccttggttttctttaaatgttgtgattcactgtatacgccaaaattgctgaaacgttagatactgaaagatacttcactcagctctcttaaaatgaaagctatgatggagttaaacagctgtctcatgagatcttgtgtgactctctacattccacctattgacatggtcatttcagaaaaacagctttgtaagtgcacatttaaccagagatcaggttgagtagcaaattataggaattgaatagtaaagagtatcaatattacaatgtagcatttttttttctgggggaagattaactttacaaaaatgtagagtttagcataattttcagttctatattgagtcaccactgaagccttactgtaatctgatattctgatacaatgttcttttaagtagtgccttaccttaataaagaaaactgtctagattacttttcagagctgttacttctttttttttttttttttttttttttgagacagagtcttgctctgtcgcccagaggctggagtgcagtggcatgatctcggctcactgcagcctcttcctcccaggttcaagtgatttctcctgcctcagcctcccgagtagctgggactacaggtgcatgccaccacacccaactaatttttgtatttttagtagagatggggtttcaccatgttggccaggctggtctcgaacacctgagctcaagtgatcctcctgtctcagcctcccaaagtgctgggatcacaggcgagcgttgcttctttatgtttgttttagattccatgttgaaaagtagagacctctggcctgactgcatacgtggtatctttcaaatttttttctgtagaattatctccagcttcactttttagcttatgaggaaaacagggctgtttttaaaacacatcaaaattagtgcattaaaaacttccctggaaaatatccaccttagtatataatatcagaaatgatttcctatatttattggcttagctactgtcagagcatcaatagcccaatgaaaggcatgtgcacatgatagtgtagccctttttcctaggcatatttaaatttagctactttcatttgacatcagtattatgaaaggaggcaggttgaacagcgtggcgaagtaaaggctcattggtagaaatatttcaatagtatggcactattgtctgcttttagggtcatagacgggagaactgtgattgttaacttagtttcccagatcacccactgtcacatcaagaaaaaaattagcctacaggtgacaagccaggtctgggttaatgactctggagatagtgcaggcaaaggctttactgagcacacagtaaagctttaggtgccctacatttccagagttcttctgtttaatttttaggagtttaaattataagatatttctaataaggaaagtacagcagatgttgcagattttccatacaggtctcctatttaaaaagaaaaatatatagattaaactaagtcctttctttacatcatcctgttccactttctcccaagtggtggcagctaacctgatgatgctgtgtgtcctttctgtatgtgttgttaagacttttggtacagatgtatacaccacaataatggtaaaaaggaaagttgcaacaatatacatacttaatggcaccatttatgtaaattttaggcaaagcaatttcatttacaatagaatgaaaaggactaaaatacttaggaatatatttgaccaaggaggcgaaaggcttacacactgaaaactataaaatgttgctgaaagagcttaaaaaagacacaaatatatggaagggtatcttgtgtcagggactagaagacttaatatggttaaaatatcagtacctctcagctacttggaaggctgagacagtaggttcacttgagcccaggagtttgtgcccagcctgggcaacacagcaagactccatctctggtgaacaaaagaaaaatgaaagaaggaaatgtcagtactacctgaagtgatctacagatacaacgccatccctatcagaacccccaaatacattttgttgcagatatagacaaatttattctgaaattcatgcaatttcaagggggtcccaaatagtcaaaacaatcctgaaatagaagaagaaagttgaaagccttatacctcctcatctcaaaacttattacaaaaccacagttttcaaaacagtgtggtactgcacatatatagaccaatggactaggatagagagcccataagtaaacccttgtatgtatggtcaaatggcttttgacaagagtttctaaaatattcagtggagaaaagacagccttttcaacatgaataaatttgggtccttttcttactctgtatacaaaactaaccaaaatggatcaaagacctaaatgtaagagctaatgctataaaattcttagaagaaaacacaggggaaggctgcgcacagtggctcatgcctgtaatctcagcactttgggaggccaaggcaggtggatcacttgagctcaggagttcaagagcagcctgggcaacatggtgaaaccccatctctactaaaaatacaaacattagctgggcttggtggtgcatggcacacacctgtaatcccagctactcaggatgctgaggcaggagaagctcttcaactcagtgggcaaaggttgcagtaagctgagatcgtgccactgcactccattctaggtgacagagtgagaccctgtctcaaaaacaaaacaaaacaaaacaaaacaaaaaaaccagtagataacataggggaaaagcttcaaggtattggatttggcaatggtttcttagacatgacaccaaaagcacaggcacaaaagataaattggactatgtgagagttaaacacttctatatatgaaaggagaatattttcccagaattttcatccctcctttaaaattttccattctaaacactataaatatataaatgtttcatgcaaatattttctcccattctgtgggttgccttcttactctgtttttttcccaaagtaaccactctgtcagagtacaatcaacagagtgagaaggcaacccacagaacgggagaaaatatttacaaatcacatagatgataagagtttgtttgtttgtttgttttttgagacagtctcgctctgtcacccaggctaaagtgcagtggcacaatcttggctcactgtagcctctgcctcccaggttcaagtgattcttctgcctcagcctcccaagtagctgggattacaggtgcatgccaccacacttggctaatttttttttgtatttttagtagagatggtgtttcaccatgttggccaggctggtctcgaactcctgacttcaggtgatccacccacttcggcctcccaaagtgctgggattacgggtgtgagtcaccacgcccagccctcccgataagagtttaatatctggaatatataaagaaatttttcaactcaataacaaaaaacaattaaaaatgggcaaaggactttcatagacacctctccaaagaagatatacgcatggccaataagcacatgacaagatgctcaatatcactaatcattagagaaatccaaatcaaacctgcagtgagatactacctcccacccgttagaatggctagtatcaaataaacagaaaataagtaccggtgagggtgtggagaagctggaacccttgtgcacagttggtaggaatataaaatgatgtggttactttggaaaaaacagtatgatggtccctcaaaaacttaaaagtagaattacatagtaaccttagaaagttggtaattctgatatgtgctatataacacagatgaatcttgaggacattatgctaggttataagccaggcgcaaaaggacaaatactgtacgattccacttatatgaggtacctggagtagtcagactgatagagacagaaactagattggtggttgccaggggcagagaggaaggggaatgaggagttattgcttcaagaatacaaagtttcactttttaagatgaaaggttttctggaggtagatggtggtgatggtagcaggaaaatgcaaatgtatttaataccactgaactgtacatttaaaaatggttaagatggtaaattttatacgcgttttaccacaagtaaaacatacacaaaacaaatcagtatttataatgaaaaacttaaaaggagggttgtggccaggtgcagtggctcacacctgtaatcccagcactttgggatgctgaggtgggtggatcacctgaggtcaggagttcgagaccagcctggccaacatagtgaaaccccgtctctactaaaaatacaaaaattagccaagtgtggtagcacgcgcctgtaatcccagctacttgagaggctgaggcaggagaatcacttgaacacaggagatggaggttgcagtgagctgagatcacgccactgcactctagcctgggtgacagagtgagactctctctcaaaaataaataaataaataaataaaataaaaaaggaggtatgaaaattctgggaaatgaatgcatggtaaaaatgaaagttaagtgaagtgttaatcgtaggagaagtgaagtattttatgtattttaggtctttattctgatttctgaatacagctgtctgaatgaatgacagaattaattaatagtataaaacctgctagacacaaagtagaaatattattcagcttgtcatggtgataagccgaaaagtacccaataacaaactgatttttattataattattttcatgattcccttctggattcccaggatgttttccatttctgtcttgctcaatataacacaaaactggtcaaaatagtttttggccaggtacagtggtgcgcacctatagtccatccactcaggagaaaataagtttatgatgaattaaaatattaacacagttaatatcttaaagatggtgaaaaactaaattcatattgaatgtgattcacttgaaagaaagagttgaaagaagagtgtcagagtagtcctaatgtataagaaaattagttagaaatttggccttcctagcgatggaaaaaggagcactatacatgcactttttgaaaaattttgcctgatgtttcatgtttactactaataaactagaaagcaattgtatatgatcctgtatattgaattgttacagtgggccaatgatagaaaattttgtaaggacctaagggtttttcgtgtctctgtctccttcagttcggctctgatcttagttatttcttgtcttctgctaggttttgaatttgtttgctcttgcttctctagttcttttaattgtgatgttagggtgtcgattttagatctttcctcctttctcctgtgggcatttagtgctataaatttccctttaaacactactttagctgtatcccagagattctggtacattgtgtctttgttctcattggtttcaaagaacttatttatttgtgccttaattttgttatttacccagtagtcattcaggagcaggttgttcagtttccatgtagttgtgcggtttcgaatgagtttcttaatcctgagttctaatttgattgcattgtggtctgagagactgtttgttacgatttccattcttttgcatttgctgaggagtgttttacttccaattaggtggtcaatttttgaataagttccatgtggtgctgagaagaatgtatattctgttgatttggggtgtagagttctgtagatgtctgttaggtctgcttggtccagagttgagttcaagtcctgaatatccttgttaattttctgtctcattgatctaatattgacagtggggttgttaaaatctcccactattattgtatgggagtctaagtctctttttaggtctctaagaacttgctttatgaatctgtgtgctcctgtattgggttcatatatatttaggatagttagcccttcttgttgcattgatccctttactaccaggcctgccttacaagagctcctgaaggaagcactaaatatggaaaggaaaaaccagtaccagccactgcaaaaacataccaaattgtaaagtccatcaacactatgaagaaactgcatcaactaatgggcaaaataaccagctagcattataatgacaggatcaaattcacacataacaatattaaccttaaatgtaaacgggctaaatgccccaattaaaagacacagactggcaaattggatagagtgaagagccaacagtgtgctgtattcaggagacccatctcacatgcaaagacacacataggctaaaaataaagggatggaggaagatgcactggtttttcctcatctttatggatttatctaccttttgtctttgatgttggtgaccttcggatggggtttttgtgtggacctcctttttattgatgttgatgctgatgctgttcctttctgtttgttagttttccttctaacagtcaggcccctctgctgtaggtctgctggagtttgctggaggtccactccagatcctgtttgactgggtatcactagcagaggctgcagaacagcaaagattgctgcctgttccttcctctgaaagcttcgtcccagaggggcacctgccagatgccagctggagctctcctgtgtgatgtgtctgtcaatccctgcgggggggtgtctcccagtcaggaggcattggggtaagggacccacttgaggaggcagtctgtccgttaacagagctggagtgctgtgctaggagatctgctgctctcttcagagccagcaggcaggaacgcttaagtctgctgaagctgcgcccacagctgccccttcccccaggtactctgtcccagggagataggagttttatctagaagcccctgagtggggctgctgcctttctttcagagatgccttgcctagagaggaggaatctagagagacagtctggcgacagcggctttaccaagctgccatggctttgtttattctctgaggggaaaaccacctactcaagcctcaataatggtggatgaccctccctgccaggttgacttcagactgctgtgctggcagtgagaatttcaagccagtggatcttagcttgctgggctccgtggggctgggatccgctgagcaagaccacttggctccttggcttcagccccgtttccaggggagtgaatggttctgtttcgctggtgttccaggcaccactggggtatgaaaaaaaactcctgcagctagcttggtgtctgcccaaacagccgcccagttttgtgcttgaaacccagggccctggtggtgtaggcttccaagggaatcttctggtctgcggggttgtgaagaccgtgggaaacgcttagtatctgggctgaatagcactgcccctccctcatggcacagtccttcacggcttcccttggctaggggagggagttccctgaccccttgtgctgcccgggtgaggcaatgccccaccatgctttagcttgccctttgtgggctgcacccactgtctaaccagtcccagtgagatgagccgggtacctcagttggaaatgcagaaatcacccaccttctgtgctgatctcgcggggagctacagaccggagctgttcctgtttggccatcttgccagccacttgagaaaaatgtctttttactgtttttgacttaaagctgttttatgtgataacagtatagctactcctgcttatttttggtttccatttggatggaacaattttttccatccctttactttcagactatttgtgtctttaagggtgaagtgtgtttcttgcaggcagcatatatttgggtcatatgtttattcagtcagccagcctccatctttttattttattttattttatttttttgagacagagtctcgctctgtcacccaggctggagtgcagtggcgtgatctaagctcactgcaagctctacctcccaggttcacgccattctcctgcctcagcctctcgagtagctgggactacaggcgcctgccaccacgcccggctaattttttatatttttagtagagacagggtttcaccgtgttagccaggatggtctcgatctcctgaccttgtgatccacccgcctcagcctcccaaagtgttgggattacaggggtgagccactgcacctggccaccagcttccatcttttaagtggagcatttaatccatttacattcagggttattattgatatatgaggttttgttcctgtcatatcattaattgctttctgtttgttttatatgttccttgttccttcctattttatattgtttatctttgtggttggtgttttccttcagtggcaacattagagtcttttctgttcctcatttgtgtgtttgccttaccagtaggttttatacttgcacgtgttttcatgatggtgtatattgtccttttgcttccaggtttaggactcccttgaacatttcttatagggcggatatggtggtaatgcattccactggtcaaattcggcgtttgcttgtctgggaaagactttatttctccttcattaatgaaggatattattactgggtatagtaccactgagtggcagtgtttttctttcagccctttgaaaatacgattccattctctcctggtatgtgtggtttctgctaagatgtcgactgttagtctgatgggacttcctttatagatgactagatacttttctcttacagtttttaaaactctgtatttggctttagatagtttgactataatgtatcatggaagagatactgttttgcattgaatctggttgaggatttctggaccttctgtatctggatgtctgtatctctcactagacttggggagttttcagttattatgtccttaaatagagtttcaaatcctttcattatttctttgccttttgggatactgataatcttgatttttggttactttattgtgtcccatatatcatgaaagctttctttatgttttaaaattactgaaaaatttttttgtgtgactgcattatttcaaaagacttctcttcatgctttgagattctttcttctgcttgatctagtctgttgaagcttttgaatgcattttgcatttcattcagtgaattcttcattccagaatgtgtctgattcttttttatgatacccatctttttggtaaatttctcatttatatccttaattgtctttctgatttttttgtgttgtttttcagatcactcttgtgtctcactattattagtatcaaaatttttagttatttttctggaatgtgaatttcttttggatgggatctgttgctgcagacttattgtattcctttggaggtatcatattcccttgctttttcatgtttcctgtgtccttacgttgatatttgaacatgtagggtaatattcgcttcttccaattttagaatttgttttcataggggaagactttttcctgaagatgtatccatgctgttggttgggtaggaccctttggctttgattctgggtgcatgtggtagtcactgtatagtgtagtcactgtatgatttctttggctgtaaacagtatcggtggtatctgtgatttctttagtggcttagggtactgttattagtagaggctgtaatgaggttttctggggacaaggatgccacatgggccactctttgggcctaatggtggtagtggtgggctgagtatgtctgtccttgggccccggggttgcatgtgctgacactgatgttagtgggtccaggtgagtaaatttaacaaaagaagtataaaacttgtattgtgaaacaaaccattgaaaaaagaaattaaggaaaatccaaataaatggaaagtttctaatatttgtgaattgaaaaacttaagatggcactgcttgcctgtattagtctgttctcacgctgctaatgaagacatatccaagactgggtagtttataaatgaaacagctttaatgaactcacagttccatatggctggggaggcctcataatcatggcagaagatgaaggaagagcagagggacatcttacatgcagcaggcaggagagcgctcttgcaggggaactcccctttataaaaccatcagacctcctgagacttattcactatcacaggaaccacacggggaagacccacccccgtgattcaatttcctcccactgggtccttcccacacatgtgggaattatgggagctacaattcaagatgcaatttgggtggggacacacccaaatcatgtaattcccaaattagtctaaagatgcaacacaattcctgccgaagtccaagctgtatttttatcagaaattgacaagctgatcctaaaatttggaaaatatggaaacttaagggacccagaatagccaaagtaatctaaacacacacacacacacacacagacacacacgaaaaaacaaaaaaacacgccagtcacattggctcagacctgtaatcccagcactttgggaggccaaggcaggaggatgacttgagcccaagagttcgagaccagcctgagaaatatagtgaggcccccatctctacaaaaaagttttttttagctgatggtggtagcatgtgcctctagtcccagctacctagaaggctggggttggaggatagcttaagcccaggaggtggaggttgcagtgagctctgatcacaccactgcactccagcctgggatacagagcaaaactctgtctcaaaaccaaccaaacaaacaaacccacaaaaatccagaattggataaatcatatttccatctttcagaagttactacaaacagccttgtaatcaaatacagtgtagtacttgcaaaatgattgtcatataaatcaacagaatagaattgagaatccagaaataagcccaaaaatatatggtcaattgatctttgacaaaggtgccaaaataattcaatggtaaaaagaataatctcttcaacaaatggtgtcgaaacacctgggttcacatgtaaaggaatgaagtagaaaccctacctcatattgattagtatacaaaaattaatccaaaatggattgaagacctaaatataagaggcaaaacatctttaaaaatagatgaattgttcaacatcaagattaaaatgtttgcttcaaaggacactaacaggaaattgaagacaaaccagagaatgggaaaaaatatttgcaaatgaaattttcagtaaagcacttgtgtttaaaatacataaagaacacttacaacttaacaataaaaaacagcccactctaaaaataggcaaaagatctgaatagacgtttctccaaagaatatatgcaattgccggtaagcacatatagagatgttctgcatcataaggcatggagggatccagatgcaaatcaaaaccacagtgagattgtcctttgtacccactacatagctctactttaaaaagtcaggtaataacaagtgttggtaggccaggtgcggtggctcacgcctgtaatcccagcactttgggaggctgaggcaggtggatcacgaggtcaggagatggagactgtcttggctaacacagtgaaaccccgtctctactaaaaatacaaaaacaaaattagctggggcatggtgatgggcgcctgtagtcccagctccttgggaggctgaggcaggagaatggcatgaacccgggaggtggagcttgcagtgagccgagatcgccacactgcactccagcctgggcgatagagcgagactccgtctcaaaaaaaaaaaaaaaaaagtgttggcaaagaggtggagaaattgaaaccttcaaatgctattggtgggaacgtaaaagggtgcagctgctttggaaaacaggatggcatttcctcaaatggttaaatatctgggttattcagaaccttggctctgttgtatcaggagtatttaatcttgaatatttatataagtatttatgtatttctttattactatggtgaatatatcttacctttcaaataatattgaagcaagttatttccctgacccctttgcgggaccgctttgccacggggtgcctcctttaatcagcctatagctctcaactccttgtgggagggagcacacgagcgaaggaggcgggaactgtagtgcaggagcactggaactgaccagccgttttggcgccagtgggatcaaactccactcatttgcacctgttgccttccacacctcgtaggagggagtgcacaggtgagtgggtgcaggaaccagagcaagtgcttttgggcgccagcaggagcgaactctgtgcaggccccatggcagcatccaggaggggtgcctgtgactcccaaagccccagagggcatgttacagtgctcttttagctctgctctccacaggcggcttaagtgttaacagctcagttggcctgctgctgccctccaccagcgagggcaaagggccagcgtaacaaccttttgtatccacacacatggctcctgaactcttgtctggtgtccaggaaaaatgaggtcacacgaactaattgaaggatggtaaatgcaggaatgattttattgccgatgaaagtggctctcagtgggaagagaggggagctgaaaaggggacagaggaggggtaggtgatcttcccctgaagtccggctggattttctccggttactccatcaagctgtccctctgaagtcaagtcccttctctccaacattcagctgcttctcctctctgctgattgagtctggggtctttataggcacaggatgaggtggggtggggccatgggtagtttaggaaaaggcaacatttgagctggaaaacagggagagaagttctcactttgggccacggtctcaggcttttcagcttgagggtggaacttcaccagggacccacacctgtctgcctagaatttctctgcctcctgtctctatcattgtatcaatatcaaacaatagttgttggcctacatgtcagtaatttaaagatgaattaaatggttatatatgataacatttatcagagacctttagaaacattcatattctttggtctactatttttacttctagaacatattccaagcaagcaatgaaaaatcgctaattcaacatataatattttgtcagggaaaaaataaattaaaggcagttgggcttggagatatccatgtaaacaatctgtacttataagggaaggcagagttggaagtaattaaaataatgtaataaatgcattaatagaggtgtcatcaaccagttaaatctatgagaaagaaagaaaggcactcaactgcttgggggaagggaaggatctgggggaagatgaaagaagttcctcttgggggagatgactgatgagtcacagcttagaacatattttttagtatatataagccagaacttgcctcaaaattattgtataaataaatgaggaaaaacattagaatgtggtagcatgggggagagcacctcagtcccccaagtagctgagactacaggggcatgctaccatgtctggctaatttttatattttttgtagtgacagggttttcgccatgttgcctaggctggtcttgaactcctgggttcaagccatctgcccaccttggcctctcaaagtgctgggattacaggcatgagccaccgtgcccagcctgtgatttcaagttttatccaagcaatattttttgagagcaatataagatttgagactgggtgcgtggctcacgcctgtaatcccagcacattgagaggctaaggcgggaggatcacttgagcccaggaggtctagaccagccctggcaacaaaaaaaattttatatgattagccggtcatggtgatacacgcctgtagcctcagctactcaggaggcccaagggggaagatgctttgagcctgggagattgaggctgcagtgagccatgattgcaccactgcactctagcctgggtgagagtgaaatcctggaccccgtgtcgaaaaaaaaaaataaagatttgagataggtaagcttttgtgtacaagagagtttgtgctacattttgttttctttataatgtttgttttggttgatgcaaaattgtttcatcttagatgcttgaggtggaaggagggaattgttttgtagtattcatataattgaaattaccaccctatatttttctcctcaaagaaagaatatggtgatgaactaagaatagaaaataataactacatatggatgcataataagaaataattatatacgcattgtttgacgttttccttctctgctataactcaccctttttcctttgttctaccaccatatgttttgttctggatttcttgactaagaaaacattccaccatagtttattttaatatttaaagagcactttgaaagtttgatttttttttttttttttgagacagagctcactctgttgcccaggcaggagtgcagaggcacaatcttggctcactgcaacttccacctcccaagttcaagttattctcatggctcagcttcccgagtagctgggattacaggcacgtgccaccacgcctggttaatttttgtagtttaagtagagacggggtttcaccctgttggccaggctgatctcgaactcctcacctcaggtgatctgcccgcttcagcctcccaaagttttgggattacaggcgtgaaccactgtgcctggccaaaaattcaattttaagtaaatctgtttaaatgtttttgtgtaacgttttcataaaaatgaaaaattcgatgaacttagaatatgccaagaatcttctgcacaaaataataactttgtgttctcaaatagtaatataaagaatctgtaatgtatcttcattaagaatttatacatgcattttacatcataatctcttttattctatgaatagagcataatactaaattatgaagttactggaatttttataggaacatgataagaatcatgtggttcttttaaagagttaattttggaacatcttttgttcaaaaaatagaacattattatatgtattcttttgcctctattgtcagtttttaggataggcttttaatcttgaacatgaaaaggacatcagtaaacaaggtgagttaactattacatttatgcctattataggcttttagtttaaaaattacctatggcttaaatacagagaaggcagacagaaaaagaacctttttttccctgagcattttaaagagaatactacagtaccattaggggtttataataaaggactataattctatttagaaaactgacttacagtacatgacaaatgatagaaaattgaggtaagttttttgaagtcatattttatatttattttttatttttcattaatttgtcttttgccagaattaaatgttatgatcattaaactacttctcttcttaggtaattttttcacttagtctttctacccctctacctttaaaaagtatactgaacaaagcagcaaaagatattctctttgaggaaaataccttattttctgtgaatagttttttaaaattaaaacataatgcataaacatagaaattcttttacattggcaagaactttttccttgataaaattatttttccatttgaaaaattattaggataataagtcaagataatgcttaaaaatgtaaaaattttctgcaaagaatgtaaaactgtcgtaagtgaagccaacaggtaagccaaaaaaccagagagaaaatttgcagttcattttagtcacaaaataagggatgcccttcatatatgcagaactcttacaaatcaatatgaaaatgaacaaaagccctggtaaaaaaatattcagagacagtttacagcaaaggacatgtggctcctgcacatatgataaaaagtgctaaaagccacacacacattcaagtgaaaatcatgatgagatacgattttccatgcacattttggcaaaaatgaaaaatgtgttaattccgttttgttttgattttatttatttattttttttgagaccaggtcttgctctgttgcccaggccggagtgcagtggcatgatcacggctgactgcaacgtcggcctcctaggctccagtgatcctcccacctcaggctcctgaatagctgaatagtcagcatgcccagctcctttttgtattttttatagagacagggtttcaccatgttgcccaggctggtctcgaactcctgggctgaaacaatccacctgccttggccttccaaagtgctgcaattataggcatgagccactgcacctggcctcttcctaagattgtagaaacgtaagctctcaaacgctggtgggagtataaatggatataacaacctccatggagagcaatttgacaaaatgaatttatactgtgtgttatgtccacctgtaggagatgtgcaagaatagtcatgttagtattatttcttagagcagaagactggaaagaactagcaaaaggtagtgaaaaggtagctcactccaaaagttttgcttagggttccagagttcatagtaatttcatttgtcctaaaacatcacaggactattttaaagaatactatgtttctccctgctattggtttaaggaagaatgtctaaaagtaacttactgtaccagtgtaacatggtatcaaactgcctgtcagactggaatagttaaataaatatgatacattcataacattgaaatactgtgcagcctttaaaaagttgagagtgtcttctatgtgctgctttctttttttttaagacggaatctcgctctgtagcccaggttggggtgctggggtgcagtggcgcgatctcagctcactgcaagctctgcctcccaggttcacaccattctcctgcctcagcctcctgagtagctgggactacagatgcctgccaccatgcctggctaattttttgtatttttagtacagacgtggtttcactgtgttagccaggatggtctccatctcctgacgtcgtgatccacccgcctcggcttcccaaggtgctgggattacaggcgtgagccaccgcgcccagccctgtgtgctgctttatcaagtgacagaggcaaacgacattcattggcataaaaaagaatgtgtgtgtttgtgcttgtgatatccacagaatatctttggaaggagccacaagaaactgggacccatggttgcctgtgagttggggagctggagggctgactccataacaagtgagaaggatacatctcttagatcatatctttttagtattttttgaattttgaaccctacatgtgtattacctattttttttaaaaaacatttcaaaattgtgcagtggaagggtctgtaagatggagcagtgttgaaataatggagccttaattacctttcaagaaacttctgcagtgacttggccatccggggaagcaatcagaaaagcagctggctcattaaatggagagtgctggtcccacaggtgtaagtacacaaaacgcaatcactgaaattctttggctagcacttccaactcggagacagttgctggagatcacttaataggctctggttacaggttgatctaatctgaattaagaaattggaaaaagcaaagaaagagcagtaacataggtcagagtaaggaagctgagtccgaacagttcctccacagcctcctgtttccccttctgtaggtgtatgaactacccagagagattactgtgaatgtagaatagttggagagatgtgtttcccaatagcaaaaggcagtgtaaaggtagttcactccaaaagttttgcttagggttccagagctcatagtaatttcactcgtcctaagacatcacaaggctattttagagaacagtatgtttttccttactcttggttcaagcaagaacatccaaaagtaacctgatgtaccaatgtgactccttatcccaagctaaagaatatcctttcaaggcaaattcatccaaatcagcttgacatctgatgggagggggttggataaacaaggttgtagagaaatcaagtctgaagagtaaccttgcacagcttgatctgtttactttttaaatgcaggtttgttcagtgggtatcgcactctacttttgaaacataggactaaattttcacaaaaatgtgaagatcctgcccgtgtactctggaaaattgcttgtctaattgggtgcacagctgcacctgtaccctcttgaatgactcagtcatggtgtgctcaagggccaagtaacttgttatggtgctaagtgaagaacaaaaatatataaaattcagttactttggcaatgaaaaacactgaatggtattggttgttatattacagttggcaaatactgtaattaagacttcaagtgatttttagtattagccctggattcactttctgaagaattttatttagaataaaactttcagcgttgataccagatagtcacctttagttcagttcagtttcataaatctttataaaatatttatagtagtcaaggagcctattacgggtgctagtcaggtttctgcaacaacaaaaagtaaattaaagttggctgggtacagtggctcacgcctataagcccaacagtttaagaggctgaggcaggaggatcgcttgagcctgggagttggagaccagcctgggcaacatagtgagaccctgtctctacaaaaaaaaattagccaggcatggtggcacatgtctgtggtcccagctactcagggggctaaggtgggaggatcaagtgagcctgggaggtcaaggctgcagtgagctgtgatcgtgccactgcactttagcctgggcaacagagtgagaccccatctcaaaacaaacaaacaaaaaatgtaaaactcacaaatttaaaaaagttttaagaccaggcgcaatggctcacgcctgtaatcccagcactttgggaggccgaggtgggcagatcacctgagatcaggagttggagaccaatctggccaacatggtgaaacccagtctctactaaagatgcaaaaattagccaggtgtggtggtggtcacctgtagtcccagctacttgggaggctgaggcggagaatcgtttgaacctgggaggtagaagttgcagtgagccaagattgcaacattggactccagcctgggtgacaagagtgaaactccgtcttaaaaaataaaaataattaaaaagttttaaaattcactttggtatgatattttgacccctcaaagttgtttataaatagaatgaacagtggagccatctgttaaaatgccttggctgagtgactcagctagtagatgaattttgacatatttatagcaccatgcattgatcattttagttgtaatataacagctgtttattgagtaccttttatgacataggtcctggagaaccagtggtaatcaaaagagatgatacatctgacttctcacagtgtcatctgttgagggggacaaggatgaaagctgtgtcagtgaaggaggaaaattgagtggtaacagggagggcaggtgctgtggtgagcatgtatgtagcggaggccccgaactgaacacggaggtggttaggggaggcttaggaaggaaatactggccaggctgagacctacacaggaggtttgggggagggtaggggaaggagtcagagtttgaaggcctacataaaaagtagatacagctataaagaacgagatcatgtcctttttagggacatggatggagctggaagtcattatccttaggaaactaatgcaggaacagaaaaccaaatgccgcatgttcacatttataagtgggagctaaataacaagaacacatggacacaagggaacaacacactggcgcctaccaaagggtggagggagaagatcaggaaaaataatggatactaggcttaatacctaggtgatgaaataatctgtacaagaaaccctcatgacacaagtgtacctatgtaacaaacctgcacatgtatccctgaatgtaaaatagaagttaaagaaaagaaaaacacacacacaccaaaaaaaagcagaaagagaactaagaaagttaattgtgtctgaagcaagagagaagttgtgtatgactgcagcacagaaagcttgaagtgtgggacctggtggcaggcagggagggggaaacgagtggtgagatgggaggggcaggccccaggggaagcagctgggacccggccatgtgaaagtgccagccctgaacctggtctggatgtgtgtggagtgcagtggagagccacagaaggcttgcctgcagggagtcggacagagttgcctgtttgggagatcactctgccttcatgatggagaataggtttggagaggcaagactggaggaagagggcctgctagaagcagtcatgcaggtgggcgctgtgagcctcagctgcaagtattttggagaaaaaatggatcaacatggaagagatttaagatgtagaattaaccgtgcatttattgagcagtaataatattagctaatatatattgcatatttaatatgtgtcaagcactgttctaagtgatccacatgcaatatgttatttaacaacaattgtagtcaacatgtacaatctactttcatttctattccaatcctataaagcataagtactattattagtcctatttttaagtataaggaaattgaagcatagagaggttacgtctagagaaataggaagacaattttagacataattttgaagggatctgtgagatacacaagtggagatgtttcctgggtcattgcatgtgaggttctgtggcccaggagagagtttgggggagattcggtctccagtagtataaatggcagttgaacacgggttgaattgaggagaaagtagaaaagggaagaggaccaagaaagatgaaaccttgaggtatgctaaagatttaaaggatgggcagaggaagaagaatcagcaaaggatactgaagaggagcattgaaagagactgtgtcagaaaacccaagaagttgtgttgtttcagaatttaaaggaagaggctgttttaagaagatgaggtcattgatgccagtgaatgtaagaagtcatgttaaaacaaaaaaaacaactaaggctgagatttatccattggatttagtgaaaataattgagaacaatttcagtgttgtaatggggccagaaatgaaattgtggtgagttcagacattgagatatgcggacaagtggagtgaatgactcttctaaaggcatggtcgttaagagtgggccatggtgttgaggggattgactttttaaaggtttaataaattcttaagtgctgataacaggtgccagaagaagggaatttttgatgattaaagaataaggagaaaaagaagaactaggagaagggcctctgtgcttttttttttttgaaatggagtcttgctctgtcacccaggctggagtgcagtggcacgatcttggctcactgcaacctccacctcccgagttcaagtgaatctcctgcctcagcctcccaagtagctgggactacaggcgcacgccaccacgcccagctaatttttgtatttttagtagagacggagtttcaccatgttggccaggatagtcttgatttcttgaccttatgaaccaccacacccagcctctgttccatttttatatgaaaggacaaaggagcgggtggagatgaagggagagttggtgacttattcacctgtgatggctgctgtgggggaagaggtgaggtgagactgggaggagttgattatggcattagaaattggaagtacgtggaatgttgttgaggctgggagcaagaattgacttaaacacaacagaagggctaggctaaccaagcttccatttgaagtcgtggagcaggagttgatggggtatcaatccatgtggtcagatagtgcaaggcagctctgcatgtccaggaggccaggacacagggaggctaggcggagaggtgccagtgagggaggtggagataggcagatcctgaagggcctttaaactatgggtttcgattttattgtgacattattcattatctagccagcttttataggagcagtttataaagtatgttctagggaatactattgatcaacacgtttttcaaaagtctaaattgtgttcaaattggtgtcttgtgagaattaatagaatacatatttagatcactttcataaataaatacattaacatcatattttcagtaagctcatatttgatatctaatcaaattcttttagtcatgaatttgaatgagaggttttttgggttattgttactgtttgttttgtcttctgtgtttttatatttggaagcagaattagcttttggtctcttaagtgaccccttagtcacttaagatggtgttcatttccatcattgtgcttatcatgcacttgagttctcgtgtttatttctttgtccacttgtttaatttcagcctcttcacactaaaataggagctttgtaaaggcaaggacctagtcttgttcactgtcacacttcttgtacttctcaggaaatattcattgggggcagggtagaggagttggggaaggaaggaaggaaggaagagagagaacagtgaagcgggaaggaaggagttccaaaaactgcttccctagtggtcatggaaactctttaataaattagaatgttgtctccaaaaaatacaggcagatatgcgttgacaattgcctttcatacaccttaacaaactagttacataatgggatatcaaaattcagtcaatgtgtttgctagtttaatttgttgtgattaaagaaaacaatgattttatttataaatttagcacctaggaaatgtgatttcaaatatcaaagcataggcattttttactctttttaaaattgaagggtcaacaaaatctgccttattcttcacagttttttctctgtcagtaatgtagcagtgtgttaatttccagaaatttaatctcttctataaaatttcctgtgacctgaaaacttttgaattggagttaatttaccaaactgtcatggaatgcctgaaatttccttggggcagaggaggtagcagagaggtggtaagttaccatgtttccattgtgtgaataactgataagtgggattccaaacagaatccatgtagcgttttaatgaattcacatttggagaaaaaagtcacagactttcaaaacttacaggaatttggctgtcctagggcaactcctcacttaacagcaagaggggatgagaaggttgagtgactcacccagggaagtgactcacccagggaaggtcaagtgactcacccaaggttacttggtaagtaaagagagaagccagaagcctggggcctcctgacggctcctgcttctctttttactaaggtcttctgccatgggaagaaactctgaatgttagcaaccatctggatggtgttagttgtatgtctctctatgtatgttgaaaagaaaatgttgaagaattgaatttctcctgcttatgggttgtgtcacatttaatagcgttctttaagaaaaaaacacgattgctcaatatgattatatgagctcaccataaccaatgacaggcagaaaatcctgggaggatagacactaacaccacattatcctgttgggataatatcccaaattctgaatataactttcttttaccactttaaaggccaaaaaatggctgttaaatggagtatttttgtcaaaccaagtttttaaagttttcagcagctgcttctgctggcttttattaactactgaagagtctttttttttttttttttttgagatggagtcacgctctgtcacccaggctggattgcaatggcgtgatctcagcccactgcaacctctgcctcccgggttcaagcgattctcctgcctcagcctccctagtagctgggtttacaggcgcccgccaccgtgcctggctaatttttgtatttttagaagagatgcggtttcaccatgttggtcaggctggtcttgaactcttgatctcatgatctgtacacctcgggctcccaaagtgttgggattacaggcatgagttaccggaccctgcctactcaagagtcttaattgaacatcaaaatcctggttttgtttataaggaaaaaaagttaatggtgcaactaggactaattctttgattaattttttaaccacttctacttagcaagtatatgaaacacattaaagactgatgcatctgttttgtttttgttttgagatcaggtagaagatctacaaaactagttggaggctggaaagaaatttcagatagtgatacatagaaatgttctgccttaactctgaatttttagtcatgaaatagtgcaaactcttaacattacttttgtggagctttgtagtccataaaaataacattgttgtagagcctctgtatgcgtcagctgtgactgagtgttttgatgtcttagcaaaaggcagaggagtgctttcctttgaaatgtgtgaggcggtttgagatgcagcttctcagatggatttaattagtccttcgtagaactggatgtccgtttgttgcaactgaattctcatttcattcatccataactagaaacacctcgcttcaaacgggtttcttcaaagaaagaggggtttagggttctatgttgtactgctttttgatgttggtttccctttaactgagaagaccttatgtttatacaactgttattattaagaaaacacagctttcttcagcgaggttccttttgcatcagcgctggttcttggtggcagtcagaggtctgtggaatggatctctgtcagactatcacagcagctgtgtgtttgcagattttgcttatgagaggcatgaactgaaaataggcgtaaacttgagtaattccctaaacccaaaatataagatagaaaccagtaactgaatctggtaacagggtagttgtttgtttcagaagcttatattaaccacaaaaacaaagtgaatcaactaacaagggttaccatgacccaaatagtaattgcattttgattcactttgcctacagtgcacaggtcaggtctgcttctcaataaatatgttgaaagaatgaaatatatccttcatagtaaaattatgttttttaaaaaatatgtcctactactaatattttttaaattatccctaaaccttcacatttcattagaatagctacttcaatttactctgaaaaaactgctttcttgtctttccagtttgtgtgtccagggtctgacgtgctccatcatcaaggcagcttttatcttctgtgtccgtgattctaattacatttcagggggttgtgatctctcccagaatcccgttcatgcattgtgtttaggatgaaatgcttgagggggtttggggctgtacactcatgggcacaggtttgcatatctaaaactttctttgctctaacatcctgatttgtataaaaatcctaaaagcaaatttcagacttctaattattctttgcctttaaggaaagacaaaattaatttagactgttcaagcttaaaattatcccaaagccacagatcacactgaaaacacatagtaatatagcccacaaattattttggtgtcttgtttccatattccatccaagagtctgtagaatctgtaggcttatatttctgtcttgtttcttagccataactgatcttttccatcttattcaccagactcagcactgcgtaactgtggcaatttctgaaactcagtggcaagggatataccaccattgaagagattaaaaataatcaacaaaggctttaaaaagtttaaaaaatgtatttggagcaataatagcaataggtcagaaaaagttttcacggaaagggccaatatacaattaggtttccatctctgtattcttgattgtgtgttttatgtcttgtgactatcttgtggagttcctaattttaaaagaattatgggtgtggctcaggaatattttattacatttgtgtaaattaaataattttttaaaattatggatgtgatttaaatattcttttagtggttctgcctttggtacagtgttccatgattttgtaatgtttttatttgttgaaaaagctctaaaaatcttggtagaaatatagaatctcagaaggcagaacatttggtaattatcttttatatcaatttgcaagacaacttgttagggagccctatttctagtagttgaagttaataagtaacaaatcacagcaatcacgttttttatcatgcagagtgggcagtcttataaaaaagaaacgtcagtctttttggatatagggacacaagcaatcatagttttcctctgttatctttagtttgtaaaaatcaacctatctaccatcagcatttacccacaaggtttagtttggagttacctaaggggatggtagagaaacaataatttaacgttatgctgaaaacaatagtctctgaagatagagaaacctctgtcacttaccagttgtgtaaagttggaaaagttacttagcctccctgaaccactgcagcagtggtgtttacctgaatgttggcatagaggaaaaccaagggtcacgaggcaggtggacttgagtttaaataccaatcctgaacctgctggctgtggaatccagcagaagttagttatcttttcttagccttagttttccttatctgtagaatagggatagtattctccagggtttttgtaaaaattaaatgagattttatataaaggctctagtacagtggctgatgtaataagcaccccagaaatgatttctcttccctctaaaacacggatattttgctttttaaaagaagctaaagtagcttttactttgcaagcagttcttttccattgtatgaaaaattcttggaaagttttaaaaataagacaaaagggagccacagtggcccaggcctgtggtcctggcacataagcagccgaggctaggcgttcgaggttagcctgggcaatatagaaacctcttatctatataataaaaataagacaaaaaataaaatgtgccaacatatattagcaaggtttgtcagtactgattaatatttttacattctaatattctttgttagaattgtatttattttatgaagccccttttgaatctacagcagactacctgggaagtagttatagaggtcatcatcgtgtcttggtgattcactttgggaaattttgttgagtgaggctggtgaacctagaaagctgcttcttctgcctccccatttctgtccccaaggccctgctgtggttcaaaagcccatataaacctgcagtttccctttcttccacgatagggcgcgcacctacactgttagggtatggggccgactggctcctgccctgtgggaggtttgatccttgtccatttagaggcccttccttattcatggacactctactgagtgtctgttgcaaactccctggtataaaccccagacgtcatggatttaccacactaattattagagtggccattatttgcaataaaatagtgacccttgccactgtgttttcctaccaaataaacttactgacaagtatctgcattggctgggtcgaggtgtcatcaaatcagcctaggtttggatgtgctgttttgctagctgtagacccttgagcaattatgtaacttctctgagtgtcagatttgtcatctataaaatgtggttagtaacgtctccattgtaggatcgttcctaggattctgtgagtgtgatgtatattaaaatacctgattgatattagggcctcagtcatgttcctttctttgctttagactcatttctctgaaaaagtaatacgatgtttatagttggggaaaaaaacccaaagagcgttcataatctggatattaccactattgaaatttctattttgattcagtgttttttttgaaggtattcttatttttaagagagggaattataaaatatgccattttctaactcagtgtttaaaccttaaaaaaagagacatttcttgaaatgttaaacctatggctttgagcatggctgtgtgtggctgtatttgctcttggccatatttattgtggcagcgtggtaatgggtttatgcttgttttatcgcttgtggtttttataaaataaaaactgtgtttggctgtgtgactgtcgttcagaacaagattaaggaaactagatggagattaaacatagcacaatcttctgttgtaaataaccatagacaaacttgtgagcagctaccaaattccccagttggacaaaaagtgcttctttttagctttgaaaacctagtgatgatgatttgagaactggcataagtctctttaatcattcaggttcagcgtgattagaagaagagttgttttaaatgtttttgtgattagatttgaaacaaagcttagaaggatttatgattttgtttacaaccagctacgaaaaacaccaaggaaatgtgaaagctggtagtaattggtgagcttgctgggagtggatgttgtttccagtagtgtaacttaacaaagattgaaggaagctccgtgccattttatttcataccactggtttaggtgcattaattgatattttaaccaaaattttaatctaaatcaagtcttttaggttcaacctattccactgggttttaaatgatcatatatgcataccacagcacatctcacattgagaacgttacctcagtgggaaggttgtttcattcttggttgagtatagcattccagcttgtaattaagctgcaatacaaaaaatatacgcacttgctagaaggatattcttgctagcattctgtatgtatcatttgcttattcaagcatataaaacttcaacaagaggaggtaattttgcttagatctcttgatttgaattgttccgctatttggcactgggtggaaaagggaaaaaaatcatattgaaagcattgttctgttaatgaagttgcttgtccttttttgtgccaaatttggcaggtaaaattaccatttattctacttgctagagctggagaatagactgttgaggaaaagtagcaatttaagtaatgacactagatagaatgtgctacattatatacatctcccatacttttagatattgacatgcaatttttatttctctttagtaatgcactttgtctttaaccactacattacttcccgtaagctccatcaactacatgcaatttgcttcagttgtgaaatttaaaaatttactattaattataataaagtgaagcattttgattcaagaagaaattaaagattgctgtattttgttctggatatttcagaagtattgtattctttttaattctgaatatttaacataaaaaagatgaaatagacgcattggttaatttgaagaaatacaatcaaatttgaggtattcatggttttttccatgttaaatatgctttgcctatttatatttgccttaatttttgttttgtagagtataaaagagaaactttaaactcgtatacaaaaatgggaaaatatctaaaaatatgactaggtagttttaaaaattactcacgtattcaaatgaaatgcataagtttagcatttgctaaatttgagatattttatttcatattatttgtaaatatatttttgtttggcgtgaatttgtaattcactaagtttcttgtagattaaatttttcttagttgtaaaacttcaggcttaaaaaaagtattattattgttacaatttacactataatggctaaacttgcccctcctccttaaaagaaatataaactaatttgcaaaaatatattttttgaaaagccaattggtgaatttgtagacttgtaaatgttaattcaggaacagagttgagtattgctggaccttctaaccatcactcatttctttctgcccactaaactaactggtaggcaggtgcagatgttacaaaatctagcatcgcaattgacactaattggcatagttgttggcagtcttatcagaaagcaaagggctgaatggttgaatgggtttagagaacttgaatggtaataagcatttttatatgcatcttgaattacttttgtgacccagactaacaggaacactttattctgacctcattcttcaatgaatagaaattgtagaaagcataatatgcagtgtatgtgatgactgattgtttttcaggtaaccttttacagctatctgctctgttgcctacttcctccccccactacctcccttcccagtgctcagagaaaccaaagtactgtaaatgtgtggaataaaaaggagataacaatcattaatgaatattgaattaatttatttgagtggtttgttgccaaaagcttgaggatgtcataagagttaggctaaacttaagaaaaagtattcattgaatttatggatgaaacaaaaggacgactgggacttgcttcttaatagtcttggagcaggtgggtgaatcagtggggatatggataaaacaggattggctttgagtggataagttttgaacttgggtgatggatatatagaggtttattaaaccattctttctgtttctatatatgtttgcaattttccagaacagaaaggttgtttgtttagtatgcggggtgacttcaccctctgctgttgtcaggttttttcaatacctgccagttcctttccaggatctgccttttctcccccagttccttttatcaaaaagtacccatctaaagtgagaactacatcacctgacaagctgttctgtgcgcttatgtataaatgagttattttctaggcagtgtggattttaataggagttttctaaagacactgccttaattaaaggaatggctcttgggttgggaattatagtgttggggtgggtctttgtgtctatatgtgactatatgtagaccactcttcacacttacagaagtgttaggtgataattttaggtgtaatatgatgattgatcttagttctttttagttctttttttttttttttttgagagttttgctcttttgcccagtctggagtgaagtggcgtgatctcagctcactgcaacctccacccactgggttcaagcgattcttctgcctcagccccctgagtagctgggattgtaggtgcccgccaccatgcttggctaatttgtgtatttttagtagagacggggtttcaccatgttggccaggatggtttcgaactcctgatctcaggtgatccacctaccttggactcccaaagtgttaggattacaggcgtgagccaccggcatggcctcatcttagttctctatgttagaggtaatgatgtctttttcttctgtagaaagactttccaaaaagaaagtgcttttctttaggactttttagaatatgttcaaaatactgatctttgactaaggagaggaagagaaaccaagatcatatttcagactattgtttcttttcccatggttttggcttatcccgagaattgacttgacgtgttcccttttttatttcaaagtagcattgcttgaaatattttagattttttatagctttctaaggaattaaactctaaaaacactttaactgtttttttgttgttgttgcttgtttgtttgtttgttttgatacagagtctcactctgttgcccaggctagagtgaagtggcgtgatcttgactcaccacaacctctgcctcctgggttcaagcgattctcctgcttcagcctcccgagtagctgggactacaggcgtgcaccaccatgcctggctaatttttgtatttttagtagagatggggtttcactatgttggtcaggctgctttcgaactcgtgaccttgtgatccacccaccttggcctcccaaagtgctggaattacaggcgtgagccaccgtgcccagccaactgtttttttgtgttttttttatttttttttaattgtatcttgggaggccttcatgagtgaatgtagcttgctcattattttttgtaccattcccagtcattttctactcattcctttccttactagttttcagtttggccatgttctgtgtacaatttctggtaagtgctaccaaaaccaatatatattagacatgctgtttttcaagactcctgaaaaagtgccaatcttattctcctttcagtttgggagcacagtttcacaaataatagaatagtcttactttgtttgcagaattagaaggatttatctaacaacttgaatagataattttttttttgtagacgtgaaagtgaaaccttagtattgggatagaattttaagtagcattttaaatttgtttcaaaatcttttcttattgcctgcctttcattaaatgagctatggtaagtatgctggggtgtatacgtgtgcgtggtgatgagatgtttacctctgtgtggatcccttgtagattttgtattgtaaaagtgcataatagagtcctttatatagctggaataactgtaatctgctattgtaagcatatatggatttttaaatacaaccattataatactttataggacattacaactgaaaatattttgacttaaaagttgctttattagtcttacaaaagctatgttgaagagttttttgttttttgttttttgttttttttttaaagaaccatgttgtcagtggtcaacaatcaaatgtaaaaaacacttagctggaaaacatccattaagataatgaaagtgagccacgatgcttgtgtcagtttttatattttagtttaaaacatagttttttagcaatcctataattataaatataagttagattttctctctaatttaattagataatttttattttaatacaatagatacttatcaaggatctgtcgttcttcaagatcagggcactgtgctgagttcttcatgagggccatgaaggaataatgcccaccctcacgaacttccagcctagtttggaggtgttgagattaatacagtaatgattgtaatataaggcttactctgataagtacattgagatataaagtgttacagagattcagagcaaggaaagacccagccctatttagcagtgggcaaggggtggtatgggtgggtggtattggtaggggcaggggggatgaggcagaaaatcaagagcaaactgaacaaaatgaatagaataggtgtcaggtcatggaagatggatggtagaattctgttaggctgaattggctagtccaaatttaaaaaatagtaggactaaagtttaggatatagtgcctgtgcacatttgctgaatgtaagagaaagtgggaagaaaaattgaaatgatagttagattgtgaccattagtacagaagacccagaggaccatgtggagaacttaattttttttttttttttaattaagcaaccagaagccaagaaggattttgaactgagaaaacttgtaagacacagtaaagccacatttgtaactggtctatcgaagtgaatacaactgtagcaggttggagatggggctttgggaaggttttcttgtttgatgggattgtcagtagtaaaagaaatgggaaggaaaagagttcacattcagcttagaagttgagaacaaaatttggggagatagatgagagagatgtcaggtaatagttgggggttgggaagggccaaacaaacaacactcagttattggcatgtgtgttaggccgtttctcacactgctgtaaagacatacctgagactgagtaatttataagaaaagaggttttagttggcacatggttctgcaggctgtgtaggaagcatagcagcatctgcttctggggaggtctcagggagcttccaatcacggtggaaggccaaagaggagcaggtgcatcacatggtgagaaccacagtgagcgggggtggggatgtgccacacacttttaaatgaccagatttcactaaggagatggcccaagtcattcatgaggaatccacccccattgttgcaggactttttcttggtttagctaaggatggggttctttgtcccatggccatgaaaattcaggcccacagacaatttgaatggtgagtaagacagggttttattgggtgaaaaggaaaaaaaacgggggaacagggactcttcaaggccagagtcctgctacagtgcttcctgcctgcagcttgaatgtttggttccacacaggaagaggaggggccaggttcctccctgctgcaaacactgcgaacttcctgaggccccaccccagtgcgcagctggttggaatttttccaagaaccccctccctcccacctggctgtctcattctcccctctaaagaagtacatctaactgccattagaatacggataaggacaaagaccgatcttaactgcttcctgctgacaggggatgctgttttggggaaacagcagtcagagatccctcaaaggcctatctaagcgttcccggcagaaggggccgttgtcagagtctccagttgcatgaccatttggagtttgatggcctgaaggcaagaacagacaaaccgggttgttagaaaacatgtatcaaaaggaaaccagaggacgggtaaagatagctaaaaaattaggccttttaccagtttgcacagggagaaggaggccaaaagcccgactggtcaggaaaacttcacacttttgctggcatgttgggcttctgggttcccttcccctgagcccagtcctaagccaacccgtttaaggtttgggaaattaactctttccagcttggaggatgcatctgaggtgagtgtatcatagtatagagacacaattacctatttgcaaagagagaactgaggaggagaaagaagaaaagaaggcgttttttttcaaaggagtcctgggggtcccggatgcattcaaaaggcgtacaaactgaagatgaatggctacctatctagaaagaggggagcaggtgtccctggttcccttctcttcctagcagatactcagggttagtgagggagagaagagagagcatcctctttcctttcttctatccttgcatccctgaatcccagcaaccttggtaggtgctgccatggctgtcaaatcaacttgcaccggtgaagcagggggcctagggggtgagaatcatccactcttacccacgtaacgccctatctcccctgctgtcagtagctttgaattctgtatgccatggatactaatgtggcctttatccatgaaacaggaagccttggggttggcttaatcagcaggaatcagccactctcacctgtgctgtgccttttaaccttggtgttgtcatctgcctctggatcccttacatccagttttctttctagggctttgacccgaagcttggaattgagtcgggaacacaaatgtgtctcgaggggagttgtgtggactccttaccataagtggaatactaaggtgaaactgtggaactgagtcctcctccaacaagggagaggaaagcatgtcttgtgacacacccagataactggtgactgtagttatgcttgctaggatttgggtgcatggtgcttggctttggttcactcccttggtcttactttacccaaaggaaacctcggagtgatgggcatcctatttattcccatcccctggcaggatttacaggataattgctcagaactagaatattgatccagacttttacattacccatccctcttgttctttctgagctgcagccagagattgctggttggtttacaggaacaagcagggttagtctaaaatgtaggtgaaaacttaaaaacaactagtgagtttagaatttaatgacaaatgtatgataagttttggaacataatttctctccagtcctcatttttgttaaacaaaaaaaaattatgataggactgagtggtttgcaaagtagactttagtcttattctttgcctgaatatttgcataaaatgcaacaagaataattatttctacataggccttttggattggctttgatggatgtctattccacaaggaatctcagataagaccttttaagccgagcccagccatggctttctatcctcaaatacttgcgagttgggtggtcctctccttttaaggtcccaagctaaacttggagctcctggacctgttaggaagtgacattcttttttttttttttttttttgagatggagtcttgctctgttgccaggcaggagtgcagtaaatctcggcttactgcaacctccaactcctgggttcaagtgattctcctgcctcagcctcccgagtagctggaattaaaggtgtgcgccaccatgcccagctaatttttgtacttttagtagagacaagatttcaccatgttggccaggatggtctcgatctcttgacctcgtgatccacccgcctcggcctcccaaagtgctgggattacaggcatgagccactgcgccccaccagaaagtgacattacttactgaccacaggtcagtaaccctttacagggactgcgtagacaggggtatgaggccattttccccactgggctcttactggctctgcaagtcaagattcactcctttcacagtgaaagccttggtaaaataaccactttctccaattgtgtcctgttgcaaaagaaaaatggattcttactacactgatgcaaacaactattttgtcataagttaagaacactcacagatagtttccaaattctagaggaagcaggaagagagaaacaaacatgctccaaaccttcatcacagtagtgtataccttacttaattattaaagtccgtaaacagttcaaaattggccgggtgcggccgctcacgcctgtaatcccagcactttgggaggccaaggtgggcagatcacctgaggtcaggagttcgagaccagcctgaccaacacggagaaaccccatctctactaaaaatacaaaattagctgggtgtggtggcacatgcctataatcccagctactcaggaggctgaggtaggagaatcgcttgaaccgggaaggtggaggttgcagtgagctgagatcatgccattgcactccagcctggctgggcaacaagagtgaaactgtctccccacccaaaaaaagagaaaaatagttcaaaataagtttccttgactctgaaaaactaaacaaggatcagcaatattccaagcaaaagtcaaaaaggttgcttcaggtttctgagttcactccattaagttctcttgttttgcttgatatttgtgaacacttcagctctttatgagtcttgtactttttcctttattttaatgttacaatcttcaaagttattagaagcctgtatttgagaggacctgttaaaattctatagcttattataaaccatcttttgaaaaggattaaaacaagacaacaattgctgtgaatagctaaatatccagggtagttacagttagaaacacaactgacaaagaagttcggttatctccatggtttacaataacttaacataacaaccttaattatgattaatagcatatacttggacattagaattttagaaatcccatacaatttgggaacacatattagcattattcacaaaaatataacctaaagaagattgaacatcattttggcaatcccatgtaaactaaacatgttaaataatcctgtttacctctctttctggacattccaggggccctctggactatccgaaaagccagttgtcaggaaagacaattttgaaactgaagtttgattttgagaaggccgttaaacgttcaaggtttaaatactttgtgttataaaatagaattccagattaccataaattatttattttgccaaagtaatgactcagaagttttaaataagtaaaaaccttttatagccctttacgaattttgccaaagagcagattagcgccttacaaaaaccttgttgtgtttttatttcaatgctcaatctacagaaaaaccatattataccttttggaatttagtcaatatgttcacatagagaacctcttctgcaagattcatttccacaattcttccaccacttgtttgaaccttcagctttttcctaatttaaaactgtcctttaacctagacaaaaatttatatttccatgcctccttgtaaccttttgctaaaaaacacattttactgttcttacataccttgcatgtaaatctatttccagtagtcttaattacatgttataatagtaactcctagcaatttttaacttttttaaaacttggggctgggcatggtggttcatgcctgtaattccagcactttgggaggctgaggtgggtggattacctgaggtcaggaggtcaagaccagcctgaccaacatggtgagaccctgtctctactaaaaatacaaaaaattatctgggcatggtggcgggcgcctgttatcccagctactgtggaggctgaggcaggagaatttcttgaacccaggaggcaaagcttgcagtgagctaagattgcacgactgcactccagcctgggtgacagagtgagactccgtcttaaacaaacaaacaaacttgataagttgttttaattgtttaattgtgtgctaagtgctgccaaggtttgccttcttaattaagagcatggttatatgtccccagcccttaccagttgtgaagccagcaagtcaaatagttcttaaaactcaaaaagcagcttgtaacctcaaaatacttagcaaactttgtatctgacctgcattgtttagtccacctatttacattttgacaacatctgctctttaccaataatccttaaggctgtttttgtttctcaatgattaaagtcacgtgaactgaaaggtatcacagtttttatcttccctttaaaaaatattagatccaagtgcttgtctttgtttaggccaaattaattagagctctttttacagataccacacacagtatatacacagacaggcaaaagaaaacccagtcactgggtggggccctttaagagacagggctaggaagacatgcagatatggaaccagagagggctcatcccctaaggcaggattgctaaacaaagccttgccactggagttagaagccatgccctcaggatgtaaaacaagatggaagcctgatttcacaaccaacaccttgcagagaatacaaacagtgatagttccggggtgggggtctggcctagtaaagtgttttctaaaagagaaaaaacttaaaagttaactgttgacagggtaaagtaggaaaaaaacaacaacaaaacaacagcaggttaaaaaatgcctaggaaagaaccttttattctcatgcaagtggttctttcaccgaggagagaagcttaagcttaattactgtccgatggagttgaaacccttggctggggaaggggaaggctccagtggctcgtggcagaaaatgccagccagccaccccgggtgcccttggaccatgtgtccaagcctcagcagtggaggagggaggtagggagctgctgctctctggtccctcccaaaaaaggaagaaaagggctatggaaaggtcgggttggttctcaacccctgggagcagcaggcggtgggggcacagtttcctccaccctcagaaatctcaggataaaaaggcttaggagccacagtgaaaggttttgagtccccatttcactcactgcttcttgagccccacattgggcgccaaaaatggttcctggacttttccttagttcggctaaagatgaggttctttgtcccatggccagaagaattcaggcttgcagtttgaatgggagtaaggcagggttttatagggtgaaaagggaaaaaaagggggaacagggactcagcgaggccagagttcctgctagagtgcttctcacccacagcttaaattcctacttccacataggaagaggaggggccaaacggtgcagatggtgaggacttcctgaggctccaccccagtgcacaggccagttggagtttttccaggggccccttcccgcctggctatctcaccatgatcggaacacctcccactggtccctacctccagcagtggagattacagttcaacatgagatttgaacagggacaactgtccaaactatatcagtgtgtcttttagagttggccatttttgtcacccccactcgtttatttatttttttgagatggagtctcattctgtcgcccaggatggagtgcaatgacatgatctcagctcactgcaacctctgcctcctaggttcaagcaactgaacctgttgagtagctgttgggattacaggcatgccaccatgcccagctaatttttgtatttttagtagagacggggtttcaccatgttggtcaggctggtcttgaactcctgacctcaagtgatccacccacctcagcctcccaaagtgctgggattacaggcgtgagcaaccatgcccagcctgtcacccgtacttgtgatatgattcaacaaacccgtttctatggccaaattggtttgctaattaatgtactatatggactgggattctttggtacaaaacgtgactgtccaaatagcctgactaattatctattttccttaattttttgccagggaaattttttttgtttttgttgttgttttgttttgttttgtttttttgagacggagtctcgctctgtccccaggctggagtgcattggcatgatctgagctcactgcaacctccacctcctgggttcaagcaattctcctgccttagccctctgagtagctgcgactacaggtacatgccgtgatgcccagctaatttttgtatttttattagagacagggtttcactgtgttggccaggatagtcttgatcacttgacctcgtgatccacctgccttggcctcccaaagtgctgggattacaggcttgagccaccacgcccagcctgccaggaaaattgtaaagtctacacacagtggagctactagtgtagtgagcaccatgtgcagttcttgcggacctctccttgcacaccactgtttttattctgaagtattttatagcacgtattgcagtcctgtaaattgatgctattttttttaaagtttgttgaattgcagtatcctaaattcccaaacccatgtccactgacaacctagcacactcttttttttccccaagagaaactcgtttcttattaaattttgcattagtgtcaaatcggttgactgttttttttgttaaagcactgtcatatttttttctataatatatactctttgacctactgtgaaatatatttaaagtagaagatttatgtgtatgtcagacaaattgtgaaagaaaatagtagcaaacttgttagttagccagataatgtgaggcagtttctcactgtctgtctttgaagggagttgcaaatatagaataggggaaagttaaaataaatcctacattgttgaaatgtttggaatcagaggtatcaatgtgaagtcattttttttttaatcagtagacacagaaacagatttagatgtatttgcttagggcttaactttacaaacttggcagaaaccatcttaaccagtaataaagtaaccttactggtaatgggacaggtgtgcctcttgattttttttttttttttttgagacatggtcttgctctgttgcccaggctggagtgcagtggcacgatcttgactcactgttacctctgcctcccaggttcaagtgattctcatgcctcagcctcccaagtagctgggattgcaggtgtccaagccatgctaattttttgtatttttaatagagacagggttttgctatgttgaccaggctgtgcctcctgatttgatgctgaaaaaagcacaacattacttctgtggtattccagataaaaatacattaatcaagaggaaacattttcccaaattaactggtctatgccctgcaagtctggaaagtgtcttagtcaatttggactgctataataaatataccgtagaatgggtggcttaaacaacagtcatttattcctccagttctgtaggctgataagtccaaaatcaaggtgctggcagatccggtgtttggtaaggacccacttcctggtttgcagatggccatctttcttgctgtgttcattcatggctgagagcagagggagaggaagcagctcttgtgtctcttcttataagggcactgatgccatcaggagggctccacccccaccacctcattacctcccaaaggtcctgtctcctcatactgtcatattgagagttaggcttttatcatatgaattttgaggggacacaaccattcagtccatagcacaaggaaaatcatgaaggacaagcaaagttaaggaactattcaggttgagagagacaccaaagagacatgaaaactaaatgtatgaacctaaattagatcttagacataccataaaggacattattagggctattagaatttgaatagagtttgtggattagttggtaatattgggttaatagtaaattcctgttttgttgactgcactgtgctgtcgacaaaatgttagtgacagcaaaatgttgttgatagcacagtgcagtcaacaacatcaggaagttactattactccagtattgccatctagttcacagactctgttcacattcactaaggagagggtccttgtacttgggaataaatgcggaagtattaaagggtaatgggacatcataaaatgtattctttactgctcagaaatgttagcagctagggaatctgggtgaagggtgtaagggaactccgtgtactattgctataacttttatgtatatctgaaattgttttacaagaaacaaacaagatacaaagaaatacctccccaggatgtttattagaacaatagaggctaactataccatttttctatttcttattaggtgcaataaaaggacactggtaactgtaaatttaacagttaaaagtaaggtcatggcggtggcttacagctgatagtgccctgtatactctgtacaagtgcatgctttattatgatcaacctaatggatagttagttttgtttttttttaaaccagggtcttccttgagatgtaatgggcacagagtaaacggctgattgttagcttattctgtggatgtatgtgatgagtgggtctggggcatcagtttctatatctcacctttacctatcaaagaaattggacaaaccatgatagcaaacaaatgaaaagaaaaaggagttttattgttcatgcttacaaaagaatcctgttaatcaatttgtaatccaccaattattttgggaataaaattgtagcaaataaatttaagatagaaacataaaactattaaacatgttatttgtattataatgtaaaatataattaatattttagtatgtacatattaggaataatgtcactggtggccccagaggctaaaaaacagaatgcaaacctgctggaaaatccttggtagataggagcatagaaaacagaatatcaaatgcatttattgttggccaggagacatggactactaggggaaattctgagtgtctaaggatagtactagaatgctaaacagtcacagataataatataaagtaggtaggattaacaagaaacagcacatcacagtcacaatgtgtgggaattaggcaaaggaaatacgtagccatttttatggacgtcttatagtccacttagacaatagatgtattctgtggtggtaaaccaccagcttaggtaatgggatttattggaggacatcagtggtagcaaaatacatatgaaaagcaaaagcatactaataggaatctgatgaaattaagagaataaataatggaggagatattagtgaagaacaagaaaaattgaagaacagtaaaagtaggcatgcttggaaaaggagaaaaatagatctctaataatcatttttggggaggagtatagagcgtcactaagttgaactaccaccaacagccagcattcattgagggcttattatgtactaggtgctgttctaagggcttgacttcattcctcacaaccactccttgaatatgcattttacatatgagaaaatggacacatgaacaattaggttacttgtggaactgaggttcaaacacaagcattgcgaccattcacggcaatactgcatagaaacacaggattccaccataatcaggtaggggagcgaaaggcagtttcaattgttctttatgtaaagaactcatctacctggagttattcattaagctgatataatttacagtgtgatctgcagagaatgaccttatcacaccaatccaaaagaaactactactataattaaactgtgggcaaaataatgtaggatatttttgtagaccgtaaaactgaaattaaagttgttactgatcaattaatgaggtgataattaaacagaaactagccaacctgactgattgtagaccaatacctaaaatttgtttttgcaattcacatcctttgagatatatttaattacatttataacacatggatatttaatataatcttttgtgacagattgacagatcttcactatcattatgtgtaattcctcttgatgtttttgtcattattacatatatatttgggagagaaataaaaggctgtttccaaggtgatggtgataaagagcaaacttataaaaatggttgcctccttttgtttgtataaaacaaccatctcatttccctctgggaggtcactagaggtatgatagctctgttttgaaataatattttagtaaataggaaagcagggtaaagaaagcctcccctttttgtgttatgttaaggtttaaaactgtgttacagtttatactaaaacattaagaatcaattattataagagcattaaattgtttgagttttgtcatgctttgcctagaaatcagcactgaagcgagtgacttagcaacgttattagatctattaaataattggaaatttatgtgcttattgtcagcatcttggctttttagaattttaaagtatgtttgtgcttcacatctctagttgcagtttatgtagaatttagtgaactataataacgttggatggtggtaatgtcacagtgtaattaactgcatagcatacaaagttctttgttaatggggaatgggatatacatcatctatttgatatataagttaataatcatactttttgttagcagtagttaaatgataagaactaaaaagaagcaataaacatctccatctctaaaacagtcttgcaaatatgcagtgagcatctactgtatacaagcactatatcttcatatttagattacatttgctattttgcttttcacatgtgaacttaagtgaaatactctaaggagtattgcaaggtaattgcccctataaattacataatttatatggctctttaacttttttagatgtaaaatgggaggaggagagcgttgagttggagtgtattatttctaggattctttctagcccacaagtcgaatcagaaaacagtggctcatgcctgtaatctcagcactttggaaggctcaggtgagaggattgcttgaggccaggagatcgagaccagcctgggcacatagtgagaccacacctctacaaaaaaaaaaaaaaaaaattagccaggcatgatggcaaacatctgtaaccccagctactcaacccgctgatgtgggcaaattgcttgagcccagggggttgaggctgcagtgagctggatcccaccactgctttccagcctgggtgacagagtgagaccctgtctccaaaacaaaacaaagcaatcagaaatgtacagatctttttccacagtttgtgcagaacagtcacttctaagatatactatgaaagtctattacaggagcaggaactagttattcctttctgagaattagatataacttgaccaacaaatcggttttttatccttcatatcatcttcagaagtagaagcaagatatatgatcaaagtctttttaaaaatagcagaataccggggtttttattttatattttcactctgcacaatgctaatctccttaacatttgatgacaaagaaaaaacttggaatttgtgtatgacaaaaagaatgacttatgaggtgaatcgaaaacactttttacagcctctgtcttcctaaagtttattgtttttggaaatagttttttggcaaatattttgttttgtaagttttacatttctaaagttgaataaaattaaatgtttagcaggtgcttgttgtaatagaagctataatattttaactatgtcatgaggtatctctgaggaagtgtttcttttttgttttttaatggtaaaggatgtcagtaatatctctcaaatgtcaaattaatttagggtgtgtactttctttttccctatgatgacgtagataggaaaatcgaatgttccaaacaactcatggaaaatgttccacttcagcgttatttgtaccacaaatgcagtgaaatgcttttaatggaatccagagtgataggtggattatgacatgtggggagatgccttcttgaaataggacataaatcatggttttttttttttttctgagacggagtctcgctctgtcgcccaggctggagtgcagtggcatgatctcagctcactgcaacctccacctcccaggttcaagcagttctcagcctcttgagtagctgggattacaggtgcccacgaccatgcccatctaatttttatatttttagtagagagaaagtttcaccatgttggccaggctagtctcgaactgttgacctcaagtactccgcccgcctcggcctcccaaaattctgggattagaggcgtgagccaccgtgcccagccaaatcatgtttttgaacttgttttaaatatctgtgtgtgtgtgtgtgtgtgtgtgtatgtatttttttttttatggagtcttgctctgttgcccagggtagagtgcaatggcacgatctcagctcactgcaacctccacctgccgggttccagtgacctcagccgcctgagtaactgggattacagacactcgccaccacgcccaactaatttttgtatttttagtagagacggggtttcaccatcttggccaggctggtctcaaactcctggccccataatctacccgccttggccttccaaagtgctgggattacaggtgcgtgagccaccgcgcccgaccagtattatgtatattctttttgtttgtttgttttttgagatggagttttgctcttgttgtccaggctgcagtgcaatggcgcgatctcggctcactgcaacctctgcctcccaggttcaagcaattctcctgcttcagcctcccgagtagctgggattacaggcatgtgccaccacgcctggctaattttgtatttttagtagagacggggtttctccattttgggcaggctagtctcgaactcccaacctcaggtgatccccccgccttggcctcccaaagtgctgggattacaggcgtgagccaccgtgcccggcctgtcatgtgtattctaattataaataattttcaaccaaactgatatgtttggttaagctggggaaagttttcagaaaatagagtacactgagatgaatttcatgaactgtacccaccaaagccttgtcctggttaattcaaatttataatgccaatagtttaaattagcatttagcctttaagtgacggtggaatggtgaggcatatgatgtttttataccaaacactccgtgctccatgtcttttttggagtttacacttttcaaaaacaggcggcacttccatgtgtttatttccccttcatctctgtttagtgaatgattggtttcatctttacaaagattattctggctgtagtggggagaaccagttggagatatggaagatgtatgtggggaggccagagtatcgtggcagtctgcctgagagatgcagtggccggggtttggtctaagatgttattggtggagacggagagaatttgcggtatttgagagccactccagcctccattatttctaattctatgtcctctacccttctctgtcatctctccactgcctcccagccccttccactgtgccccctgtattgcccactttcagaccaacagccttttgtatcagccttttctggaatgttccactaattacttaccctaactaaaaccttagggtagttttgttctcataccacacgcacctccaagacaggaggtgggattactttcctccttgtgtcattcaggacgactgctccgctctttcttgtaagccctttcttttttgaaatcacatcatcagtcttcactacctcatcttcctcttggcaaccttcagctccccttccctgtatccctctccctgcacgtgaagaccagcagccagttcctggtctgtctgtctgtctccatacaatcattattccctgtattttctctccatccacagacaccactcctgtttttacatcctttatccaatccctggcctggcattatagtcactcactcatgaatacccttaactgctcactccttcattcttccatcagtctcaaacttagaggaactctgcctccaccttccctatgcctgcgcatgagcaccttaccatggctggtgaacgtcccataccaagggcacagttaacatgcgtctgctggtcagggccagctgagcatcctacactgggcagaagggttgctgtttctctgataacttctcctcccttatcctcagtgattccttcctgtcttcaccactgtattcacatgtcccacgctcctgctgcagctgacactacttctgaatgtccctcttctctataccaccagggctctagatctgatcaccatgacttttagttttatttcctctaattcattgtccaagctatagcctgcatgatctttcaaaaatggacagtgtggctcacacctgtaatcgcagcactttgggaggccgaggtgggcagagatcaggagttcgagaccagcctggccaacatggtgaaaccccgtctctactaaaaatacaaaatattagccgggcatggtggtgtacacctgtaatcccaactactcgggaggctgaggtgggagaatcattggaacccaggcagtggaggttgtagtgagccaagatcatgccatcgtacttcagcctgggcaagagagtgagactccacctcaaaaaaaaaaaagaaaaaagaagaaaaaaaaggacagcagacaatggcactctgcaggtggaactgcttcatgtttcccactcctgtccctgttcttcaagagccggcctccccttctctctgctccatccacatgggtttcaaagaagcttagctctttctcaccccagggtttttttctttctttttttttttaaatatgatattccttctagaatattcccacacacccatcactagcatacttaattcctactcacccttccagtctttgctcaagatcacctcctcagagaggtccttcttcctgctgacaagtaaagaataatgagaattcagaagaggctatagaaattggctgggtgtgatggctcacgcctgtaatcccagcactttgggaggccgaggtgggtggatcacttgaggtcagaagttcgagaccagcctggccaacatggtgaaaccccatctctactaaaaatacaaaaattagccaggtgtggtggtgggcgcctgtaatcccagctacttgggaggctgaggtaggagaattgcgtgaacctgggaggcggaggctgcagtgggccaagattgtaccactgtactctagcctgggcaacagagcgagactttgtctcaaaaaaaaaaaaaagaaaagaaaagaaattgctgaagatttgtgatttttcacaatacagttttagtagtcagattatagaaggttatggggaaaggtgtatggtaagaaaatagctgcagagaacttgttttagaacctgtcagagaaaggaagagacacagttagggagctatggagtcgtgcatgtgtttgaaagcagaggcgagacgccagtgtagactgaaagctggagaacagcgaagttaaaaggattaactaagaagcagagagggcatgagatgggagtgaaggaaagagcatggctggttaggcgagaaaataaggacttgggcctatggcttcgattttggtaaagagaagaagtcatctgctgagagtagggggcagggttataattaatgtaagtttggtgcacttgagtccttggtcaatttcagggcaaattatataatctttgtttacattagcatggctgctaaacacctctagcgttgtgtctttggatagtttatgaaatacagagttttttgcataatttaaactactccagtgttttcacagtgctaagacattttgataatattgtctgccttgaaaggagcagattttacttgtgcctcaggatattatgtcatttatcacttcacttttggcttatttttctttttatccccacactgaatttgatttaatttgttagcttttattgtcaattaaaggcaaaatgtcaaaaagttctaacctcaaacagaggtatgtgagcaaaacactcactttataatattggaaatagccatattagaaattaaatgtctgaggtcagatatggtggctcacgtctgtaatctcagcactttgggagaccaaggtgggaggactgcttgagcccaggaattcgggaccagccctggcaacacagtgagaacctgtctctccaaaataaattaataaatatataaatctggaggtggtagctcgtgcctgtagtcccagctacacgggaggctgaggtgggaggattacttgagcctgggaggtcaaggctcagtgagccatgatcatgccactgcactccagcctgggtgatggagtgatgccctatctcaaaaaaacaaagacattaaccatctaaatacatctgaaataaaagggctttgtaaccacagaattatagatgtagcagagatatttgaccttgttagttcaggtctctttcagatgaggaagagagattatctgaaacacattgtaaaatttggtgttgtagttgaagtctgtaaatctacaaccagagaaatagaaattagtatccacctgttaactcaaatgcagtttaaaaaaaacagctacgatttattgtgtgcctactagtgaaaggtctgaagtggttgttgattgcatattgtaatgacagagaaaatgagcacacttcacttgaaaaaaaaactttagagtggatgtagtggctcatgcctgtaatcccagtactttgggaggccgtggcgggccaatcatctgaggtcaggagtttgcaaccagcctggccaacatggtgaaacaccgtctctactaacaatgcaaaaattagccgggcctggtggcaggcgcctgtaattccagctactcaggaggctgagacaggagaatcgcttgaacccgggaggtggacggaggttgcagtgagctgagattgcgagactgtgctgcagcctggtccacagagtgaggcttaaaaaaaaaaaaaattaatgtactgtatgtatatatggtacaaagttcaaaaagtccaaatggatttgtggggaaaaacaagcctccctttcatacctgttcctcagctattctgtcgctcttaagcatttgtccagagatactctttgcatttaaaaacacacatgtatagttatttttttcttaaaaaatgatagcacactgtatacactattctgtattttcttgaaaatggtttcaaatcaatatgtatagagatgactcatttttttaaagaaggggcactaagtttttacattctacagaatatgtatttatttgatatactttaaggaaatctttgctgggtgtaaaattgggggacaacatttccttttttttttagtacttagactatattgctgtgtggtcttctgtatctgtgttgcttttgagaaattagactgacctgagtttttttcctttcttgtacatgatttcttattttttattttttttgagatggagtcccgctctgtcgtgcaggctggagtgtggtggcgcgatctcagctcactgcaacctctgcctcccaggttcaagcgattctcctgcctcagcctcccgagtagctgggactacaggcacccactaccatgcccggctaatttttgtctttttagttgagacgaggtttcaccatgttggtcaggctggtctcaatctcctgaccttaggtgatccgcccgcctcggcctcccaaagtgctgggattacaggcgtgagccactgcacccaacccatgattttttatttctaacttaatacctccatactttctttttattctcttcttttctttcttttccttttctcttctcttttcttttctttctttctttctttctttctttctttctttctttctttctttcttttctttctttctttctttttttttttttttttgacagcattttgctctgtcgtccagcctggagtgcagtggcaaaatcatggttcagtgtagcttggaaggcctgggctcaagcaatctcccctgcctcagactcctgagtagctgagactacgggcactggccatcatgcctggctaagtaaaaaaaattttttttgtagagatggggtctcactttgttgcccaggctggtttcaaactcctggcttcaagcagtcctcctgcctgggcctcccaaagtgctgggcttacaggcgtgagccaccatgcctggccataattctttctctagccttaaagttctataaacataatcaatccacaaattccaggttttacttattttgacaagttttatcctgttatgtatctttgaatgtacatttgttctttttgctttgtgagcctctttggacagttacatattctttctaacccccttcctcctccatatctgttgtcttctcagtaaattggttttatattgttagtcttatctatttcattttatatgatttcttcagtccttatctttcttttagtcacatttattctatttttggttgcttcttaatgtggcttttatctcaataatgttatttttctctccattttttttctgagttctatcagcttgactttcatttccttctgttgttgtataatctcttctttgaacctttgtttttcttctttgagctctttttttatttttatttttttaagaggggtcacgtttcctatggttgcctttgagactttggagaactatttatctgaactcttcctgtgtttctttgagtagttcttgtgttatatgctactaatttacctttttctctgagttttttttttttttccaaattgtatgcagacatcgagtattggttgttttctgagtgttgtttatgttgaaataggccgggagggtaggtgaagcaggctacagccttttttttggacatgttacttagtcatttctcaccaaatctgttatttagtttgaaagggtaggctggttcttcgtgtcggagtctatcacgaaatgccacctccactccacatctgccccttcagtgacccttgactgaagggttgcatgtacacagtggatctggcatggtaacaaggattcttcggttcagccagcccacctttctctggtattaacccgtggttcaaagagacattctctacttctcctttggcctatacttccatctagattccctccttggatgctagcatcattagaatcactgtacctcttattcgggattatgtatctgtgtattgctagaagcctgagaaggcctgtgatggctttccacacatcccttgccccgcttatactggcagataggtttcagtttatgatttggagtcatgatagcttccttgtttcagttgtgtagggaagttgcaaatttctactcatgactcattgtgtagatgatgaaatgtagtgtattttctatcacctatcatctttgtcagaggccctctacctttagtagtggatggtgggaagaaaaatttgtgagtaaacaggatcttggcctctgttggtttaaacagtctctttggggtaatgtgtttcagttttcttctatccccagcttctgctgaggtgaggtctgggagcagtgagagaggcctttgggaatgatgcttagatctgcctcgcggcgctggcatggggagaacgtagactcacacgcagtcttcctgaggctttgctacgagggcctgggtgggtaaccactgagtaacatctctcgctgttgaggctttgaaagccttgaggaggcttctcctgtccttagacctactacagtcggcccatgggctctgcatctgtggatccaaccaactgcagatatttgggggagcggggaggaaaagatttggatctgtactgaataggtactgccttttttccccccatctttattccctaaacaatagaggataacaactatttagatagcatttacattgtattaggtattataattcaaaggtattataggtaatctagagatgattcaatatatggaagaatgtgcctgggttagatgcaaatactacaccattttatatcagggacttggagcatccccggattttggtatctgcagggcggggcgggggtggtgctcctggaacccgcctcccatggattccaaggatcacctgtatttgcctgcagtcatcatggagttccccatactgtgtggtcttcatcctgacccagaccttcactggtcagaacttcaggattcctatcacgatgtacttgggttatttgcccagcccctccctccagccatgctgcgctgttgctgccacgccatattcagaatgccacaaaactgagccctgggcttcactgcaagcctgcagcctcccctacactgtgtcccagaagcagacctcttgcctggatatttttagggcaccttatacttgtcagaatgttttcagcaatctttgtccactgccacccccgccctatccccaagggtccagcagaagaggaaatagtgaagtctctgataatctgattttaatgagtatcttttaagagaaataagtgatagtgggggaattgttagggatcatatatcatagttctgctgcaggtttatctggaaacttgagcaagattaagtatcaccttgttaggttgtctaccatataataataatgtcatctgtaagcctctcatattaaagagttagggaataagcatcagtgagtgaaaggaagaaaaccaatagttctttcattttaaattagctatgatttttaaatttccattacttttatatttatttggaaattattttttttcttttacgagtatccctgttttgaaagattatgggtctttttttgcatattcatgaaggatgactggatgaaatcagtcatttatgattgacagaaatatgacagaactttgcaaagtttgaatggacttttgatattcaacaccaaagaattttgtctaattaaagcttctgtttaattaagataacaatgcatagtccttcattaaaattaacacagaaaaagttcttccttggtccttggagaggatattatatgcaagccctgttgtgtgggttgcaagatgtcactggaatttatatgcattacttgtctaattgcagtaaatgtagcatgtccagataggtttcgagttagaaggctgtttgttacttacggaaatcacttgaagcctcagtacccggaggcagctgttcacaggtccttcacctctccccagagatgactgggaagacgctgttgttggaccctgtctttcttggctggagcagtaaacatgacaggttgtttgggagccatctgtttaaaatggctgctgctttgtatgcagcaatgaacttgagatcagttttctgtctttcttcatggtaatggtcttatttggtgtcacaacaggtggaagttgatgggtcgaaactaaatgtgaccagcacgtggaacctggcttcgcccttattgtctgtcagcgttgatggcactcagaggactgtccaggtgagtgttgtaaggatttccttagagggcctcctcaagtccagaatccttgtcagcacctgtgtggctaatacttagagctataggagggaaaagctgtattttattcaccttatactttttacagtcgaaaactttttcttttcttattttagaggatcttaagttttaacctgagcatttaatgttttcttttttcagacaatccaagaaggttcatgtattgtactttgttgtaaacaaggaattctgcaggcttttctaaaaatgctagattagctgtttttttttttcctctgtgggtttttagttgtaaaatacaacttactttgttacctttcttttctgtgcagttgaaattacgtagtgttaggctagtaaaacttgtgttattcaggttgactttccacagctcactgatgtcctttaaaaatttagtaatcttaacttattaatctttcttttcgcctcaatataaaatgtcctgccttgaggagatgccttggaacccagagtcgatagaacattttttgtaacctgtgacttccattttaaagtagaaagttatgaaaagagattctgccaaaattcttcaccttacctcatatttgaggtttagcgttttaggaaaaaaaaaaaaatcatggaacatgtggctatcacaggctaataaaaatctagccccacccatagcattaaatgctcattctttgttcttttttatgaaaatcatcttaacttgattttacacaggaaactggttttaaaaaccttgagaaatcaggataatcacagattaagactacttactccatacctgattcttatctacctctatgagagaccgggatagtggacatcagaatccacaaaaactatgtgatgactgaactgatttctaagtcagtttcaattgatatattatctctatggttccaagtaaccttgaactcttggtaataagccctatattttgactttggttttgtgacttgtcccagtatattttttctcatttttttaattttctaactcctgtcttttctcatattttataacttaactcatattatataactttatataatattatatcagtataaattatgagttgaaatagtttaagactcttgaaaaaaatatcactacataatttcacattacttagatccatgtattattatgtctttaaaaactgtggtgtctgggcacggtggctcacgcctgtaatcccagcactttgggaggccaaggcaggcggatcacctgaggtgaagcgttccagaccagcctggccaaagacagtgaaaccctgtctccactacaaatacaaaaattagccgggtgtggtggcgggcgcctgtattcctagctacttgggaggccagggcaggagaatcacttgaatctgggaagcagaggttgcagtgagccaggatcacgccattgcactgcagcctgggcaacagaacaagactctgtctccaaaacaaacaaacaaaacaaacaaacaaaaaactgtggttttgttatactggtttatgttcgatagactgtacagtgcatcgaatatgttatggctcaagtgtttgtcagagggacatagtgttaactctcagtagtcagaagaaagaggtacaaactcctattatgcaaattttttgtattgtgttactttcatcatccttttcagtgagtgcgcagatagttgtcttgatggcacttttacatgtagaatttatagctagattaatagggatacatatgtagaataatcaaaaatattttccctagtgtagggatcatgttcggtaaatccctttttaatcctgtaagtactttgctactaaaagaattaatgtgtctgaaataagtgaccccttaaagagagatcccttgactcttaggaagaggtcgttgcatcaagttaagtactctctaattggaaggaaataaactcagagaggtaaatggtgtactaggaaaaacagtcgtttacctaaaaaaaaaaaaaaggtaaggagagtttttccttgtgaaaggggatggattttatttactttctgtaggcattagcattatatcgactctttccaaaaatgtaatgtggcccctatgaagataataacaattgtagtaataataaataacacacagtgcttactgtgttatcaggtgtagttttaagcatagtacagatatgaacttctttgatcttcacaattgtatgaagtaggtgctatttatagttttataaatgagacaactgaggctcagagaaaagtaagtgacttactcaaggtcaccagctagtaagaggtaaagccatgattttttttttttctttttaaatgagacaggatctcgctctgtcacctaggctagagtgcaatggcacaatctgggttcaccgcagctttgacctcccaggctccagcgatcctcccacctgagccccccaggtagctgggactacaggtgtgcctgccaccacacccagctaattttgtttattttgtagagatgaggcctcactatgttgcccaggctggtttggaactcctgggctcaagcaaccctgcctcctccccgaccccccctaccccccacccccacccccaccccccccacaccctcagcctagatccatgatttaaatccgagcagtcttgctgtaggtaggatccttgccatcaagcattgcaggatgctgaggcaagctatgtaacttcctgggcatcacaaagctaggaagaagcagagcaaaaacttggtccgtggcagtcatgtgtgctttcccccactatgctatagtactttgcgatttttcctatcacattcttcttcaaattataattacctgtcattcatgctttaaaccagagatgcttaaactttaatatgcttcagaatcaactagaagccttgtggaaactcaagttgttggacccacccatagcttactctgatttagcaggtctgggctaggtctgcatttctggcaagcccccaggtaatgctgctggtctgggccacatttggacaccctctgctttaaacctttgtagtcagagaatgagctgaggagtggtgtgccccagcaaggtgggtaggaaccgagtcacatgagccttattaaggacataggagaggctctactttatccctaggtcagtagggacccgtggaagagctttcagtaaggaagtgatgattgaacagaattgtagcttacgaggtttttttggtttttggctgctttgtggagagtggcttgaagaagcatgaggtgaagattggaggcaaagagagaagtcagcagatgttagggattcggaggtaagaagtctcagcagctgtggggatgagggcactgtgtgcagaagggatctgcaagcgtgacaggagaaagaactggtggctttacagtcatctgctgatttctcttctgaccactgttagcatgggcaaacctccaaattctattcctgactcccccttttctctctctgcttgcttcctgggctgcattgctccaagagttccagcttaacacctccaagcagatagctacgaaatgcaattataagtgtttgtgtgtctctttgcaattgtttattctgagaaataagggatgaatattaccaaaggcatttttcaagtgattttacagtaatcacttgaaattgattactgtagtaattgattactatagtaactgtaggtactttaaagtaataactacaattcttttttctctggatttttgagcatacatataaactttatattcttaaatagtattaaatattactatttatcattaacttgtatcattaaattttattattaaacctcatttaatataaaataatatgtattattattattttgagacacagcctccctctgttgcccaggctggagtgcagtggtacgatcttggctcactgcaacctctgtctttcgggttcaagcgattctcttgcctcagcctctggagtagctgggattacagacacgcactaccatgcctcgctaatttttgtatttttagtagagatgaggtttcgccatgttggccaggctggtctcgaactcctgacctcaggtcatccacctgcctcagcctcctaaagtgctgggattacaggtgtgagccatcacacccagccaaaaatatttattatatctatataaaagctaaagaatgacccaatgaaaacctgtttacccactatctagattaaaaaaaagaaaacaggctggtcactgtggctcacgcctgtaatcctagcctttgggaggccgaagcaggcagatcacctgaggttcggagttcgagaccagcctgaccaacgtggagaaaccccgtctctactaaaaatacaaaattagccaggcatggtggcgcatgcctgtaatcccagctactcaggaggctgaggcaggagaatcccttgaacccgggttgtggtgagctgagatcgcgccattgcactccagcctgggcaacaagagtgaaactccgtctcaaaaacaaacaaacaaacaaaaaaccaaaacattatcagtgctatttgtatcattcttccttgattaaatcctcctttccagtgtccctgaagaacaccattatgagttttaaattgatcactaccttgcttttctttagggatatttatgaatacaccaacactgtgagcagtatcttgttgagctgctcttgtttttgaaccttgtaattgcccccatcctctctgtgttcctccaggagttgtcttctccccaccagcatgatgtttgtgagcctggcccatgttgctgcctatagctgcagtttatctacttccatacatcatattaatattaccaccaattacttattctcctctaaatagacatctgtgttattttccttattttgttgtcacagtgatgcttgtatgaacaccctacttcctgtttcctcttgacataggaggttctccaggtcatgtgccggtataacagccatgctgtggggcctgtgctttctcattcctgcatggcaaggccaggtgggtttctctgtgtggctgtaccagcttatgtgcccatcagtagtgaagatgatagtcacaatgagaacaatgaactaaccttattctgtacttattatgcccggcactgactgttctaagcactttgtatgtatgaatgcccccaaaaacccaataaagtacgtactagtgttatccctcattttgtatttgggaaaacagaagcttgtagaggctaaattgctttcccatctggtagtaaatgggagtgccagaatttgaaccaaggaatctgtgcccttaacattttttttcacatcctggtgaacccttggccttcccagactacttaggtttttcctgactggtgggtttagatggcatctcattatggttttaatgtatacttccctgattagtatgacaatgaacattgaaaatatatatttattggctctcttgttttctcttctgtaaaatatctgctcatgacttttgcccactttttaaattggattatctttttcttattgactcataaaagttcttcctgcgttatggctcctttttgtcgtatgtgttgataaagtagcttctgtttttattgttttaagttatccaagttaagttttaaggcaagatttaatgtcagaattttcaatattttcctttatggtttgtgtgttttgcgtttgtgtagataatcttgttctactcctaagctcacaaagatacctatattttcttttaaacctttttaaattgtgcttttcaaagttaactacttaatcctcatgggattgatttttgtacacggtatgagtggctcacgcctgtaatcccagcactttgagaggccgaggtgggtggatcacgaggtcaggagatcgagaccatcctggctaacacagtgaaaccccatctccactaaaaatacaaaaaattagctgggtgtggtggcgggcgcctgtagtcccagctgcgtgggaggctgaggcaggagaatggtgtgaacccaggaggcagaacttgcagtgagctgagatcgcgccactgcactccagcctgggtgacagagtgagactccatctcaaaaaaaataataataataaataaaataaaatacagataccaggccgggtgtggtggcttaagcctgtaatcccagcactttgggaggccgaggcgggtggatcacctgaggtaaggcgtttgataccagaccagtctgacctgtaacatggtgaaaccctgtctttactgaaaatacaaaatattaaccggggatggtggtgcacacctgcagtcccagctgctcaagaggctggacccctgcactccagcctgggcaacaaagcaagactccatctcaaaaataaataaataaataaataaataaacaaacaaacagataactcgttatgccagcacaatttaatgatagtcgtgcttctcttcccttactaccttgccaccacctcacctttccaaccccgaaattctttaaaagcggtttctgtgattctcaattaattgtaaataaaaagatgatttttcgcttaatacgatcctcagtatatttgcttctgtgagctctcagtcagttgcactcttttattttttgttaatcttctggaaacccttagccaagggcatcagatgatatttgagatacaccttagaaaaacgtgtttgtgaatcaacaggcaaattgggaagtattcatttagggaagtaatgagagctaaacatggaaaaataggttggaggaccagatagtgaatgagagcctgaagaatctatgcttttcagtcagcagtggagatattacaactttttgcagagtacagtaacgtccatcaaaatgccattgtagaatattaatgtgtcctcataatagaggaggggttaagggattgaagggtgaagtggagatggagttcatttagaagacaatcctattactgccttcatcctccactagggtgcaagcagtgtagagaaaaagggggttgagtttgagagaaacctatgtttccatgcatagaaaccactttctgtttctatgaatttgactactgtgggtatgggtaccgcctataaatgaaatggtatagtatttgtcttttgtgactggcttatttcacttagcatactgtcttcaaggttcatccaggttatagcatgtgacaggatgtctttcctttttatggctgaataatattccattgtgtgaatatactacatgttgtttatccattcctctgtcaacggacatttgggttgtttctaccttttggctgctgtgaattatgcttccatgagcatgggtgtacaaatatctgtttgagtaccccattcttttgggcatatgcccagaagtggaattgctggatcacgtggtaattgtatgtttaattttttgaggaacctccatagttgctgcaccattttacattcccattagcagtgcacaataatttcagtttcgtgccatctttgttaacacttgttattttctgttttgttttgttttttaataatagccatcctattgggggtgaagtggtatctcattgtggagcaggacttatctagatagtaactgaagaaaaagcattccgaatacttctaggatgtgtccttcctatattggtattactctgtaaccagttcactgcacaagtggcacttttttcagtccaagtagaagcaagtttcttagagctgtttttttttttaaaccctttatttcaacttctttccttcccatatataaaaccacataccattctaacagtctgtaatgttgctaccaggtaataaacaagccatactgtatttgggagaggagggtgtgtttcaaagtctagttcattgtaatatcaaaactggtaaaacctctcctctctaaactcagtttgacctcacactgagaaacctttactagtgcagaggagaatgttgctttcttcttgcttgctttatattgtaggggcaaaagggtgtgatcccactcctccccatcataagggtgtccatggcagacactcctataacaaaagacaggttaacaagagaaaagtataactgatttatttaatcaaagttttatgtgacatgagagtcttcagaacagagatccaaagatacaaggaaagctgtccattttaatgcttaggtttaatgaagaatgggcagccgtgtaaaactgatgggacaaagaatgtaagtgaatgctagtaggctgagaggaacccagcaaggcctatgttcagatcttcctggcctctcttgtactatttcttcctcccaggtatgggacaagacccatctgggatgacggtcttatgacctgctactgttgtagagaagggtaggccagagaatttctttatgagcagctcttagaaaggcagggaggggttagagtcctctttctggtttcatagttgtctttgcgggagaggaattctgatgtctgtgactcatctcaggagagaatgaggggtgagagacaggaaggcagaaggtcagagatcttagttctgaggttacttctgaggccttctctttggggtatcattttctgagcctcaacaatacccttttctacttcagagctgctatattgggtctctcagaatttgcagtatggggtaaagatgagaagagcatggcaggaagaaccaggttttctggggcagaggcaacctggcattcactctcttggggcatggcagatgtccaaagctggccggtagccctgggatactttcatgtggatttgggggaacttctcacctgcagaacacttaatgcctcctgtcttttccagttgcctttggtctcctgagcaactactgtgttgactctgaatgttctcactgggcatggtccctcataatgaccccgcctgcttttctcctgcacaatccacgtctggccacaggaaatagtaataagtccttgcctcaccaaaccaacaaagtacaagcttctcttcttggtctgtctctaagaattcgcatgaataagtgattctcatgaagtcgctttcacgtagcttaagcagagttcagccttaaattctaagcttaagaattcgacctcctcaaattaattttcctcttttattcttttaaggtgggagatggacagtcactggtcccacagcttcctagcacattctaccaggtagccttggctagcatctgacttaaagatgtatgggtacttggcgtctacttctttttgttgctgaacccctgtgattccatgaaaagtagtgcgttcatctgttcttatattgctataaagaaaaacctgagactgcataatttatcaagaaaacgggtttaaatggctcatggttctgccagctgtacaggaagtatggtgccagcatctgctcagcttctggggagggaggcctcagggagctttcagtcatggtggaggcaaagcaggaggaggagcatcacagggcaagagcaggaatgagggtgagagagaacggggaggtgccccactcttttaaacaaccaagatctacctctgtgatccaaacacctcccaccaggccccacctgccatgtcgagaatcacatttcagcaagagatttggagcggacacatccaaaccatattaaggagcatttaacttctttatctgattagatgagtaagtagttgggaaggcaacttacctttgcttcaggaattagctcccgattcatccagtccgatcacgtgtattcatgttcctggttttcattggtaaacttcataagtttaatattacccattaaattcctttaaaagtaagttgtattttggtgtatactgtcactggtagagggtcatgattgcaagttatccaggttcttggcgttttgaacaaagaattggacaacatgtccagcaaagcaaacaatgaagcaacaacagaacaaaaacagggatttattgaaaacaaaagtataggcggccaggtgtggtggctcatgcctgtaatcccagcactttgggaggccgaggcaggtggatcacctaaggtcaggagtttgaaaccagtctggccaacatcgtgaaaccccgtctctactaaaaatacaaaattagcctagtgtggtggtgcatgcctgtaatcccatctacttgggaggcaaagacaggagaattgcttgaacccaggaggtggaggttgcagtgagctgagatcgagccattgcactccagcttaggcaacaagagcgaaactctgtctcaaataaaaaaaaaaagagagagagagaaagaaaatgaaactgtactccacagtgtgggagcgagcctgagcagtggctcaagggcccggataccgaatcttcttggttccaaatacctgctagaagttttccattgattactttatactcacctcatgtaaatgaagttgcagcctataaggttgcagaaagcagccaaccagaggctgaagtgaagttacaaaggtcacactcctgtgcaaacatgttgcaaagttatactcttatgcaaatgaagacttggctggcaatcagtctgattggttttggacagcaaccattcagagactggagtgaagttacaaagttgcaaagactggacccacagtcaatctgattttctgatttgttattggatgggaaattgactgtccgatttcccatctgccacacagaaaaggtgggtggtttgcaaagggagtagcccctggtccttttattacttaggtgtggaaagctaggattttcctttcaatttagttctaggaagttggcgtgaaacagccttgggttccctgcctccagaccctattctcctgcctcagtgctatcattagaataataaatttcataggttattaacctcttttaattgatctaaatcacctgtttccttttggatttgacttttaattcccactgccctgctgacttctcggcgcatataaatgctcaataattggatgaataggtgtgggtgggtgaatgggtaagtggacagtcatcttacattatagaatgttttgctgattctttttagttcctgacctcccaacatttgcgaaatccatactccattagtgtggctggtggacctctcttgatacagaataaccatggtttctgtgagagcaaaaagaaacaagagggctcccaaggacttgcccacagaggcgctttgctcaccaagcatggttctttcctgttggcctctgtttgctctgggtagcacctcggctgttttaggcccacagtatcacctattgacaagtgtagatagctattgatagtatcaataggtgtaggaaagggtctgcctcctgctattcctggttttctctttctcaaaggcttgtgcatgccctaggctttctcactgtccgttgctgggtgaggtcatatcagctcttactcccacagaaccacccgcacctgctttaagtacgctgcctttctgacttcaagaaaatcatactctcggaaaaagtctaatcattgtggataactttgaatatggagctagtgatatattacctaagggaggaggaaatcacatattttgaaatgataaagaaccaggggcataaacattgagaactcttgaaaataattaaaagttctcttcagaattttaaagtctttttctattaatttctctaataatttagccaacttttcttcaaatatcatcatttaaggaaaatgaaataactattttatatttatttgtttatttgtttttttttttaccagtgtttctgttttcattgccgaagtagtcagttggtaatgacgtttattaaatagccttatctaatagaaggctaacacaagccatatttaaaatttctttgttttaattaattagctctttgttttgttttgtgtttgagacggagtccgttgcccaggctggagttcagtggcacaatctcagttcactgcaacctccgcctcccagactcaagcaattcttctgccccagcctcccaagtagctgggactacaggcacctgccaccatgcccagctaattttttgtatttttagtagagagggggttttaccatgttggccaggctggtcttgaactcccgacttcaagttatctgcccgcctcagcctcccaaagtgctgcaattacaggtgtgagccattgttcccaactgtcatttaaaatttcttagtagtcatattaaaaaagatgaaacaagtggaattaattttactaatacattttatttaaaccagtgtacctgtggagacaaaagtgattccatcttaattgctaatgcaccatgttgttttttttttcttgaaggcaaaccttgttgttttaatgtaatttattttttattttactttttttttaatgatagggtcttgctctgttgcccaggctagagtgcagtggtgcagtatggctcactgcagcctcaacctcccagactcaactgatcctcctgcctctgccttctgagtaggtgggactgcaggcctgtgccaccacatgcaattaattttgttgattttttgtagagatgagggcacactatgttgcccagaactcctggactccagtgatcatcccgcctctgcttcccaaagtgctgggattataggcctgagccaccactcccagcaaagccatgttgatttctcattagccccagtctcgtgaatgcctcctgattctgattttatttactgtttttagtgtaagaacaaagcagccttgatcttaccacacaaattataggcagtgacgcacatagcattcccacctgttctggaggatgcctttaattgcctctgtagagcacgtacaccctttccctgtggcatataagctctgggtctggccagtaacagagtgggttatacctgtcttgcagccatccgagatcacgcttctgtctgtaagttcccccaagaaaacaccctttaccaacaaattgagtttctttgccttattctttggtttcttggctccctccgcatttgggggctgctttgcatttatggccctttcacagaataataccccaaatgttgtcatttcaacatgaaagacttttaaaaattactaatgtgataccagaaacaacatagacattggcattaatacaacagtatcttaaacaatggaacggtcagagtggaatgtagtcctaccaaaacaatggagttgggtttaacagaaaattacactgcttcagttttaaaattaacattaaatacaattgaaaatttaactcctcagtcacaccagtcatatttcaagttctcagtagctacgtgtagctagtggttactgggttagaccactcacaggcaaaattttttgtaaaccagagagtgtttacagatagagaaaactctacataatggtttttaaagtattcccccttaatgtcaaccacagttttggtttttatctcttaaaatttggaatagatgagttgaatttatttttaaacagaagatgaatttatcatctagctgacaaactttttaaatttcccattagaagatttaaaaaattacaaccatttttaaaacgtggaatgatttcctgcctgtggcatataattaaagtgatgaaacaaacagaagattcgctgtgtcctggccatggtgagctcactctctgttttcctcacaaaccccagaacctttgtagtgtggaacctgctggatgaatagaagttttttattttattttatttttttactatgtctatattcctgtgaagtaatttttttgaccttgaaagaagttcttcaattttgctgttctctatttcttacagtgtagtttgtgtaccgggatttaatgtattgtttgtcgttagcgttttacatactagattttcatcgtgcatagtcacgttgtttgaacatttgcaagcagagccgactaactgctgttggcctgtttctttgtatggcgtgatttcttctatccacctgctcacagcaggttgccttcaggcctgaggagtagctaaatacttttgaaaatatcttgagatcctgctaaggtctaacaatttctgcatttgtgtgatgtgaagctattcatgctgtacctttgaagacttttttctttctatttctcatattcttgctcaaatattttcaaaagaagataaatttattataaataacagtgcagagctgattgtagcaccactgcattctatattgaataggtctttgatattcagctaagtggaactaattttctatgttaaagcagacaaatttggaatagtgtcacatgaatctcatgttatttactgaagaataccagattaaatggattagttgtgaaatgactagagtattaaattatatatatatatatatatatatatatatatatatatatatatatatatatataaaacgtgataacttaaaatgcccagtgggcctatgtaatataaaatattacacaagcacatgaatatgatggacgagatgttattctgtttgcagattgtgaaactatctgtagtatatatacaaatggttgtccacacagaatttgaatcaattttaaaattgtaaccttaaatttcagttttgaagaaaataaattgttgattttcatatctacttgagaggaagttaaaaatgttattttcttttcagttttttttagattaaaatagctcccacaccctccaagaataaactttagttttaatcctaataactgtttatagatagtaaaattaatattttaattagaaaaataaagcggcatacatttttgcctgtactttgctggtacacaaatgaattgggaagtaattgtcttatgttttcagtcctaaagtgttttacaggttttaaaaatgttccccccacccccatctgtttgaagtcattattattttgtactttacacatgtgatttctctagaatcattgcatgtgacatgacactctcaggatatataggatatataaatatataacttagaataagtagaggttggtatttttcgaatgaagtaggaaatgaaagagtaattattaaccatatcctttttacattcctgacatatcaatacagctacacatcttagaaacaagctcaccagtagaacagaaataactctgttgactctgctttaaaatatttcaaggcagtttaacagctgggatgtatttacagctatggtataaagtattaattttgatgcaaggctacctgcttttgtaatgtagtcctagaagcttagcagttttctgggttttataatttggagttgcttttaaaatttaaccgaatgggaaaatgtctttctgaacttccccttcccacacccccacacatacaagcttttctcctcttctgttaactagaaaattatattttcgttgctgcctgaggaagagaattttgagtagtataaacactgattgtagtaaatgtggaaaataatacaaacagctgcactgcagaccgataagacaaatcccacagtaatggcctttaaaacatattaccaagttggaaatcagtgaggggaaaaagaaaactattactatttcttcctcttactgttcagtgacattatttttaaaggtgaaattacctctggttttattatcctaggaaggtatttttggaacatttgatttattgttttgcaaatgtttttgcctttgtgtgaataactttgctaattttgtatgaatttgattctaacaaatgttgaagtcattttgttaacaaaatcttctaaagtattttttaaagaaataaaaaggaatatattatgtaaacattggagcagactatcaaaataagaaaaggagaacatttttatctggctttggagtgccatttaaaataggaaaagggatgaaatatttgcagaaaatattttaataagcgtggatatgtttcatcaaatacaagtcttaatttttatgaagaattttgctattagcatatcaagtggtcagttcatatttgttttggcatgcattagactcatgataggcattgaatactttgttttttgtggattctaaaactgaattatcttaatcctaggctctaggaaaagtatatcttactgctagggaagattgaaataaattccagttctgagtgaaattttatttctgtttttctttacatcaatcttttctttttccttttttcttttttttttttttttatttttgagacagagtcttgctctgtcactcaggctgtagtgcaatggcatgatctcagctcactgcaacctccgcctcccaggtttaagcgattctcctgccttagcctcctgagtggctgggattacaggcgcgtgccaccatgcccggccaatttttgtatttttagtagaggcaggatttcaccatgttggccaggctggcctcaaactcctgggctcaagtgatccgccttccttgacctcccaaagtgttgggattacaggcgtgagccaccacgcctggcctgtccttccttccttccttcctttacaaactgtgggagagtggtgaaaaaaaggtgacagtcattatatatgtaattgtgacctgctttaaattgaatgcaatgttaaggacagcttattggtacttatacctatggtcacacattcattgatacagtttgtttttaatgtgaaaatttgtttccattttacataatacaaaattacttctatttgcctgggaatgaatctaacctttgtagtgtcagccaaaggaatgataatattgttttagtgtctcctacatagaagggaacgcccagtatggcctaggcagtgttctagactctgcagatagaacaaggaacaagacttaccttccagcagggggaagtagatactaaacatgtaaatacctaaataaggtgattttagtactaagaagttggatgaagactatgaaattgatagaaagtcactagagaaggcagctttagcaaggatggctaggaagtcctctctgaatagctaacactgagctgagacctacgaagaggagggggcaaacgtgcagaagtctgggggaaggaagtcccaggtagcagaaggggcaaagcagaggctctgaaacgggacaagcttgttttgtgtgaaggccagttggggagagtggaacgaggaagacagaaccagatcatctaggggccaaagaactgttttgttttgtgttgtttctttctattcatgttgtggagcgtttggagggtttgggtaggagagtgatgtgatgtgattttttaaatcattgcaggccttggggtagagacagagaaatcattgatttgaccattgcagacctcaggtgagaggtactggtggcttagaccaggaggcaccgtctgtttctatggggctcacaacttgagtggttattacatttttaaatagttgggggaaaaaattaaagaagaatgtttcatccagcctgggcaacatagtgagaccttgtctctacaaataatttttttaaaaattggctgggtacaatggtgcatgcctgtgggtccagctgcttgggaggttgaggtgggagaatcgctggagtccaggcagttgctgtggagagctgtgaccatgccactgcactccagcctgggtgacagcatgagacactgtcaaaaaaaaaaaaaatcaataatgtttcatgacccatgagaagtatgatgtcacattcagatcttattgatgataagcagttaactagaacatagccacattcattcatttttgtctgccatgtatagctgcttttgcagtttttgtcgtatgaagctgaatgcacagactttcttgccacgcagcagttcagtgggttattgtgatttttttttttttaatctcaggaccaagattaaagttttttgtgcagagttgcaggtagccaaattactttttgtattcctgtgccttagattcctcatctgtagagcaaaattgagatcgtctttcaggtctgtttgctctccacatcctaaggtcctaggtctgaatcagacttagttcttctgttgtggctgcttagcacatcaggctcctaactgaatgattgtagtggtgttttactcggtctcctagcctcgtccttccccattctatgtatcttcagcatgacctcagaccaccgtctttctaaaacatgagcatgtcacactccagttcttaactgtaagaactttgtcaggtatgagctctctttgtacaagatctgacctgggtttataattccttcctggtttcctttcttgccacttccaccttcatccaaccctatttctggccacgctgaactgcttaacattccctaaacttgccatgccatcgtgccatcccttaatctgaaatttttgttaactgtctcatcagcccacaatttttttttttttttttgagacggtgtctcgctctgtctcccaggctgaagtgcagtggtggtgcaatcttggctcactgcaacctccacctcccaggttcaagtgattctcctgcctcagcctcttgagtagctcggattacaggtgccaccaccacgcccggctaatttttatatttttagaagagacgggatttcaccatgttggccaggctggttttgaacaacctttttttttttttttttttttttttttttgagacggagtctcgccctgtcacccaggctggagtgcagtgatgcaatcttggctcactgcaagctctgcctcccgggttcacgccattctcctgcctcagcctcccgagtagctgggactacaggtgcccgccaccatgcccagctaatttttgtatttttagtagagatggagtttcaccatgttagccaggatggtctcaatctcctgacctggtgatccgcccaccttggcctcccaaagtgctgggattacaggcgtgagccactgcacccggtggttttgaacttctgacctcaagcaatctgcccgcctcggtctcccaaagtgctgggattataggtgtgagccaccgttcccagctgtttttcagttttcttttggaaaattcctgctcatttttaaaatttgtaattggtttttaattgataaattaaagttgcatatatttgtcatcctgtcttagtagtgtcttttgtgttgctacaaaggaatacccgagactggataatttataaagagaaaaagtttatttggctcgtgattctgatgtctggaaaagttgaggattaggcatctgatgaggacctcaggctgcttttattcatggtagaaggcaaaggggagctggtgtgtgtggaggtcacagagtgagagagaagggagggaggtgccaggctcttttaaacaaccagctttctcaggaactaagagcttgaactcgccctcaaagagggcattaatctattcatgagggatccttcccaatgatccacacacccccattatgccccacctccaacactggggatcacatttcaacatgaggtttggaggagataaactttcaaactttcacacatgtacaacatgttttgaagtacacacttcaaacagtggatacactgtggaatggctacattgagctaattaacatatatgtattacctcatatacttattctgtatgtgaggtacacttaaatatactcagaaaatttcaagaatatattaataatacgtcgtcattaactgtggtttctatattgtataatagctttctcgtacctatttctcctttataactgaaattttgtgggttttgattaatatttcctcaacaccccctccccaaccaccattctattttctactctatgagtttgacgtttccagattcttcatgtaagtgaggtcatatggtatgtctttctgtatgtacctggcttattttacttaatgtaatgtcttccgggttcatccatgttgttgcaaatggtaggattttcttttttaagtctaaataatattccattttgcatattataccacattctctgtatccgttggtccatggatggacacttaggctgattccctgtcttggccatcatgaatagtgctgcaagaaacatggggatgccagtatctccttgacataactgatttctttcctttggatatatatgcagtagtgggattgttggatcatatggtagttctatttttaatgttttgagaaacctccgtactgttttccataatggctgaatcttgttcatgttttttttctttcttttcttttctttgtttttttgaaacagagtcacgctgtggtgcccaggctggagtgctttggcacagtcggctcactgcaacctccaactcccaggttcaagtgattctcctgcctcaggctcctgagtagctgggactgcaggcacctgccaccacgcccggctactttttatatttttagtagagccaccgtgttgggcaggctggtctcaaactcctgacctcaaatgatccacccaccttagcctcccaaagtgctgggattacaggcatgagccaccgcaccctgcccctgtttgtttttaaatatccagctttaatgtctgtcttaacctatctaatgtcttccttattaacctttctgctcatttagtcggtctgtcctcttatcccataatactttgtacattttgtactatgcatttatcgtattgaattatacttatttttccaataattctgctgtcttttccttagtctcttggaaggtgggtcttaattcagccagcagtgcccaacacagttgagaggtagatggatgattagatggatgaccaacgtagaaatgccagtgtcaaaacctaggaatcaaccctccgttcttaactgagtctccctaagacacaggaaaggagtctattttattccattttgttttctgtctttttttgcctttattaagttcaacatgtgtgtataaaagaataggaaaaacagataagtgaaaacgagagtcaactaatatttttgcctagaaataagttttatgtgcactaattctagaatttttctgtaacataattttttacaaggcttattctgaacatattgttttgttcttcttgcccttagaaataaactgtaagcgtttttcatatcttgaaactttttaaatggcaggctggatatataccacaatttacttagctagtgtctttccccgtcatttacatttcttgccattgttcagttctataaactacactgtgatatttgttcagctttatttttctgcctatccttacattttttcctcaggataaattcttagaagtaaaatgggttggctgggcgcagtggctcacacctgtaatcccagcgctttgggaggttgagggagcgggttatgaggtcaggagttcgagaccagcctggccaacatggcaaaaccccatctctactaaaaatacaaaaaattagccgggcatggtgggagatgcctatagtcccagctacttgggaggctgaggccggagaatcgcttgaacccaggaggcagaggttgcagtgagccgagattgtgccactgcactccagcctgggtaacagagtgaaactttgtctcaaaaaaaaagatgtgaaatgggttggttgggcatggtggctcatacctgtaatcccagcacttttgggagctgaggccaggagttcgagaccagcctggccaacatggtgaaaccccgtctctactaaaaatacaaaaattaggcagatgtggtggcaggtgcctgtaatcccagctactcaggaagctgaggcaggagaaacacttgaacctgggaggcagaggttgctgtgagccgagatggtgccattgcgctccagcctgggtgacaagaatgaaactctgtctcaaaaaaaaaaaaagaaagaagtgacatgggtcaaaatgctcccatactgattttttttctactctataccacactgccttaagtatgctatctagattaccattgtgtcaatttacttggcaatatttgcaggtaggggaaaacattttgcattaaaccactgtctttcttattgatctaacctccctccgtcaaggaaccgaggactcagcttgatttctagaggttcactctgggttctattacttctgtgatcatagagatcagagttggtaaacctccacttctgtaaaaaggaatgaaattaggatacatctgtatcgtaatgctcatggcatgtagttgagtgaaagccactaatactctacatctgggaacttaaaaaaatgatgctggcttagttagaactgctttatttgtgtgtgtagtctttgaagtcactgagccctctctgattagccagaagaggaagaattctgaggaatacgttaggattaagtagagcaagttttttttgtttttgtttttgttttttgagacggagtctcactgtcatccaggctggagtgcagtggcaggatcttggcccaccacaacctcacctccgcctcctgggtccaagcaattcttctgccttggcctcccgagtagctgggactacaggtgtgcaccaccacgcctggctaatttttgtatttttagtaaagacggggtttcaccatattggccaggctggtcttgaattcctcacctcgtgatccgcctgcctcaacctcccagagtgctggaattacaggcatgagccaccgcgcctggcccaacagaccagttttgtaggtgagaattatctcacagtgtagtcagcttccagtgtactacttattcacccatttttagtagcagtagtagttacttttaactaaaattttaatagtcatagtatttacttttaattaaaattcaaacaagatatatgcaagtgatatatttgctgtaaacaaattttatttataaataaatgaataataaagaggttatttctttcactactctctggacatagaattgcattgttgttttaaacaaatgctaattcattttctataactattttattgagatataattcacacaccatacaattcacccatttaaagttacagtttagtggtttgtagtcaattcacaggggtgttccaccaccaccacagtcaattttagaccatgtttatacccttgagaaaccccacaccaattagcagtcatctccatgtcctcccagacctcctcttggaggcatctaccaatctaccttccatctccatggattttactattctggacatctcttattaagtggaatcatataatgcatgatccttggtgaccaacttctattgtagcatgtatcactacttcattcctttttatggccaaataatattccactgtatggctatactatattttgtttacccatccatcagttgatggacatttgggttttttggctatcgtgaacattacatacaagctgtgcagatatgagttcattttatatctcttgtttgttttttagtgtctttctcgagaagcaggtggaaacatgagcattcagtttcttggtacagtggtaagtatgaaatcattctttattctcttaatttacagagaaaaaatgttcaactagttgtagctcatgtgtttgaacttggcttcattactgctagatatttaaattacctctacttttttgcctttacaaatgatattctagggaacaacttcatatatttcactttattttagtgtttggaattattatcttttttgagacagagtctcactgtgttgcccatgctggagtataggggcacaatctcagctcactgcaacctctgcctcccgggttcaagcgattctcgtgcctcagccacccaaatagctgggattacaggtgcctgccaccaagctcggctaatttttgtgtgtttttttctaaagatgaggtttcaccatgttggccaggctggcctcaaactcctggcctcaagtgatccatccacctcggcttcccaaagtgcgggattacatgtgtgagccatgtccggcctggaattattttcaaatgtggataagatatttttaaacatgtatgatatattttctcccaaatagaatcaaagtcataaatagttttatggcttattatacatgttgcccattattttatgtccctttagaacaccacccatcatatattagaacacaactttgcattgtcacctagtgtgagttgtaattttcaagattagtaaacttgatctgctgaagagtttcaatttattattactattttacttataagtttataattagtattagttactataattttcaaactaatttgtttaaaaaggtaccttatttggcttggtgcggcagctcacgcctgtaatcccagcactttgggaggctgaggcaggtggattccaaggtcaggagtttgagaccagcctgaccaacatggtgaaaccctgtctctgctaaaaatacaaaaattagccgggttgtggtggtgggcgcctataatcccagctactcaggaggctgagggaggctgaggcaggagaatcgcctgaactgaggaggtggaggttgcagtgagccacgattgtgccactgccctctagcttgtgtgacagagcgagaccccgtctcaaaaaaaaaaaaagtaccttattttaattttcatttttctgtttattgctattgtatttgaatatttctccatgtattcattcaccagatatcatttctaatctgtgaaatgtctgttcatgtcctttgggtacctcattcaggatatggattcatattgggcatttcagataactctggagtttattaagaatatcagaggtattctgcaagaatatcaagaggtatttcaggcgagagagcttgcgtgaaaaagggttttgcagccattgagataggaaggatgttaataaaatgtgtgtttactgaatgctttatcgattatagagatgtatatataatttatgtatataaagtatatgtataggtacttggtcaatgtaacctaaattttaagtattggaactaagttttgtgattattcttgtttttctgattagtaaggtaatacatgcttattgtaaaacatttgaaatacaattcaaatgtatgtcataatatgttgcattagtcaagattctccagagaaatggaatcaacaagatgtgtgcgtatgtgtagagagaaagagaaagatagatctaaggaattggctcaagcaattgtggaggcttggcaagactaaaatctgcagggtagatgagcaggctggagacccaggggagcgttgcagttcaagtccaaagacagtccactggctgaagccctccttgcttggggaggtctgtctttttctcttaaggcctttaacgggttggatgaggcccacccactgtggagggtgatctgctaaactctaagtctactgatttcagtgttcgtctcatctaaaaatatcttcgatgatacatctcagtgtttgacctaacatctgggtaccatggcctcgtcaggttgacacataaaattaaccatcacagaagtatatatcctatccctagaggtttttaagttattagcaatagataattcttccagaaaattatgcatcttttcatgcaataatagatcttggacacctttctgtgtcagtccgtaagatggacctcagtcgccttaagggccacacagagctgcattacgtggatggagaggactgctttcactcctcagtgttcgtgctgggaagtccactcatgctgtctctgctacttagcatctctactgggtttctaatcggtttctcaacttcatgtatcggaaactgagctcgaaaagtttctccctcagtttttcctctctctgaaaatggcaacttgaactaatccttgattactttctctcctcttcctctctctcctcttcccctcctctcctctctcctctctctctctctctctctctcttctctccttcctctccctctctgtcctcttcctctcctctctgtcctcttcctctcctctctgtcctcttcctctcctctctctcctcttcctctcctctctctcctctctctcctcttcctctcctctctctcctcttcctctcctctctctcctcttcctctcctctctcctctccctctctctcctctccctctctctcctctccctctctctcctctccctctctctcctctccctctctctcttttctccctctctctctcctctccctctctccctcctctccctctctcctttcctcctcttcctctctcctcttcctcctctccctctctcctcttcctcctcttcctcctcttcctttctctctctcctcttcttcctctccctctctctcctcttcttcctctccctctctccttctcttttttctttctcctctttctcgctcctctttttcttctctctctctccttttctcttttccccatctgtctctccctgtctccctctcccctgtctctgtctctgtgtccccacgccccccactcctggccctgcctttagccatctcttgtttggaggatggcagtagctggcgtccacctcactgccatgctactccctagtccatcactaatagagcaggaaaaggagtcctttgaaaacatcccttggttggccttgttgctcttcttcagacctgctgggcacatgccttagggtctctgcccttgtttttcttctactaagaacatctgcccctacatgtctgctcaggggtttcctcactttcttccggtctttactcagtaggctccttctgaaggaaggcttccctggtcacgccgcttacagttctggtcactctttccaacatcttattccccctcgcccactttatttatttatttttttcattagcagttaccactgcttgacatactgcaattttccttttttgatgtatttgttgtctatcttcctcacctggaagtgataagctccttgagtgcagggtgatttgtctgttctgctcagcgtgctctgcccagtgccctgaacaaggcctggcttggaggaggtattcagtcagggttgggcaaatgaatgactgaaattggccaatgtaggacctgagtgttagacttgaaaagaaaactaaagaaaggaaatacaggcctggctcggtggctcgtgcctataaactcagccctttgggaggctgaggtaggaggatcacttgagcccaggagttcaagaccagccagggaaacaaagggagaccccatccttacaaaaaattagctgggtgtggtggtgcatgtctgtggtcccagctacccaggaacatcacttgagcccagggaggtcgaggctacagcgagccgtgatcacaccactgcactccagcctgggtgagagtgagaccctgtaccctgtctcaaagaaaaaagcaaatatgaaaacaaatggaggccgggcatggtggctcacacctgtaatcccagcgctttgggaggctgaggtgggaggatcacctgggtcaggagttcaagactagcctggccaacatggtgaaaccctgtttctactaaaaatacaaaaattagccaggcatggtggcaggagcctgcgatcccagctactacaggaggctgaggcaggagaatcgcttgaaccttggaggtggaggttgtagtgagctgacattgcaaccactacactctagtttaaaaaaaaaaaaagaagaagaagaaacaaatggagaaaaagaaagtgcagggagctttttgggactgtggagctgaactaagctgtcttccatggataaggaaactgtatcttagaaaaggtcacttgacttccccaaggtttcacgtctggctggtgtgtagagcactaaagggtatacagatttcctggctctcagttcagggcctgttccatcagcaggtgcccttcaatttcactcccttttatccacttcaggcacccaaaacatgctagcataaaaaaacacaagaaacaaaaacacaccacatgtacacacccctacttaaatggacaacaaaagtcaccggaaaaaagggaaaaaaagaatgtctttttgatttgttttgttttgtttttgtttttggagacagagtctcactcagttgcccaggctggagtgcagtggcgcgatctcgatatccgctcactgcaagctccgcctcctgggttcaggccattctcctgcctcagcctcctgagtagctgggactactggtgccggccactacacccggctaatttttttgtatttttagtagaggcagggtttcactgtgttagccaggatggtctcgatctcctgacctcatcatgatccacccgcctcagcttcccaaagtgctgggattacaggcgtgagccaccgcacctggccaaaaaaaaaaagaatttcatgtagctgacactttcctctgcccctaataaatcatagattccttgccaatgagttctaaaggggctgtgtccactctgtttatacagtttatacctagcaggaatgtcagtttcaggtacaatttctagagtaatttctaattactgtaaaattcacagtacagcatagcagtttggatggccaatgtgctttgttttactgaatttttctgtgtgtgttattagcaatagtagatcagtctgaaagggggaaagaaatagtttgaagatagtagtggtcctgttacaacaaatacagattgattcctagctagcatatgttgcttcagtcaaagatgtctaaagcaagtatagtttccaagacacacaggtcaggaatagcagcatgtcccatggcaaaggtgatgctttccaggtatagatttgtctttgtgagaatccttgtagaattttctatataagtttgtttttgtcaatattgataaacatgatcttcaatgttcaaaggagagttcaattttagactaagagaagtacttctgttgtgtaaataaggttcaaaaataaggttactgttcaacttagagaaaatacaaacttaaaaataattcatttcattttttattcactctgaacttttaaaaaaagctggtttgtgattttcattttcagtaaaacaaatctcattactttaaaaaaaatgcttgtattagatattatatatatgaaatattatactttacattcttataaaacatttataaagaatgatgatacaacagatttgcatacctaagtgtaagacttgaacaaaagactaaagacaggaaatacaggcctggcttggtgactcatgcctataaagccagcactttgggaggctgaggtgggaggatcaaatacatcaaaaaagtaaaatatgtagtatgtcaagcagtggtaactgctaatgaaaaaaagtaaataaagtgggcaaagggtggaataaaatgttggaaagagtgaccagaattgtaagtggtgtgaccagggaagccttccttgagaaggaggctactagcctgaagagtttttaaaaacgtaaccattagtttggaaggtctctgtgttactcccattctgtcactcattctctccctgcacaaggaactaacatcttcccgacttgtatctattattctttgcttttctttataattttcccacatttatatccctaagtgatatacatttttgttttacgcgtttttaaacttgatatacatagaattatattctggaatcatctgtgacttggtgattttgctttgtgtttgtgagactcgtatgttgcatggaggtataattcatttatgctcagcaatgcaggatgctgtggtgttgataaactagcctgctactcatggataattgggtagtttccagtgttttgtgctgtaattctcactactacccgaagcattttggtacgtgggtatatgtgtactgatggcacatatgcaatcgtttctttcttttttttttgagacagagtctccctctgtcacccaggctggtgtgcagtagtgcagtcttggctcactccaacctccacctcctgggttcaagcaattcttctgtctcagcctcccaagtagctgggactacaggtgcatgccaccacactcagctactttttctatttttagtagagatggggtttcactgtgttggccaggctggtctcaaactcctgacctcaaatgatccacccacctcagcctcccaaagtgctgggattacagatgtgagccaccatgcccggccatatgcaatagtttctttagggttttgtgcattgagtatgcagtgaatgagttcactttgttccacatcttcacttggatcttcttaatttttgccagtgtgaatagtgccctcattgttgtttcaatttgctttatcctgatattaatgaagtagaacatcttttcttatttattggctatttctcttcatcagccatttggtttccacctctgagaagtacctcttatagctttttgtgtgtttctctatgacatgggactgcaaaaatacatgaatttagtatgtgaatgatacaaattaagtatatgtcatttggcttttcaataaggcaagagggttaggtgtggacttttatgactcattcttgtagggcccaggcctttggggcttagcgggtgttctcccggtgtgcggagacgagagattgtaataaataaagacacaagacaaagagataaagagaaagcagctgggcctgggggaccactgccatcaagatgcggagaccggtagtggccccgaacggctgggcgcgctgagtacaagaccagggggcagggtaaggagggtgaatcttctaagtgattgacaaggtgaagcaagtcacgtgatcgtagaacaggggggcccttccctcttaggtagccgaagctgagagagagaaggcagcatacgtcagcgttttcttctatgcacttataagaaagatcaaagactttaagacttttactatttcttctaccgctatctactacgagcttcaaagaggaaccaggagttacgggaggaacatgaaagtggacaaggagcgtgaccgttgaagcacagcatcacagggaggggtttaggactccagatgactgcgggcagactgggataatatccagcctcccacaagaagctggtggagcagagtgttccctgactcctccaaggaaaagagactccgtttcgcggtctgctaagtaatgggtgtcttcgcagacactggcattaccgcttgaccaaggtgccctcatgcgggcgtgacagagggctcacctcttgccttctaggtcacttctcacaatgtcccttcagcacctgaccctatgcccgccggttattcctaggttatattagtaatgcaacaaagagtaatattaaaagctaatgattcataatgtttataatgattgataatgtccatgatcatctctatatctaatttgtattatgactattcttattctaactattttctttaatatactgaaacagtttgtgccttcagtctcttgcctcggcacctagataatctttcacgcacacgttctgactatgagctatgaatggaagtgactgtcaatgactctgaaggttctgagatttatgctacttgctggctgacaaatcagcctgcgacatttcatagatgctgatagaaaacatgagactccaggatcagagatgaaggacagtttattacagcagcagcagtggtcaggataccattgtctttgtaccatttccctgaacccagattcctctagggcaatgcaaagagacatgatacctgcacacataatgggttgcattataggagaggagctctgagtttagagaacctgagtctttttatactgtgcagtaatcgcacctgccctttgatctggagggagacactctaccaaggccatttactgtacaagcatctttgaaaaggtagttcagagcaaagaacaatcagtgtcttgctcacaagaagtggaaaaatgcaagagacctgggggtgaattgtctcctggtagtgatgtgtgtcacttttggtcagagatagctaagagcaagtgtgagccctctagtccctgccatgccccccttggaggttgtgtgtgacgctgatgctcctgtcagcatgagttccttctgaagagtggcagtgagcactgctacttgcaagctgtagtagactgggatctcagtgttgacttattgctaatgcgtagcccagcttatcctgatacatagtctgggaacatgaaggaccaccttctgtttatagaaccccatgtctgcttatagatttcagattttatagagattcattaggtttattctgtctactttcagtcctttcgcttataaactttcaatccaagcataaggtctttttcctgttacgctgtttgaactttgtttaaaaattgtggccaagcatggtggctcatgcctgtaatcccagctactcaggaggattgcttgagcccaggagttcaagaccagcctgggcaacagtgggaccccatctctacacacacacacacacacacacacacacacacacacacacacacacacacagtgggaccccatctctacacacacacacacacacacacacacgcacatatacacacagtgggaccccatctctgcgcgcacacacacacacacatacacacacacacacacacacacacacacacacacacacacacacactagcggagtatggtgacgcccacctatagacccaggtactcagaaggctaaggagtaaagatggcttgagcccaagagttcaaggctatagtgaggtatgattactccacttcactccagcctggggaacagagtgagaccccacctcaaaaaaatcaaaaaagcgaagatttaaaaattaaaataagattgttagccagttttttgtttaatgaaggaaaagttttccaaattaacagaatgggacattcagataaaatttgtgcctttatgacccaggaggatggcctgggtgtacatacaagtactcaggacaccacattctcacctttggtatctatccgttttattactctgccactcccaaacagtaatacataggattccgtgttagtttcctagggctgatgcaacagattagcacaaaccgggtggcttaaaataacagaaatgtgttccttcacagttctgggagccaggaatctaaaatcaaggtgtgggcagggttggcgcctccctagaggctcttagggagggtctgttctgtgcctctctcctggcttctagtagctcctggcagtccttgccttccttggcttgtggctatgtaattccagggtcttctgctgctgtcacatggccttcttccctatgactgtgtgtgttcattcacataaatccagcaccaccagtcatcagatttaaggctcaccctaatccagtgaaacctcatttaactcattatgtctgcaaagaccctatttccaaataaggtcacattctgaggttctgagtagatatgaattttgggatgacactattcaacccagtatgctatatagatctgaaagcctacttgacacacatgtaaagctaaaaagtgactgaggcaacttacctgaaaatatattttacaaacagagcattacttcttaggtctcatttgagtactaccatttatttccctagtattttcatacatcacctgtatgactgcagttcgtaccccatactcaaaaatgcaggaacactgatgatggctatgcctaattttcagaagacaaaagtgagcatagaaaggttaaaataactatcctatggtaataactggtagaaacaggatgcaaaaccagccctcaccaactttgaagtcaggctgttgaacatcagaggaccttgagaacaaattgcttgactgtggaatccagggagctctctgcagtaactgctaagtacaactgctcaggctgccataatgaaacaccattgaccgggtggcttaaacaacagatgtttatttctcacagttctagagcctgggaagtctaagtaaggtgccagcagattcagttcctggtgagggccctcttcctaggctgcaggcaaatgcctattctcccgtagcagagagagagtgcaaactctgatcttccttcctgttaagggcgctaatcccatcatggggccccaccctcatgacctcctctaatgaactctgaaaggctgcgtctccaaatactgtcacattgagggttaggcattcagcatatgaatttggacgttcagtccctaacatacatttggttggtaagctgcagatcccagaatttttccaggatatctgtgcccatttcaaattgcaaattgtctgggttttgtttgttttgtttgcatgttttggtgaagctgtgagtctgtgtacatcagatagtgtaagctcacaaagaaatcgaagagagctggtgttttacttaaccagaattccttacttgaactgtgcttcacaataagaataaatattttgttattaaagaatgcagaagttaccattttattgcaaatttttattataattaggttttaaagtactataataaggcaaacatatctcagtgagactgactttttttcccttataaaaacaatgtttgtatgaaagagaaaataagcttagactccattgaacagcttcttcatggctgcagtattggcattcacccaaggactcttgagaaacgatcaaattttcagtatctttgaagcttagccagagatctaatgaaaccaaatgatgctaaagttcttaaagctaatttaaatctcaaattatacattttaaattaagtttttattgataataaatatactttatttcatattacccttgaaagcttgagtgataatattagtagaataaacatgttttacaaagatttaccattaagaatgctattaatatgacccttgatacaccagcacaattagatttcaaagtaagcacttatgaagtaacagcgattaatgacaaccatcgaaaacaattttgaactccatcagtttaactcaggagggtaaacttaatatgataattcatctagttgaattgtatcagcttagcaggaaggtatgtaaatatgtgacccttacctagcttctaaatggatgctgtgctgatagatttatcagttccattaaagaactttggggaactttggagtttcagcaattgttcccttggaggctgaaaacccaacctgatctcatactgggaccattctggtctgcatatttccataatttgcctttgctactaatatgacagcaagacacaaataactgtttctaataatatcagatggagttgtggaggacagcattttaatgtagtaaaagacctccccgtggggttgttattgctactatagaacagcagctacacagttgcaactgtagtctcttaattgattcgtttaattagcaagagctgaagcttgggctgtatcttgtcatctgatatcataggactcgaaatttgcatcattcatatttatagatatgtaaacatcatcaaaaaggtcttctgcttctgaaaattcacttacagatatcaaattttaatagagcagactcccatttgtttgaaatttaactaattaaaaaatgaaaagaattaagtttgttactgtttttctttatctgtactcttgagaaataagtgatgtcatacatttttggttgtggatcatctcctaaacataaacttccagagaacttcttcagtcttccgtatctcataattccataagcagtccctcaactgacatgtctgacttaagttgatctctcctctctgtcccatccctttctctgtgtcagtgtgatttcaggaatgacatgatggcttactggggtttcttgcacacgtgtgctgtaactttccacctgtccctgcctgcctttgcagctgctccaagtcctgctagggtaggctgtctgcttgtgctgtggtttggtgggtcatctggctgagttggctcttggcagttacctgcctacccaagctgcattggtccccactttctctggaggggaaaagagaaacggatagaaagtatctggcatagaaaccagagcctttctagtctgtttaccctcaactccacagggcttcctccctgctcggtcacactctttgtattcctgacccttttctagtccaacaataggaagcaggtggcggtcacagagcagacactttgtggaggggtgatgaagttttctgatgttcagatatattttacagtgctaagaaaatctatagcattccttcctgcatttgcccctaaatatacaaaatttcaggcaaaatatgggtagaataagattttatgaaatggaatataaatgtagtcttaatcttgaacattgtttctgtggtaatgtgtgttctgtgtgccatgtaaccaagctaagaatgaacttttggaatataactacgtttttattcttttgaaattggcatgctctatataatataaaagtttggttattagtattgcagtgtgatgcattctgaacaaaaatttaaaagaaatcattgcctgcctgctatactatgtgctaggaagtgggttagttgaacatgacttggtccctacccttaagtagcacactggctggtgaagacagacaaactgataccatgcaaacatggtatcagtgctgagatgggtaatgcataggcttatatagtagcagagcgaattgtagatctgttagctttattatttgtttcttttattgataaacagtacagtccatagggcgtaggtctctggttaagaatttgcattttatttgtcaagtacacctcaataaacacagggaaaagaagaactgtatttcatatcttattagacattactttttgaaaatgagcacaaaacctagcatttaatggtagtcatgagagtcagtcagtcatcttacactggtgacagacactgaattctggcaattcaaaggaaacaaatatccctgcagtcattgggcccattgtcacctaaggatagagaaatgtaaatgactgattaccgtgataagaacgctaacagaggtgtatacgaagtagagggattctggggctgaggtgaagaaagtggagaaattgtgaacagtttttcagtgtttatagctcatgctgtgactttaaggatgaattgagtttgcaggagaaggcatttcagatagagggaacagtgagcctggagatagcaggttgtagaaactgcactctgtactgatgatggagaaagaggacggaatgaaattaataaaggcgcagaggtattaagatgtcccaagtgtttaaggaagagcagattggcttatgagggtgatgggcagggcaacaaagatccctttggaagatgaaattagtctgttgggggcaagatgacacaagaccattccaaggaggttgggtggcattccctagattctgaggttcattgaaggagttgaaagaagaatcataatctcatcagaggtggttggttttattggtgtggtttttttttttttttttttttttgacaacttatgggagtaggcaaagaaagaagagggtacatttgagagccacttctttagaatccagtgtacaattctatgtattgggcagaattgaagataattctgagatttctagaggtgataactgatgcagttagggaggaaaaacaggaagaagagaagaattgtaccagagaaaaggtggactctattaaaaagatggatttaaccaatttaagtttgaaatgccaagagacatctatgatataagggaaatttctggtctggagagcaagaagaagattaagagtgagcacgtaagttgatgccccagcagaggtgaggtcctaagccatgcagtagatgaacctgccaaagggacaatggcaaagcagaggccaggcccagaatggagctccaggaaatgcccacagctaaggtggaggcttgtcctctctaatggagtcacttacaaaatgatgacatgtttattattgaaatcatttatatatactattagaagccagttcattgtaacctcagttatgatttcacagtatcctagggtatcactaagttatttcaaagtatctcaggatctgttgccacctgccaaagatcttcaaagtaaaattaatatttataaataatgccttacgcgtgtatggtgctttagggctttagaatgattctacatatgtcagcttacttgattccattcaattgctaagatgaataagccatagcacaccttagagtgagtggtaaaaattagacatggaatacttcttgcagtgttttccatttaaaatatttgagattacaagttatgtgttcacaggaaattaccacgaaccactgccagattgctagtgaacaggatcgggcaggggtgggggaggaataagtagagtttgtcttcctgcatttgaatcgcagatcacctgtctcttagctttgtgaatttgaacaggttgcctaacctccctggtcctcaattttttcatcaacagaatagatattatctgcttttatggagatggcaagggctgaaaaagaaaacgtttgtaaaatgcctgaaaatagcaggcacttggcaaagaatagctcggtttttattgtagctccccactctccctttgcttcattttccctttcatttgtcttgcttggagacatgctatcatctgaagtgatagtctccaccgagtcttcaatttggtgcttggcctacagaaaaatccagagggaaaatattgttcccttttatttgaaaaaccaaatttgtgttaatcccctggttatgaccccttaacatagttaatgttttgtaagtgaatatggaatagaaagcacatacttaaatgtgtaccttgtggtggcagggtgcttaaaaacatctgtttccttgaagaatcttgcgaatcaccaacaccaaacttgaccagggaagaatttggtgccttgtgtttaaactgtgctgcttaaaatatattcagatggaaagaatggcaaaaccattctgatataggacattttatgacagtgcctatgagatgttctttcttctactggcctcacttttaaagggatatcattttaggtaggctgtttcagggcactgtcatatgttactgtggactatcgatctcttgtacctatgaattatttgattgtcactctttaatttatagtgagaaggaagtgggaatggcagctcttctcttatagaagaaaaatctgagtcagtggttctcaagttttatcatgcctgaggatgaccaggaaatcctggtgaaaatacagattcccagatctgttcctagaaaagctgaccccccatgtctgatgtcgaaatcggcttaaaatgcaccaggactagaatttgcaatatattttgaacattaatgtagaattactatctagtttggaaagtcaataccaaaagacacatgatattcctggccccatgagccaagcttaggagcagtgttctggatccttttcagaatgagaagataggacaaacatttgattatttgtgctaattaacatgtactttcataatacatacttttttaaaatcagggagtgacatgataggatctaaagtataattaggtccatagtgtcatcaactgtatcttttaagtttacttatcatctgtataattctttagattcagtctgagttatttcaagtcttatagacagtgataatttttatttttgccctagagcagggcagtgttatctgtttgggcagtattaacattttggacaattctctgttgtgggagactgccctatgcgtaataggatgtttagcagcatccttggcgtccaccaactagatgtcagaacatgtctccagatataacaactaaaattgtctccaaatattgccaaatggctgcacacagcttggttggggagagactccagaacagatgtgaaacttagtggctggaagcttacaaagtacacatgtcatgacctacttgaataccttatgcgaagaaaataaactttacccgtcctgatactggatttgctttaggaacatgtttagcgaatagctgtttggaagtgtgtaaggggtactttttctttatcttcctcatattggatcatgaaccaggtctaccatggacagccattcatggaatttagggcaaagtctagtttgtgtgattgcattgtgttcatttgggttctttttaccatttgagtagatgtactgttactgcttaccaaagacacattttgggtatacagtgcgtgtgcagctcaataccttattctagaagctgctgctcttcattttgtcttcagttttgtaaaagccccgtaatcctgctggtgagacatattagagtgtgataagcatcacttcacagtgacatctgtgaagttcttctgttctttttgcagctactatttaattgtttggctatttaatattttgtggcgcttccccccttgtgcaaggaagtatatggcaggatgcctgacaagacacgtaggaagccacacagtagtcagcatctcaagtgtgtgttcctgagaaatagccttcccaagccggcatatgttttgtatggtgtaaattctcaagattgtgaggggaacagctaaggtaattcctaaggtatccgtgttaattacctaaggtaattaccaagcatcagggaacatagcaacactgcaaagtcaaagtaccctcgtttgaaatagaatctctacctgatttaggggttagggaaagaattagtggataggttctaacaattacccttctgaggtcacgagtttgagaccagcctggccaacatggtgaaaccccatctctactaaaaatacaaaaattagctgggtgtggtggtttgtgcctgtagttccagctacttgggaggctgaggcaggagaattgcatgaacccaggaggcgggggttgcagtgagctgagattgcgccactgcactccagcctgggcgatagagggacagtccgtctcaaaaaacaaaacaaaacaaaacaaacacagttacctttacagttcaccatggccaaaagattgtaccactcctttcctgtctcagccactttttgagtgactgtaaagtaggttggccgggggacgatcgttgcttgctgagtgcctgtaggtacctagcaccgtatgtttgtcattctcattgaagtctcccctttgagatcaccagtagaatccccatgtttcagatgcagtaacacggacaggaagtaagggatttgctcagagtggtttatatcagaagagcagctgtaggaccaaacccagatctagtaacaaatgtggcttccttcacatgagcatctgggtggttgggagttagttattcctgactgttgggtggagagcaatttgatgggacaaaaccagttcttctgtgttgaggcttagacaccagccacttaacgggccagacagctgaggtccggatttctctgcttcctgagccagttactcttgtatagcgggggaggagtgggcacattctttttttgagatggagtcttgctctgttgcccaggctggagtgcagtggcacagtctcccctcactgcaagctctgcctcccgggttcaagctattcttctgcccagcctcttgagtagctgggactacaggtgcccgccaccattccagactaattttttgtatttttagtagacacggggtttcaccctgttagccaggatcgtcttgatctcctgacctcatgatccacccgccttggcctcccaaagtgctgggattacaggcgtgagccaccgcgcctggcatcaagtttgattgtgagagtgcagcaattcagtcacatgtccaagctccactcctagttcttttgctgttttccctacatctgcagttacttcttgaacccctcaaagtcacccatgagggttagaatccagttcttcaaactcttgttcatgttgataatttggcctcttcccatgtgaattcaacacaaatgttcttaatagcatctagagtggtgaagaaggttttcaatttactttgcccagatccatcagaggaaacactgtggcagctgtagtcttccaaatgtatttctgaaataataagacttaaaagctgaaacgactgcttgatccatgggctgcggaatggatgtcgtgttagcaggcacaaaaaccacattcatctccttgtatatctccgtcagagctcccaggtaacaaggtgcattgtcaatgagtagtaatatttttaaggaaatatttttttctgagcagtaggtctccacagcaggttttaaatattcagtaaaccatgccctaaacagatgtgctgtcatccaggctttgtttttgcgtcctagagtacaggtagggtagacttagcatcattcctaagggccctgggattttcagaatggtaagtgagcactggcttcaactaaaagtcagcagttgcattagcccttagcaagagagttggcctgtcctttgaagccagaggtttacttctcctctctagttgtgaaagttagatgacatcttcttccaacagaaggctgttttgtctacactgaaaatctgtagtttagtgtggccaccttcatcggtgatcttaactagaccttctgcgtgacttactgcagcttcttcatcagcacttggtactttgccttgcacttttatattatggagatagtttctttaaacctcatgaatcaacttctgctagcttcacacttttcttttgcagcttcctcgcctctctcatcctgtgtagaattgaagagagctagggccttgctctggagtaggctttggcttaagtgaatgttgtggctggtttgattgtctatggagaccactaaaacttaggctgggcacagtggttcacacctataatcccagcactttgggaggccgagaggggcggatcacttgaggtcaggagttcgagaccagcctggccaacatggtgaaactccatctctactaaaaatacaaaaattgagctgcaacaatagaaagatggtggagcaagaacaaagaaacaatccctttgactgggcgcggtggttcatgcctgtaatctcagcactttgggaggctgaggcgggtggatcacctgaggtcgggagttcgagagcagcctgaccaacatggagaaaccccgtctctactaaaaatacaaaactagccggacgtggtggcacattcctgtaatcccagctactagggaggctgaggcaggagaatcgcttgaacccaggagacggaggttgtggtgagcaaagattgcgccattgcactccagcctgggcaacaagagtgaaactccgtctcaaaaaaaaaaaaaaaagaatccctttggttccagaaaatctcctgaaaaagaggaaggcttattaagccttcagagctacccaggcaaagcaggtacttttggcaaagaggaacaaaggaaaggaaaagggctcaggtttaagggactggaatcctacatgattcctggcggcagaaacatgacaaggtgggtctcagacgactagaagtgaaacctcatgctttggaattgccagataaacattccttggcctttcttgtacgtatcaaaaggattgatggtgtggccgggcacggtggctcatgcttctaatatcagcactttgggaggccgaggcgggcggatcacaaggtgaagagttcaagaccagcctggccaacacagtgaaaccccatctctactaaaaatacagtattagctgggcgtggtggcaggcgcctgtagtctcagctactcactcgggaggttgaggcaggagaatcgcttgaaacccggaggctgaggttgcagtaagccgagatctcaccactgcactccagcctgggcgacagagttaggctctgtctcaaaaaaaaacaaacaaaacaaaacaaaacaaaaaaagtttgatggcgtgtgagtttactggtgcagaaaaccattgcaagattttgcctaaagaaagtttttagtggtgtctttgtaaaagtcaccccctgctgcatgtaatgggatcttatgtgacctggggatttccaaatctgaattttctctgggaactgattttgaaacgtggtcaaggtcaagaataagaccatccctctgacagacaacacagtggttgcggagcacctggggaagtatttccaggagacttcatggttcttgcgtcgtttccacctctcagtggcccatcatgctaccaaaaatagagtgggcttcctcgagatgggcacacctggctatcggggtgaacacgtcaatcagctcatccgccagctgaactagacccaggtgccaaactgcagtacatttttatcagtgaagtggaagcgtgtgttttgggtttttttggggaatttttatcaagtatcttcagagaagattatttcctgcttaatcttcaaaaactggaaaggaagggtcaaagaaaagacagtagcttatgtttatggcgggcacctctcatcacagtcattcccaaggaaaaattccagagttttctacattggcagctgcctcgtctaaatcaacacattccatgtgcatcttctatccttgggtttaatgttgctaaatgagtaactctagcatttgtacaagaccccctaagactctggcagcagtcgaccaagcccagggacataattgaatctggagattcctgaggccttgttttgaaaaagacttgaaatacacataggaagaaaggcccaaaaataaatgttcacttgtctctgcaaaaaaataaaaataaaaaataaaattaaattaaaaaataaaaatatgaaaactagctgggcatggtggcttacgcttgtagtcccagccactctactcgggaggctgaggcgggagaatcgcttgaacccgggaggcggaggttgcagtgagccaaggtcacaacactgcactccagcctgggcgacagagtgagactctgtctcaaaaaataaaaataaaaaaacttttcatatcagcaacaaggctatttcactttcctatcatccatgtgttcactggagcagcacttttaattttcttcaagacatttttcctttgcatttacaacttgagtaactgcacaagagacctagcttttggcctgtttcagctttccacatgctttctcagtaagcttaatcatttctagcttttgatttaaagtgagagacatgtgactcttcctttcacttgaacacttagaggccactgtagggttattaattggcttaatttcaatactgttgtgtcttggggaatagggaggcccaaggagagggagagagatgggggattggccagatagtggagcagtcagaacacacacaacgtttattatagtttaccatcgtacatgggcacagtttgtggttccccaaaacaatttcaatggtaacatcaaagatcagcgatgacagatcaccacaacagataacgacgaaaatgggtttcctaataatgcagaggtttgaaatactgcaagaattaccaaaatgagacacacagatgtgaagtaagcacatgctgttggaaaaaatggtggcaatagataaagggttgccacaaacctttaaattgtaaaaagtgcattatccttgaaacacaatagagtgaagcctaataaaatgaggtaggcctggattttttggatacttgatagtatctaagtttcttctcaaacacagcaaacatttcacagttcaaatttgcccatcggtagagttttctctgtggatcttctctgttaatgccacatctgtctagagtaaaagttcaattcaatattgtgctatcaacttagcaacttgttgaagatgaactaacataagtacatgctgtgtgtgtgttctgtgtgcagacacaacacaggtgagctttccgtaagcctggatcttcccaatggcggtgcttctcgtgtgcaggccaactagggagaaggggacactggggcccacccggagctctgtgggccttgtctcttgtgacaaggatattttgctccttagctcagcagagtccaggttcttgtctcaggactgggaagaagtaggcaggcggacacttggagagtgagtggagtagaatgcactaagggaaaggaaaacttaaaggaagggtcttgaaagcagattgtggttctcccttcacagtggaatacaagggcttttatatacctgctgatggggctgcgttccctatttctgtaagcgcgaattcctggcggctccacccgtccttccaatgcagacgtgggcccttagtctgagccactctacattgatttatttcccttactgcgcatgtgttaagggacagaacttttccaccgcaagcatgtttgggcaaggtccctgggcacgacgaccttggtgggtcagaggttctccggggaccctcccctgtctaccggggagagttctctgcttcctgcctccatctactccccagtctgcagtctggccctcggtggtcctgcagatctggtgttgattttgcagggtgtttggaaaggtacctgcgtattttcatttatggaagtgactgagtgccgacgaggagaggttaatgcccttgagaggagaatttattacttcatcacctaagagaagggggcacacccctccatgcagggcacaggggaaccaccagtgtgggtcaggaggcagaaaggagccagagaaaagtgtgggtgggaaccttagtggggcttcctcgggaaaggcagtgcgtggctggtttgaataatgatggtgggctttggggtggtctctatttgcctggtatctggccctgggatgttttaaggcagggaaaatactggcttggtgtgtgttagagaaaatgggcagctggcttacttccaagttctttactaaattgaggaattagctggtcttgggagaggcagtgtctttctgggtctgtaagtccctggaaaatgttaaagtatcataagataaaaaaaaaaaaaatttaaacctgattaatacactgtgaacctagaagtaaccagattttaggaaactgacctatagtgagcaaactcacagggattgatagctaagccagaatatgcatttattagcttgaggggaggaatgtttcttccagtgaccaaatctttaagtctgccctccagaatattgactaaatattctgccatctagaatggaataattaggaaactcattagtcaccttaatttcaaactagtttggtttatgtggtaatcagagcaaacggtgacgtggtgtacctgtgccgcgcagggacttggtgaattaatctcttctcccagaacgccccacaagggccaccgccgtgccttcccttttctttgcctctgcgctgctgttatcttcccacagaaaggccccctgcagtcgattaggcttcagctacctaaacaataggcacagacccaaacgatgtcaaactacagttttctcctgcccttagggtggcactcaggccactttgattggaattttgagtgtccccaaactctggttgtactctttcacagatgggcaattacagtactgctctgtggagttttaccagtatagctctcagaaattcctaagaattttctatttcttaggttacactctctatagtacatacactcagacagaaaaatatatttcacgaagagagccttgaaaaatctcatctctagtcccagtgatgccttaaactggttgtgtgaccttcgtaaacctcagttttctttgttgtaaaatgaaaggtcggggtcggtgacctctagagtctatcccacccctagcctgctccgagagtgattgcatttggcacaatatgcagtttgcttcgcagcagtagcaaaatgacacatgcaacttattatcatcattgtctatcttttgatttccttgagttttccagtctcattaggggagacatctctggcttatcgcacaatgacatcgtgtcttgtaacttaatttctggggacaacacattgtgctgccacaggcacagtgctaataatcaaggttgtctgttctgcttactgtgacttttttgtggtttctggagaaaaaatgcagatgcttttcaattattctaagggaattttgatgaaccccctgggtagagttccctgtgccacctgccatgagaagtgagttttatcgaacagaaggtagggaattgaattgctcatatttgttttctttctggtacctatagtattatttcaagctcaagcattttaataaatatttaataaatacctgtctaaaataggccaaaactgtcataaactaaacctcttttcttcttcaattttaaatgcaaatgagttaatttgacttttagtggaatttccaagataaaggcccatgtttttcctttatgtatccgaaagttatttttgatggtatagtgaacgtcctgcttactacacattttatgtattagcctttggaagcaaattccttaagtttattgcaacgttgctgcttttgttgccattcttataattttatgtatttactgtttctctctctctctctctctctctctctctgtctctgtctctgtctctgtctctctctcatattgagacaggatctcactctgtggcccaggctggagtgcagtggtacagtcatggctcactgcagcctcgacctcctgggctcaagtgatgctcccacctcagcttcccaggtagctgggactacaggaatgcgccaccatgcctggttaattttttaggtattttttgtagagaagggattttaccacgttgcccaggctggtctcgaactcctagtctcaagcgatcctcccaccttggcctcccaaagtgctaggtgtgagccactgtgcctggccgtatatgtccattttgcaggccagaattctttgactgtttgatttacagagaattttcaaatatctgcctctaaggacttttgtagcaattttattgagatacaattaacgtataattcacccacttaaaatgtaggatccagtgggttttgtttcttgtttttgttgtttcttttgttaagagataagcagcaaatacatttttagtataattatgtttcattcaatatttgggacatatgctaacacttgttattattagcattattattagcattattattcaagctgaggtctcattctgttgcccaggctggagtgcagtggcttggtcacagctcattgcagccttgaactcttgggctcaagtggtcctcctgcttcagcctcccaagtaagtgggattataggtgcaagccacagcacccagcgattcactggtttttagactgtccacagagctgtgctgccatcactgtaatattttaaaacattttcatcaccccaaaaagaagccccctacccattagcattcactcctcaccccttccacccctcccgcctgtggtagccactgatctactttctgtctgtgtatagcttattctggacatttcttaggaaaggaatcatacagtatgtcgtcttttgtggctttcacttacatactggtatccacattgtagcacatgccagtacatcattcctgtgtatgggcaaataacatcccattgtatggatataccttaacattttatttacctgtcagttggtgggtgttggttcctgtcttttcggctactgtgaataatgctgttatgaacattcatgtacgagtttttggggcgacaaggttttaatttttcttgggtgtatacctagaagtggaatttccaggtggtgtagtaactctatgtttaactttatgaggaattctcacactgttttccaaagtggctgcaccattttaccctcccaccagcaatgggagcgatccagttcttcccacatcctcactgacactcgttattgtcttttttattatggtcatcatagtggctatgaagacaggcttgtttttaaatattctctatgtagtattctgctttcttccctagaaatcataattaatgcagaagtagcccaaattgtgtatgttaatttgttttatttttttaaaacaaacttgaccccccaaaagcaacaaagcacatacatttcagttaatatatattttctaggacgttattgtctcttctcaaatgagatgatttcgatatgaagcacagagttcctttcattttcctatgctcattctctctctttttaatggtatcacatactgtgcaggaaggtcattatataaggagaggaaaaaagaataatcagcatagaagagaaaattaatgctgtttgtgtaatttttaataggaatgttgtaaaattttgagatttaaaccaactactaatattttttatacattactgggcagtttcctcttgttgcctgtgaactgatactttgccttggaaactcagatagtaaaaatatttgtcaaagcttcaaataccagtgttttaattccttagtcatttagatattaatcctgttctggagaccacctacatgtgtttgtaagggatgtgataactgacactgtatttaattagcactaatattgtgaaaaaagcaaaacatattaagtatctttccaagtcactagtttgaaattagcagaagtgaggaagagaaagtcctgtccaccccccacccttagtttgcatacccatggaagtttgtgatccatttactcattcatttatccaagtatttgataggtacatattttgtggtggacaacattccaggtattgtggaaatggaccaatttcaataggacagaaatctgaatcacaaataagcatccagtggcaaccagctggtgtacacactgcacctaaatacaaattcataggtatcaaaatcaccttcatgtgtcacacagtcacctttcttagttcctcatagcaaaactgggggactctgaggtcagtccccagagtacctggttgaggggtggggcagggcagttgaataagggagtagaatgaatgaaaactttagactctgaagctcgtcactttattctgccatattttagttttgtggtattaaatctctacagaaattaattatcttgcttcctttcttgaattccttttcaaatgttatagttactacttcagtaattctatcccatctgtttatatacaaaaggtaatttaccgggtaatgaccgagggcacctgctttaaagtcaagtgcatactaatttactggctatttgcttggcctcatttacgctctctcggcacagtttctgggtctgtaaaatgagagtgattgtaccatctacctcattggcgacagtgagaattaaatgagttggtgcatgcataacacttagtacagttcctggcacaatgttaccactcaataactagcagtgtggaaatatttcacacctaagagtaaagttttatttacctttaggagacaggatcctgggaactttctggttgccatagctgcttcctcaaggcaactaagttagatgtggagtttctaattcctgttggaaattcagtgaataagaaaatactactgaaagttatactattttctgcatgttaatgatttgatattatacagctttaagttctcagtgctcattcgggtagtgcaggtgagagacggcggctttaggggcaaggcagtgaccctgtggatgatgggaagagagttgttaagaaataattgtttaaatcatccagagagtactgtagcaaggattgttcctaaaaagaactgtggtaatccttgttgaatagcaagtttggacagtatacggtagggaaatctcaggaatactataaacaaataaaatgatggggtgagccctatgaagcgtgtgttctcctgtgggcagtggcagagttacccttcacccctgagtcctgatttctcagcctcttcatgtgactgtctccttggctcctgggaaagaaagaagcctctaccttccctggattgaatgcagcccttcttgtcccgtctgcagagcatgaggaacagctggccacctgcacctgacaaggcctgtggccgcgggcagtacccagccctgcgctgacggccgctccaggttgttgctggatgtggcgagctcgagctaatcgggccttttaggcttttgtttcttagcaaatgatcagctgtgaactgcccttggcctaacttggccttgttagctcagaagcccgcaattcattgcattttaccctgaagaggaatggtaggtctgaggacatatttatttttctgtggattttttttccccttgatccaggaaattgtctgtcttcaacaacctagtcttgtctcctccagagaaaagttttgaatcctctgaggagcggtctgtcgccattgtggcctgtggtcagtgggtcagaccagagccctgacaactgtctcccttcctgggcccaagtggacaccagaggagtttggggctctgggatcagcctgctctggcgagtgtcctttccctcccactctggaactgtagcttctcagccctcttcttgatgctgggcgggtgcctgggaggccccaccccttccctgggtacctggggaggtccccgactgagaggtgggaagacctgtgtcccctcccccagcacactctcagcctctgacttagttctcataggaggaggcaacagcttccaggagctgctgctgttaccctcgacgccatgatgaggaggaaattgcctggtcaggagggctcgcctgcctcttcacagccaggcgtactgtagcggcctcaggagcggtcaccctgggagtgactcctcacctcctaagcagccctggggcatgaacactcgtcctggaaatcctgctaggctggcttaagggagttgcttctagcatgcctttctggataagcctagtagaattgctttttctactataaaaaggaaagaatggggctcctcatattatagtaacagaattcttggtactagaactggtaagccaagagaaatggaagctgaccaacttttctctctgcacagggttcagagggatagaaacacacaatttgactctgcatgcaccagaaccttctcactcagggtaagggacagccacagtttctgggacgttacctaaaaacacaataatcccacttattctctgacagataatcatcagtcatagccccactactcacttttattaaagaaatagctgggcccttttaggtaaagccctttatatactgggaaaaaaggtcatgttatccattcctcaaatcccaggtaaactcctgctggttactcaaaaataaaaaccaaaatgaaagcccattcatcacagggatgcctaatcttgtaatgagggaatcactgagtgtggcacagggaagactcctgagagattctgatggggtacaagtgtgctgaccaacgtcctagatacagtgggcccttgaacaatatgggggctagggatatcaaccctgtgcagtcagaaatctacggataccttctgactctcccagaatgtaactgctagtagcctactgctgaccagaagtcctaccaataacatacagtcatttagcacgtatttggtatgttacatgattatatactgtattcctgcaataaagtaagctagagaaagtgttaggaaaatcataacgacaaaatatatttattattcattaagtggaagtggatcatcttaaagatcttgatcttcattgtcttcacgttgagttggctgaggaggagggggcttgatcttgctgtctcaagagcagcggagtcataagaaaatgcacatttaagtggccccatgcagttcaaatccatgttgctcaaggctcaactgtacaccgaactgaaaaatgattccatttttagtaggaaatggcctactctaagtcctactgcttccctttgcacttgatggcaagggtctttaactgtgtcagtggagctggtttggctccactgatagagactccctgaccatctgataggccacttttgttagaggagaaggtacccccttgcctacctgttcttttcttacttcatgggtcttgattcctgactcaggagcacccattacagaaaagccctgggactagatctaattttatttaatgaaaaacctatggagcatttactcttgcttctaataaattaacaagtcagggctttcttctgaataggagggtctcttgactctttgatatttgacttttgaaccagactagatgaggcagagcttcagcacatattttaccagtgtcttcagcaaatgcctttctctttgcaaagctccatattactaccaaaaattaacccaactaaattgtaatttctactcacccacatttattgagtactgtgtttccttgaaagatctcaaacaaggcaccttcttgcaagatcttcaccaccagaccttcatgatagtcacctcctcattaggctgagacgcatacacagtgattacgttcagacacagggactcctgtgtcttaagaccttgtgtgacccttgtaattaaagcattacactttgcaaaggctgacagtggtataggggctgtctgaaactattcagccatagcctggtctctgctttctttttacaaatgggaggttggctaaggcagacacagggatggctaagagggataaaggacgtgacttccatagaaccttttgttcctagaggaacctctccatgaaacacacagtgaaactagattaaaccaaaaaacgccctcagctccagcagatcctgagctacaaagcacctcttccctaccgagccttctcacccatgcgcactgagtttctgagtatcagaaagtcaggtttctgaatccctagagaaagtaaaaatttccttggacacaatgggttttctttgcttcctgcatgacagtcacgaaggggaatctgaaatagagaacttgaatatgcggcttgctgaagggaagtgtactgtacagtagccccccttctccacgggggatccatgtcaaaatccccaggggatgcctaagactgcggatgggaccgaaccctgtatacgcttgcctttaatgccttttccatttcagctcggcacttagcccacactgtggctgtaacttttgtagttttaggtacagcagcaaaactagcacaaatttctttgtcctttttcacaatttcatggatagaagattgattcttactgtagatcttagcaatctcagcatacttttttttttcttgagaactttcaccttttaactaaaggaaggacttcatggctggtttttggcatatccagattgccagcatcatactcttggaactttgaggccattgtgaagtcaaataatagttcctgccaggcacagtggctcacacctgtaatcccagcattttgggagtccaaggcaggtggatcacttgagctcgggagtttgagactagcctgggcaacatggcaaaactctgcctctacaaaaaacacaaaaattcaccggtcacggtggcacatacctgtagtcccagctactcggcaggctgaggtgggagcatggcttaagcccaggaggtggaggttacagcgagccaagatcatgccactgcactccagcctgggcgacagagccagcctctgtctcaaaaataaaaaaggaacctaagcactgagaccccctgacagtagatctggtaactgagatggccactaagtgactggttggtggtgggggtgtctacagcgtggagatgctggaccccgagagagagggtttatgacccaggcaggatggagcaggacagcacaagatctcctcacactactcagaatgactcacaatttaaaacttatacattgtttatttctggaattttccatataatgtttctggaccatggttgaccacaggtaaatgaaaccttggaaagctaaaaccttggataaggggggactactgtaatataaagtttacagttcctggggtgaaagctcaggcagaccctatctatgcattattacaacgtaccatcaattcaaaaccataaatttgcagaaacatcgttgctttaattcctaaaatattgaatatgaataataaaaataatatatgctttgtcttagaagcacctttttaatatgattgatgtgtattgatctgtttcttcattctaacatgaacatttctgtaacagtcatttcccctgaaatatctaacctgtgggtacctgagacagcttgtcagttaggaagaacagtggtggcgatagccacgtagggctggtttggtcgtgagtgcaagtgtggttgcagcagctagagcagaggactgtgtggagaacatgggtcaggtcagaaggcagtagccaggagggatgcagagtcgagagagaatttgttgattggaatgactcaggttgactttcaggatgaagagaaggggccaatagagagggaagagaggacagttgatgaggcaggctccaagagaggagggcaaagcgagatcaggggctccagtgaaatgcctgagtgtgatgagaagagcgctgtcttgtgaggctagagagggaaccaaggatgggtgggcctgggaaggctggagaggtagcctgtcagggagctgctaacccacttagaaatactcttattgacataacaaggttttttgttttggttttttgtttgtttgttttgagagagcgttcgctcgttccccaagctgaaatgcaatggtgcagtctcagctcactgaaacctccacctcctgggttcaagcgattctcctgcctcagcctcccgagttgctgggattacaggtgcatgccacgggtgcagtggctcacgcctgtaatcccagcactttgggaggtcggggcgggcggatcatttgaggtcaggagttcaagaccagcctggctaacatggatataacaaaattttctatttcaaaagttcagtcgtgggcacaagttgattttgccttacagtcttgatagtgaaggtgcatactatttttaaagctgtattccttagatactaccatattatctaatgtttctaataatggaattagcaaaaaatgactacatcatccaaatttgactttgtactaacatacttggcgtactccatatccctgaaggttaacaagagataaatttggcctagactggtcttttcctgaattcatcacttaaaaaaggaaaaaaagaatggggaggaaaagccacgttttacttttataatttttattccatcattaaaagtacaacttgctttatgatctgaagaaataccatctaagtctttctattaggaacaaaagtgagcctttcagggaaaaaaaaaaaaggagctgggcttaatctgcattagccctttgatgtattcccagattttaaaaagcttcccactgttctcagccacgttgaaacagacccagccatgtgtccggcgctgtccttttctcctctcagcacacacttagccggagacaccttttggccaatgggccaggattcttccattgcatcttcagcatgtgaccgtttgtgctggctcattgggagttctgctgctcagtactccttccccaggcaaagactcttaagttaataattggttcagaagaataaactataccgccctcttggtcttcttttggacatttctttaagatgaggctcttactggtatatctggggtactttattgagaaatagaaagtgctagctgaaataaggcgtatcagtctagagttaggaagtgagaaatgcaatcggtaaattttgcttttaaataaaaatggaagccccattttaattgttgccatttctagtcattttatcatttttaacagcctggttttctattttagagaagttgctgaccaatatttagagagcacctccctaatctgcacatcctcttgtgtgtgatggtgaagtgatgggttggaatcgtttttaatgctgtttccattgatgggacattattaccagaaggagtgctttgtgccagctggtttcatggatggaggaaaacaatctgggtttcagtttcacaaatagaaaaacaaaacctgagaggaaaaggaagtaattcgttagcagtggccactgtgcagagtaggataacctgccttcaaagatttttgtttcatgcactataatataatgtttaataaatactttacttcaaagaacctcactacaagaaaactggccgctttcctgctattcttgttctccggctcagtatgactataagtagctcatatccggtcctctgtggtctcaggtggtcgtttgtgtttatgatccttaagctgaaactgtaaggactgtgtccctattttaagtctttagcagatccaccgtgttctgcaggaattgacagaggctctcgtgaaacccttgacactttgacccatcttgaggaaaatgcttagatgctaaaagcagtgtgcatagggattacgtcctccaaaaatagaaaactctaaatttactaagcagggagtagagaaactcatcagactgcacctcaagtttttgatgtgttctggtcgcctctgcactcccattctagacttctaaacaacacgttcaggatctctgagataaaagctggactgaagttacagaaagagcattagagatgtttgaatttttcttttttcccccctgtagatatatttggcatatgtagaatttgagagtccactattgataccagtttcttccagatattaacacatatcaaatagacagctagaactcagaagaaactaatggagctctgaaagaaaccattgttttttccactataaatcttaactcaacagcatttagggtctgggtggagccagtcacctgggcagctgcttcacacccattttgaattagctgcccagtgcttctggtgagcacctcggtaggagccactgctgtgaactcttttgcaagttctggtggtgactggtttggtttttattgctccctgtttgatgcactgataggacctagggctgttcttagaaatataggcctgagacgacttaaatttcacactggttttgtcttccgtttccacattcctctcactgactctccctcccttcctgccctctctctctctctcatatgaaatgagtttaaaatcagaggggaaggattgctttaatatttagcagtctaaacagagggggacagggctgaagaggaggaagggagtgaatgggtgtagaagagaaaagctgttcccaccccattgctttaatgacagtggaaagggtgcatggattgggcctgtgtttctctatcagctactttgttctttaaagcactggctagctaagccatctctttctctcccatattttgcctctttgagtgtttgcctagaaccacttagctgtggcagccctgctgatggggcaaggtgctctgcaagtttctaggcaaggtttctggatccatgttgaaattgaacgcagatagcacaaccatattataacagctacttacaaaccagtcagcacatgtgtggtgagcatttctagagttgagttattgcttaggtcaattgtaagaggagtttctctgaaagagttctgctctttgaactggcaaccccaactctagaacttacagaattgtttttgttaatttttctggcaagagattcatccaagtttcctaaacgtactacaagggtatatgtatacagagaccttaaggaatggccagccatgcaaaccctagggaacatcttatctgacagttcttgggatccacagtggcttgggtcataatgataatactgtaactgggagagctgatgtatatggagcactcagtatgtgtgaggcaccatagattctctcttcatttaatcttctcatgagaaatacagacgttaaataattttcccagggtcacataagctggtactaggaatgaggcttaaagcagggctctctaagaacaaaagctgtgatgccttagcatcattgacagcagctcccaggtcttactcatcctagtgcagtcccgttagtctacctgagctccccctaacacaggagttggcctctgcccactggggctttcattcccactaccacccacagtttctgcatatggcaggtcggagcccatcgtagtgtcatgagccattctctaaaccaccgtctgcctgaaaactgcctcattctctgtcattcctgaaggaaggactctggctggcccatctcatctttactcacctaggtgttcaatggatcactgggtaatctgagggttgatgttcttctttagtctatcaaccaatcccagagatgggaggcagggcttacataacactgtaaatactgccacctgggatgacttctgcgggagaagtactgagacccaagtccaccatgggaactaactggataagtttccgaagatttatgtcagtaacattcaccaccgtgtcctttgtattcacaaaataattagaaactacctgactgtccatcaataggagtttagttaaagaagttttgttgttccatatggcagaatattcatatgcagccattaaaatagtgatcaggtaaatgtttacaaacatggaaagatgcaatatgaactatattgtaacatgaaaaaataaagttaaaatggcccgtgtaggatattgctttgttttacaaacacaaagttgaggctgggtgcagtggcttatgcctataatcccagcactttgggaggccaaggcaggatgatcacttgagcccaggagtttgcgactagactgggcaacctagtgagacctcatctctgcaaaaaattcaaaaagtacaataagccaggtgtgatgatacatgcccatgaccccagctactcaagaggccgtggtggcaggatcgcttgagcccaggaagtcaaggctgcagtgagctgtgatcgtaccactgcactccagcttgggtgacagagcagagagactctgtttcaaaaacaaaaagcccccacaaacatgaaaggcttaatccaggactagtaatagttgccgaacttgagcggaattgtcttcatgctcttatgttagcatctgatattttataatgagcatatcccttatagattcagcaatatatttgaaaaatacaccaaggtaaaggagttgtgctaattaaaagtagctgaaatgaaaaatattgattattgaggaagaaaaacaatgaaagtaagacatagaggcctcagcagtattactgataactcaatcattgttacctgtataatagaacaaattaagggcagaggttctgaactgaagcagtgttattactaaggtgcttgaaggggggaacccacatttctttaatagcaacactccaggtttctaacatctggaagtatcacaccatgaattttttttaacccagaaaaactgggaaaaacttcaaatcactgaatgacgtgttaaccaagtttctgactttaagactttaagattattgactctgaatttacatagaattctaagaatttcagttagttgattgtgtgtgtggtgtgatgtttaaaataagtttgggaaatgctgggttaaattaatattttttatttcaggatgtctcaaaatctttactaagtggatgtctgttttgaatctccaagatggaatatagaatgcagcatttctcaaatggaatttgaccactgagtccttgttttctttgggcatgtactaagtagcctttcccagagctcattttgtgggataccataggaaatgctgcgatgggaccttttaattaatttattttttgagacagggtctccctctgtcacccaggctggagtgcagtggcaggatcatagctcactacagcctcaaaactcctgggctcaagcgatcctcctatctcagttcactaagcagctgggactaccgaagcacaccaccacagcctgctaattaaaataaaaaaaaaatgtagaaacaaggtgccactatgttgcctgggctggtgttgaactcctaggctcaagtgatcctcctgcctctgtctcccaaagtgctgggattacaggtatggccactgtgcccagccatatatgtatatatatatattttttaatgaagccacaagcattctgcctctgtgctttttatttatttatttatttatttttgagacggaggttcgctctggttgcccaggcaggagtgcaatggcacaatctcggctcaccgcaacctctgccccccaggttcaagtgattctcatgtctcagcctcccgagtagctgggattacaggcatgcgccaccatgcacggctaattttgcatttttagtagagacagggtttctccatgttggttgggctggtcttgaagtcccgacctcaggtgatccacccgcctcggcttcccaaagtgctaggatttacaggtgtgagccggccgaccctatatattttttaaaagcttttaagaaacacagtaatctttgagttgagattttgaaaaaaattgcaaaaatattgcacattagcattttaaagttagtggaggctgggcatagtggctcacacctgtaatcccaataccttggaggctgaggctggagggtcgcatgagctcaggagtttgagaccagcctgggcaacaacatagtggtatcctgtatctacaagttttgtttttttgttttgttttttttttgttttttttttttaattagctggtgtggtggtgcatacctataatccagctactcaggaggctaaggcaggaggatcacttgagcccaggagtttgagcctgcagtgagctaggatcgcatcactgcactgcaatctgggcagcagagcgagaccctccctcacaaataaagttagtggaaagtgctatagtaaacttttcccagttttcccctaatctgttttaccatgggccactcccttacccccacttttattttttttcacattagctattaacatgccctgaaagtaatgttccttagaattccatcaggcaacactactctagatcagatctgcaaactacaccccaccaactgtttttgaaaataaagttttggctgggtgcggtggctcacgcctgtaatcccagcactttgggaggccgaggcaggcggatcaccaggtcaggagatcgagaccatcctggctaacatggtgaaaccccgtctctactaaaaatacaaaaaaaaattagccaggcgtggtggcgagcacctgtagtcccagctactcgggaggctgaggcaggagaatggcgtgaacccgggaggcggagcttgcagtgagccgagattgcaccactgcactccagcctgggcgacagagcgagactccgtctcaaaaaaaaaaaagttttatcggaacacagccatgctcattcctgtatgtactgtcagtggctgctttcacgtgactgaagcggaactgacagtgtaacatgcaaaacaggtaagaaaagattgaccatctagcccattgtagaagaaagtttgcccacctctgacctagatgattagtcataggtagttgcatttgcaaattgactaattttctttttacactccagcatgaatacatgcaattgaacagctaatataggtgtgtgtatgtgtgtgcacatatgtatactaaaatattgtaaaatgtcaagtgttgcaaataacattgttaactgaaagtgacggaatggccggccaaatttatatttattgtgtcaaaaacaaaatgtaccagacaattaagataattttacccaggccactgcagtaggggtaacgtttattaatgagaaatgtctcagagagaggaagaactagggttttataaatgcaggtgaacaagggaggggtccaagaattacggggttcatgaagaagagtggaagtctatggggaaggttgctttgcctccagccatttcctgggttaagaaagaggaggaagattctgtaactgtttctgtgttctaggagcacggggctcagggaaagttcagcattgtcagttgtcaacaaaatcagtaagtgttattaaataccccatggtgtgtggttctggcactgaaatggggctgtttcctaaggctctgtccatggccacctctgtctatttctgcattctgtcttgcattgcttctgttgcctatatcctggtcagcacagtttatggtgaatcattgcttattgaaatagagacggcaataatgaagccagctattataaattagagcaaatatacacatccaatacgttttaaacgcatgtgatctctggagtagtatcactaggtagcttccatttcagttcgcctttggtatattactgtactccaaagaatatcatttttccctctgtaaaattttcctcatgaaaatggtcaccataggtctgatttactttttggatcagtaacaggtcacagcataaatcccattcctgcatcaaggcggaacaagaccctcacactttggagggagctgagttcctgtttagaagaacatgcacagttagataaatctgttcacacggcttagatgatcagagccaacatctgatgactatgagcaaggcacttttctaaacatttttagtattttctgaacagttttgttgaggtatactttacagataacattcacctcttgagctgcagttcaatgagttctcgtaaactgagttgtgcagccatcaccacgttccagttttagcacatttccatcaccccaaaagttcctttctgcctgtttgcagccaatccctgctccctggccagccacaggcaagcgctgtcaatgtttggacagtgttggattacctaatggactcttcaagacagtcctttggggtgttactgtcattctctgttttacacggtgaagaagtgaggcactgagggcactcagggtggtttcaaatgaccgaggccaggtgctcagggcccagaaccctcttaccccctccaacttcagtgagcttcaaaatcacctgctgagcttgtttgaccacagacttgtgggctccacccttgaattcctgacgccctaggtctgggatggggcttgacaatttgcatttgtaaaaagttcctgaatgctgctgctgctgctggtcagggaaccctgctttaagacctcctggtttatgcaatttcaaacattgtaagaaatagtcactcatgtgattggtttgtgtgcttggtgtagactgtacgaggatttttcaaaagtaagtattgttcattctaaaggaaggaaatgtatgttatgagatagaattatataataaacagaaccattaaatgccatctgaaaagtggtgttttcaatggcaggaagtagcattgctgcgtattttgtgtgtgtgcgcaactcagctttgtgtcattgtgtaactttaatttgaaagaacatcacgtgactgctgttttcatttctgccttttaaaaagcagacagctattcagaacagcaagaagcagacccaaactttgtttgtatgcccctagtcataggcaaaaatggaaagggtaatttaccaaaaaagaagaaaatagataaaaaggaaaagaatggaaagaaagtactgactcactgcaaacagctgcaaaatgttgcccttgggatagaggttaactcggttgtgaaataatggccaaagcggtgcactcttaataacttttttgtagccctggagaaagcttctggattgactgtgagaagcttggcagaaggtgctgcggcctggtggctggctcagcaggaggcctgggattgaaagctctcggtttgtacaagctcttttggatttgtaacacttttattttaaatctccaataaatgtaaatattttggtccctttttttctctattttttaaaataaaaatattttagtgaatatgagttaaatgagaatcaagtggcttctgggcctccctgaaagatcaagtggaagcactggatgactctaatgatgccgaattgtaatccataaagcacctgggcagagttcaatcagaggtcccatttcagaagttttttggaatgtagggaaagaattacttagaaaaggttcatctacttggagaggagatggttcaatatgacttttagaagaagccgcagtccctgccccacaggggctgcttagattgcttagatggattgtcatctctctctctttttttttttgggacggagtctcgctttgtcgtccaggctggagtgcagtggcatgatctcggctcactgcaagctccacctcccaggttcacgccattctcctgcccctgcctcccgagtagctgggactacaggtgcccgccaccatgcctggctaattttttgtatttttagtagagacagggtttcactgtgttagccaggatggtttcgatctcctgaccttgtgatccacctgcctcagcctcccaaagtgctaggattacaggcgtgagccgccgagcccggtggactgtcttctctctaagcagtaagagacagtgggaactgcagaagggtgtttgcagcctcatgcagttgactgaatgaattggccccagagtcacccctagcaccatcttgatatggacaggaggcagggaaatactgggtagaagagggtggttccccagcaaaggccccaccctcaagcctggaaatccggagccctaaatgggaacaggcattcccgtttttgtgcccaaatgttgccttttggctcaccacgcccccctctcctgtatccatataaaccccaaaccccaggctccacaagcagaagagtggcagagcagtgcagcagagaaggagaaaagaaaaggtgcttctgaacattgagaggagttcggctggggaaggtagcagagatcagctatgggatgaccaaactccaggggaaagatcatcttcccactctgtcccctttccagctccgcatctctcaccgagagccatctccatcactcagtaaaatcctcacattcaccatccttcaagtctgggtgacctgattcttcctgaatgctggacaaagacttgggtaccaagagggcagggcttacagggctgtcacccttattctccgctgagctgttttaacacgtagccatccgcagatggcagcttctaaaagagcattaattgtaacagacccccagacactaccatggggccagagcccaaaagtgctcaccccagctcctacacctgcccctgcccatctgcgtgctctccctcccataaggggtttgagcacgtgtcggccaagcaaacgagcttcacccctgtcacaagtcctgagaggagtcagggaactctcccatttcattctgacacaggtgggactcagcattctcagaccttcaaaggcctgttgggtggatgtggaggtgtgcgctgccccaccaagctgatgcctgatcaggggaggccactagaatagtctcttgtacagcaacagagcctcttactacagtgagcttctcctggggctttcagagtacgtccgagctccacaccaagaagagagccaacccacgtggatgcagctcggttcttagggctgacttgaaacttgataagactgcctcaagcatgtgccacaaccccagttcttgcaaacccccacagagtcttgagaaatccctcttgtggtccaaattggggaaatatagaattagtcaaaagaaaaggctgaagtcttggtcatctacatgcttgcaaattccagccttcctggcctgtgagtgttgcatgaatatagcaggaagtcagcactctccatctttcacaaaacgtgatgtgtttcagtccgtgcccggtgaacactattctccacctccctccctcccaacttgcttgctttcagcttctctttaaagtacaccttaaaattcaatctatcattcagacatagagagcagtggcatatgagaagcaaacatttggctgggcgcggtggctcacgcctgtaatctcagcactttgggaggccgaggtgggcagattacgaggtcaggagctggtgaccatcctggccaacatggtgaaaccccatctctactaaaaatacaaaaatcagctgggtgtggtggtgcacgcctgtaatcccagctactcaggaggctgaggcgggagaagggcttgaaaccaggaggtggagattacagtgagctgagatcatgccactgtactccagcctggtgacagaggagactctgtctcaaaaaataaataaataaataaataaataaagggcaaacttttaccaagttctcatctcttaagccattgtttgtttaatggagtagtagatgatgtgggttgttatctaacaagaacattgtcccttgtgggactgcacttagcattcaccttcggatgccatggctaggtcaggatgccagcctaagcagtcttgactttagatttgaaattccggccgggtacggtggctcacgcctgtaatcccagcactttgggaggccgaggcaggtggatcacctgaggtcgggagtttgagaccagcctgaccaacatggagaaaccctgcctctactgaaaatacaaaattagccaggcgtggtggtgcacgcctgtaatcccagctactcgggaggctgaggcaggagaatgggtttaacccgggaggcggagtttgcggtgagccgagatcgcgctattgcactctagcctgggcaacaagagcaaaactcaaaaaaaaaaaaaaattttgtaattccttcaacacattataacatgacaagtgcttcttgccttatctactagtgaagactctgcccggcccgctggcttcctaacagtcctgtggcggtctgttctttcctgtgtacactccttaaattgtgacatccctacttctggaaagctcaccatttcctatacccctatttgatttattttatcccaagacttatctcaaatcctccctgctcccaaaatcctcctctcactgccttagttctccctctgaaattccatagcatttcattttctcaacacagactcagagaaatttgctggtaggagggaccttagaggtgcgattctcaaccggggcagtattgcccccgggcatattcggcaatgtctggagacatacttggttgtcacagctgggagggagtgctatggcatctagtgtgtggaagcccgagaccccgctaaccgtcccacccaacacaggacaactccaaaacaaagattaatccaggctttcggctgctgttgggaaacttgtccacattaccaccacatacctggttccacaatttacctctacatgtgcatgttcctgagtaattgcacactttgtaatgtctcgtagcccctatagctagtctagttaatttctggtcatcatggaaaatgccacctctctgaaatggccagcactggagagacgctactgctgctgatggtgaatgtcaggggactactaggtgtcccttctatttttgttaacttgtagttatttgtaggatgattgcctttagtgcagaaaattttttttaagtttataaagcttgtgagaaaaatccttatttgtaaagaagctcagtattattttgaatgttcttgcttctcatttatgactactcaataaagaaaataccttttcctgctctgctgtccagtttgttgggttaatttgggagatagtgtcagcaccctggaattgtgccaacttccaattatcactctgtgtaaccactgacttcaatttcaaagtaattactgcagatttttctcactaccctgaacatagcctacacgcttttaatcctacacttatttttttccccatctaaaaggaaaacttattttgattttgatactttttaattttttaaaacttattttgaaataacttagacttgggaaaagttgcaaaacaataatacaaagaatgtccagataatttcacccagagtccgcaaatgttaacattttatcagggttgatttattgtgtattcctctctttctctctctctctctctcttcccacctccaccatctatatatgtaaataattggtatcttctgaaccatttcagcaaattgctaacagttcttaagtgtgtatttcatcgacacaggacaacattcccttatggaactgcaatgcagtactgttaccacaattaggaaactgacattgaaacagcaccattgtcttatctacaaacctttcaaattttgccagttttcctactctttaaaatgttttcaaattgttgccagtttactcactacaaaaaatactgtctttaaagcaaaagaaaaagaagtgttattttctggcccaggatccgctcagagtcacaccttgcattgacttttcctgtcctgttggtctcctgaatctcgaatcgttcctccgttgttctttggcttccgtgatcttgacatttttgaagacaggccatttattttgtcaaatggctctcaatttggattcatttggtgtttcctcacagtcaggttgttactcatttttggcaggaacgtaacggtggtgctgctgcgttgtcctcgttgtcccctctcgggaggcgcatgttcacgtttctctttgtcccactgttaatggcatcactttgatcatttggttcaggtggtgtttgtccctttctccactctgaagttactactttcctttttccatttatctggtaaaggaaatagacagttaagctggtaatttcagcataatatggtgagtgttaaacagacagccagggtgccttgggagccagtaagtagatgtcacccaacctggtagctcagggaaggcttctggagttgatgacacctcaactgtgacttaaggtaatgattatgagtcagccaagccaaggaaaatggggaggatactgtagaaggacatgataccatgaacacagccatggagccacgaaacttcatggtgtgttcaggtcgctacagtggctggcagcttgagttctaggatggagttcggaagatgtcacggaatcccagtatggcagtacaagtgcacttgttctcacgggaggctggaagcaaaggctgtgctccttgttcctcaaaagctctagggtctcttttgtctcttaattccatagttctctctcccctaattaacacagagctaaaaatagcagagaaatggggaattggggggaagattatagtcaaagaagtttcatcacaggatgcacagttaatttggttgcactggaaattggtttccttctcttagaaaataaaaatcatctttgcaaaaaattgtcacttctttttctttcacttttttgagggtgaaaattagtgaaaaatgaaaatatgaacaagttgtgcaaataaaactaaaaagtcaccgaatttggctttgaagtatgcatctgagaagcctactattctttggcttgaatgagaagtgtaagttgtggaatggtaaagcagtgtagcctctttgacacccagccaatttaatttttttttttttttttaattttagtggcagtaagtactgacttaccaaggcttggggtagcagatactatcacagctgccaggacttttccaggctcctgtcaagaaactgctgcaattctgcaagagtcttcagattaaattcatgccaagtcatttcctctgttcttctaccagtgaggtcacctttgcagctgaccattagtgatgctgtcagcaagaaaaggattatgaactgaggtctaaatttcagtgatgtctaggcaaaaataaatgttcaaaagaatttagcgaggtttccaagacctggtaaatttctccctaagagaaattgccagatttgtgggctcttgattttagcctgaagaatcacattcttcagcactggaagtttttccttctttttttacttttctttttttttagacacagggtctcactctgtcacccaggctggagtgcagtggcaggatcataacttactgtaaacttcgaactaccgggctcagttgatcctcctgcctcagcctcatgagtagctaggattacagatatgtgccactacacctggctaacctgtttttttgtagagacaaggtcttgctatattgcccaggctggtctcaaacttctggcctcaaagtaatcctctcacctcagcctcccaaagtgctgagattacaggcgtgagccaccacacccagcccaacattggaagttgtcatagttatcgccagttgcctctctttttgtctggagatgtgtaggttagccaaaaaaaaaaaaaaaaattaccgatttttttttattttttcattcacaaatattgaatgtcttctctatgtaccagatactattatgctctctcatggaggttagtactgtctactggagaagacataccaaaaacaagagagagagaaagaggaaagccacaaatcagttggaaacacgcccgtattagtgactgaagagcctgcaaatgaaagctttacaaattcatatggccaaatagatttccttgctccttgagttaaaattcacataacacaattaaccattagctaagttaaaacatacaattcagtgcatttattaacgttcacaacgctgtacaaccatcatctctctccagttccaagacgattcatcaccccaaaaggaaaccccatttccattaagtgatcactccctattcccccacctcccccagcaacccctagcctactgtttgcgtgtgacttcttccactcagtataacacttctgaggttcatccacactggagcatgtgtctggtctttgtaggtttattccactaccaaccatgttctttatgcttaaaataactcctccctattgaactgttttggagtgatatttcctggggtggaggtagtttaatgattcatctctgtcttgttagcatgcttgtttatggtagagagaaattttgtattctgccaccataccttgtcaaaaccttttaacaaggcattgatttggttctctggttctgagaacttggcagtggaagacaagacttccacccgcattgcaagcaaaatcattgatgtcaattcacgttattgtggaaaaccgtgagttgtgacaagtgaaagcttttcaccaagccacaaaactatgggcgtgtgcagtcaacacacggaacacaaggggtttgcttccgtggctcagcatagcactctctcactagttctaaaatattcatagcctttgctgttcccaaaagacgtttgaaaaataagacttctcctttgtcagcatccgcgctcacataactggtgaaactaggagatagttttgtatcccggaagataatcattgttccattcaggtgttgggcagagagaaatggcttatctgcacatctgcaggatgtaagagattagtgaaatatttgtgattctgatgttgatgacttttaatgtttgacagagaaacttttgcaattattttcttctggtccaggcctcactccttctagcccacatggctctagtcaacctcctttaatcagcagagtaataggcaagactgtagtaggatgcctcaagacagacttttatgttgggacaagtagtgtcttattaaggcggttccagcctttcatatcctgcctccttgggataaagagtgtttgtttacagagcttctgggatagactgctgcatgctgcatccgtacctctgttgcagaagcacatctgtcccattatgtctagtgacaaaaataagacctacgcctcagtgaactttgcatacatctgaatgtaagcaagacaagtatatttgacattttaaaaaggttttttctttcacagttttcaaaataacataggagaagcaaaggaaaaaatatttcttgtgtttctaattcacaggttgcttgagactttttttggaggtgctagcattttattggccacagttttgaaggaaaatacaatgaaatcatgcttctgtcgtttggggaaaaggaataacagattcattttttctttttttaaagatgagagagatagtatttggaatctatctttagactattctacctctgaatctaattgaagtaagaaattgggcaagaatggaatcttacttaccacccaggaaaaaagctaaacaattgtggctcagtccattttcccctgagactgtcttcagattgaggcgatcagtgttaaaatggatggaatcaccaggctctccacattctagtaagattgtagtacggttgaaagtcaaatgaaagtccagctcttcagtgtgtcatttcctcttgcagacaccagaccaagggcagtggtggtctggcgcttatattttgttattatttgttgagaccagaactctccttaaggatatatttatatatgttttaatattaaagtttcttttcaaggaatttatactaattagttcatgtaataataacatgtgcattccatttaaagttaccttgctaaattttctaagacttgttagcttccccatagtttttaataaaccaaaagatcaaacgaacagtccccagttgcccaaatattgagcagttaaggctggtttcagctcatctgaaatctgtaaacatttaaagagaacctctctcccagaagatagtgagcacggtggtattctccagtctcagaatattaaggttacttacagactagagaggccttcagtctatattaacgagttcctttcctaatctcacccttctaagaatatatttgatccaatttagggacagcaacattgaggccagagaaaaattaatggggtagtaactgtagacaccaaaacactccccaaatcttgagacatcaaataagcaagactgaatttatgcaaaagatactttaaagatgtttctttagctgggcgcagtggctcacgcctgtaatcccagcactttgggaggccgaggcgggtagatcacaaggtcacgagtttgagaccagcctggccaatatggtgaaaccccgtttctactaaaaatacaaaaattagccgggtgtggtggtgggtgcctgtagtcccagctactcgggaggctgaggcaggacaattgcttgaacctgggaggcggaggttgcagtgagccaagatcgccaagatcatgccactgcattccaacctgagcaacagagtgagactcttaaaaaaaagaaaaaatgtgtcactcagagatttttctacctagaacaagagtcatacatactttttgaaattattttatctatgtaaacttacgaggtacaagtgtaaatttgtgacatgcatagattgaatagagaggaagtcaaggcttttagatattcatcacctgactaatgtacatggtacccattaagtaatttctcatcatccaccctcctcccaccccgtcacccttctgagtctccattgtctactatcagaaaagccttctccagcagcgcattgtcagctgagtctaggagaagaaagccttctcatggacatgagctaaattccctgggaaaggccattccataatggagaaggccttctgttcacccacagtgtggtcctcagaccagcagcttcagcgtctcctgggaactcactagaaatgcagaccccaggcccagtgtggcagctcacgcctgtaatcccagcactttgggaggccgaggcgggtggctcacgaggtcaggagtttgaggccagcctggccaacatagtgaaaccccgtctctactaaaaatacaaaaaaattagccgggcatggtggcgcatacctgtaatcccagctacttgggaggctgaggcaggaaaatcacttgaacccgggtggcggaggttgggctgagctgagatcgtgccgctgcactccagcctgggcaacagagggacactccttctcaataaataaataaataaataaataaataaaatgcacccaaacctgaattggaaactcaggtggggggcctagcggtctgtggttttactagccctccaggcaagttttgatgctttggtgattgagaactgctgcttatgctgtcttggtggagagcacttcagccagtgcctcttctgctgattctgtatttatcaaagaaccactgactataatttagtgctcacactacagttaggaggtgtgtgagttccctttacaaacctatttctgattgtaaattcctaagatgttttacacatcagtatcttgtgagcttgataaaagtgaatccatctcgttcagagtgatgcattatgagtgtatagtggaagtctagcttctaagcctgtgaaacagaggcccagccccctgatccaggcagatttcactaaggtagaggccagggtagatgtccctgctgaacgggcaccctctcatcccacctcaccctggctgtgtgtactgtatatttttaaccaagaggagagcagagcggcacagaatggctggtactcagtattcctggtttctggattatacagatgcaagggaaatgtctcctagtcttatttcatgagttactgtgtagcattattgaattgcagtggtaagagggttaggtaggcctttctcatttttgattagacagctatcatttacaaattagaccacagggaatcgaccttaacttctgtgactaaagcttttggcagttacttttggcatttctggccctctagacttgaaaatgactgagtggttacaatttacaaagttaagagagctttctgttgattggtgtgaatggtaggatatgagacagactcttaggagtaaaggacagggatttagggaaaatcctagtggagtcactgcagccaggcagagttgtctgttacatgcagataacaagtcacgctgttggggttaattagaaaaagaggaaacaaagttgagaaaagaagagggaggcagagcagacggcagaggacaggaattttcagtgcagcgttgggaaaggttgtggaagctgaggctgacgcagacctagggcgttaaagctgtatttacagctggaccttctgattcctggggaggaggggaggctggatcgtgggtaagagagactggcagggccagtggaggatactctcccactggagttgtccagtgggagttgtctggagttgtcctgggcagaggctgcctgttgacagaggctcagcacagccatgcttaagataagctagctaagcaggtacgaggaaaaataatttacctgaagttctttctggccgggcgcagtggctcacgcctgtaatcccaacactttgggaggccgaggtgggtggatcacctgaggtcgggagttcaagaccagcctgaccaacatggagaaaccctgtctctactaaaaatacaaaattagttgggtgtggtggcgcgtgcctgtaatcccagctactcgggaggctgaggcaggagaatcacttgaacccaggaggtggaggttgtggtgagccgaggttgcgccattgcactccagcctgggcaacaagagcgaaactccatccccccccaaaaaagaaattataataaaataaagttttttctgtattaaacatcttgtgtttaaaagtctacagtgagtcaaggatgttgaatggccaaagatcataaatctctccctctttaaatgagctgtgggctgggcacagtggcttatgcctgtaatcccaacactttgggaggctgaggggcatggatcgcttgagcctagtagttcgagaccagcctgggcaacatggcaaaactctgtctttacaaaaaatttaaaaaaaaattagccgggcatggtggcatgtgcctatggtctcagctacttgggagactgaggtgggaggatcacatgggctgaggaggttgaggctgcagtgagctgtgatcacactactgcactccagcctgagtgacagagtgagatcctcaataataagcagtcttcagtgtttcattttacccaggctaaatgtatttgtagtatacatatatgtttatattttgatagattcatgtgagtaaaagatatacaataaaaattgacattaccgaaggggagtgggattagatgtgagagggtggattagtaaattgttttacacacctctttaccattggacttgttacaataagcctataactatttttaactccataaaatacattgttttataagagctgtcaaatttcacttgctcagtcccctgattctcattttcttataaaatctcaggttcctcaaatatgaattcttctgccatgagaaattagcaacatagtcttaaagtctggggaaagattatagtcagatccacatagataggacaacgttccaagtcgggagaatgttcatatgagaattgaatagaaggccaaatttttaggctaagaatatgatcagaggacacttccagtggagagagtcagcgtgaagagttgaggtgcatggctgttgtgcatctgagagcgtgtacgcgggcgtgagagcgatttagatccctgtgtgttgaattcgagacccacccagacagcctccagtgtcttctcagtgactgtgcccaagatttctgtccatctgtggacatgttttaatgacagcaattagtggtaatgatggctattaaatacttaatgacatttctgtgttctgaggcttcttcatacaagaattcacttactggccgggcaccgtggctcacacctgtaatcccagcactttgggaggctgaggtgggcagatcaagaggtcaagagattgagatcaccctggctaacatggtgaaaccccatctctactaaaaatacaaaatagctgggtgtggtggaacgtgcctgtagtcccaactactcgggaggctgaggcaggagaatcacttgaacctgggaggcggaggctgcagtgagccaagatcatgccactgcactccagcctgggtgacacagagagagactctgtctcaaaaaaaaaagaattcacttactttccacagaagcaggcactgttatgatccacagttcataaagaaggaatctgagacatggaaagtcgacctttcccaagcttgtaagtggaacagtattctgactccagatcctaaatggtaaaccactactctctgctgcctcgcagcctggagattttctgtaagagaggggctaaaataaaaaagcccacctcatattgatcacattcttagtaatccttgaatacgtttatattgtgtcattcatgaatgtcttttccctctggccagattatggtatttaggtcaggagccattttttcttgtttattttgtattcttacattgcccagatatgctcgataaatggtttttgaatgaattaaccaaactgtttctctaattcactatgcttttaactgtctaaggaaaagacaaccgtggggtccctcgctgcatgcctgggaacctctctgaacacggaatcaacttcctttctttgattttagagccagatgtgatgtttgaagaatgtaatctatttgctctcaaacatggagagcatagagctagaactccaacaattagaagttaatctgagatgtcctacaatacatgattttaaaataaaatccaccagtgtcagtctggtgcagtgactcatgcctgtaatcccagcactctgggaacctggggcgggcggatcccttgagcccaggagttcaagaccagcctgggcaatgtggcaaaaccccatctctacaaaacatactcaaacactaagcaggcatggtggcgtctgcctgtagtcccaggtacttgggagtctgacgtgggaggatcacttgtgcccaggaggtcgaggctgcagtgagccatgcctgggtgccagagtggtaccctgtttctctgcccaccctcccccatcccccccaaaaaaatccaccactctttcattctgaacaaccagagatgtttggaaaggacacaggaaataatacctggtgaatagttactctcgagcacttgctaggtgcgctgcagatcttcgtaaatttaatcctcaaaacagttactcaagacctgtattagcttgattttagagttgacatctgtctgagaaggaggtaacttggtcagaaggtgccatctcgttgggatgtcacagtcgggcctgttggcttcagagacttgggctttcatgctctgctgctgccaggacgggggccacatcgccctgtctcccgatttctcccatggctctccaggacttggccaccttcagcatcgtgtgttctgtacacagcacagcatgagggtgccagcagtcctccttggctcagcgtctaggatgtgtcagaactgtaaaccccaagattcttaggcaacccccctaccagcgctcatttctgctacttcagaccagaaaccttcgcgggcgggggtgggggcgggggcggcgggggtttcagttgctttctgcttcagttttcttggccgacggtctacctcacagtatcacagtcatctttactttcgtttactctgcctttctgtattttagtttctgaatttctgtcccataaagccagcatttaggcattttgaattttgagtttcttcagtgaattcataatagtaaaaatatttaagaaaacctgtaaaggcaagattgttgttgaagcccctcacattagaacacttcccaggtgctccaacctgggggggactgaggacttacatgggaagtcagagctccccatcttttttccccaaaggtcattcattctgacagcatgacttcaacttgatatgagcaaagagcatttcagataggaggagaaaaaggaagagggttgggcaccgtcgtgaaatggtacacttcctcaccgcggtgcttatctacataattgtgtttttataacatttcctttacttttctgtaagctgatgctgccctaattatagatttttaagagaacacttcattgtaccccaaattatacagtgctttaaaaaggtactttcttaccggtttaccaaataccttataaattcgtaattacataaaacaattcgagatacagaatagaaacagcctgtactgttaacaggtgttggtattgttatataattgagtacatggctttcaaagatctataatatttttcttgagtaaaaagaaaaaaatgactcattatagtcgtaatgtgtcacagagactcctgatcaaacagaatgcacatgttctattttgtgcattctgtacagttcattgtaaatggacttgcctttgtggaagtgaaagtgccacttattccagcaaattgcctttgtggcatatgcacctacttgttagacagcttgggggcacttgggccaggcagaggctgggccccctttatcatgggcacacctgcacacatggcactatggcgccacactccaggtaggctgctgtcattaacagacttgctccttgggaaacccactgaggacttctcagtgccctcctgcccatcagagaccacctcggaattcttagaagactaggaatggggcagcttcctagacgctagctcttttcccgccacatcagttttaggcctctcttatgatacaagtgattcagattacaaggtaacctcagtgcaacacaagggaagaaataaatcctctctgttattgagtgctgggtctagtgtttaattttctttcttttcttttctttttcttgagacagagtctcgcactgtggcctgggctggagtgcagtggcgcgatctcggctccctgcaacctccacctcccaggttcaagcgattcttctgcctcagcctcccgagcagctaggattacaagcgcccaccaccacgcctggctaattttttggatttttagtagagacggggtttcactatgtaggccaggctgttcttgaactcctgacctcatgatcctccagccttggcctcccaaagtgctgggattataggtgtgagccaccgcacccagcctagtgtttaattttcaatttaatttttggcactatttttttttaagttgctcatcttaggacagtataactggaatgagccttgtgtttccagttacaaaaacaagacagaacaaaggatgaggctagatttttgtattattgacaaccccatattcttccctccagaggagagatcatctttcggaagcaagcccgagatacacacagtcttacccattccttcaatgctgttgatgattagccttaagatggttcttttctctaaggaaaccctccccatttttgcaggatgtttgaaaaatgagttgctgaatgggcttcagatattcttattcttctgttttgttgggattttcttcccactcctatttgtgttaatttttccctcgaaaaatgagattgctgctcactgccgttgagcctccttgtggcacattcattggtccagtaaacgacttaactccaagaaccacctaccagtaacacaacaaaaccttgagtacagattgattcataaatggcagcggacgagtgttgaaagtgacgcattatgtcgctgcaatgtattgacattatcaattgtgtgtcactaaacagccaggctaactggatgatttactttgtgtttaactgcctttttcagttggagcaaatgttgaggaactgggatgcaatgtcagaaaccatatattttcttctgttaacaccagcttcactgaggcgtgttggttttggctgcaggctgtaaggctctagtgtaaaaaggtctaaacaagtgattaatgcccaggaggcagggctttacactgtctccacatcttttctcctttctatttgtgttgccttaatgcttggggtggggggttcaggctatttattgtgctgacgttggtttccatcctgagagtccttgatgtttctttgtggattttgtttgtttttaatattatttagcataataacctaaaccgtaaacgcttgcagttgcgatccaggtgtccttagttcagcagtcagacgtataataagggccactctgtacagtgaaaggtgacagctgtggcccccaaaaaagcagctctggactttcccctcccaagtttcagtcctggtaacttgaactagacttgctagtttcttgaaacattgttttattttcttgcaagttagtgtggtgttcatatttcacaacgctgaaagatacagtgtttctcaaatgtgcacttgccagtagacggatatgttaactgttaccgtgacgctgagaactggagctgctaactgaccctatgcgtttgttctctgcgtaaaatgttgtaacagtgctaattactaagcagctgaatttgtgagaaggtccacagcactaatctgcgcctcagtgttgccttgctagtgagaaaacgtgagcatgtactcaggacacatgtacttgatgatgaacttccaggggcacgtttatctgtggatcacggacggtttgacttgtgggacgtaacatttgatttctatatgtgcgcttttgagacactcgtttttaccctattaagagttgttgagtgcagaacaagacattttaaaagggaagagtaacattcagagattttaaaacggaagcttttaaattactacttgcttctgtttattttttattttttgctagttttagaaaaacaaggaagaatatctcaagttggaatagtcagatttcagtgtttgggtgatggtgttaaaatcgttgttttaatggtagatgaaaatgattctgttctgttggattcacatcctgaataaatgtttctacacaattagagtctataacagactaagccagcatagtggtggtgtgggttttttgttttgtgttttttttgttttgttttgttttgttttgttttgtttttgtctaaaagaacaacttcaagccttgggaaagaatttgtttttgccctgtggatgggtcagaaacatctgcttcaggtatagtttacaagcgttatttattaacccatgagccgaaaacccagatgaggagctctgactattgaaaactacacattccatgtttttataaatgtatattaagatgaattccacatacctattatttggatttctggcagccggaacttctacaaggaatttgtgtttttaaaaaggaatgtaaaattaatttttcttgtatcagagttttgctgtatatgaagaaatcctgctcatgggcagaaagcaaaggtttcaaaggaacctcatctccatatggttttactcgataatcctttatccaccatcttcagctctcattcctttgctttctcgcctgtggctacatttctatctctgcatcaattagcacagtgatttatacaacaagcaagcagtttagaggtaatggtacacaattaacatctcattccaccataaagggtatgctaaataccccagtcattgctttctctgcctggaattgaaataagtgtttgtcctaattcatatgctatctgatgtgaagtgggcctgctttgtaccgcactacaccattaatctaattatagatagctgcaaatgaagtgctgtctgagctgggagattgaagaaaatagccttttgtcatttagcatgactctgtgaagcaagatcacactttacagggcaatactacaaaatggaaatctcaataatattgctgcctgttgcatcttttctaattacaacaatattgtaaacacaactgggcgctgatataaatagagctgtagatatgctgtcatgtgggttgtaggagaaagtcctccgagtgctgttggattaaatgatgcatcctgattgacagctaccttgagactgcactgatggagttgtcacagcattatgctaacaggctgctccagcgactgcagctgtaggaggctgtggttcgccctgcgccttagctgctgcctgtccatgtccgctcctttgcctgggctgcacctccaaaggaaggacggccgtaggcttcaattctgtgtattgtcactgttgtgtcttggagatttgtggtggtggtggtgtagctcagatatcaggcgattgggccctgtgcagaagtagagggaaattattttgtatggctcctaaccttgctctgcttttcctcaagtgataattgtgtaccctacaaagaatttaggagagtagaacgtggttgaatttcaagtctcattccactgaactgttttaactcatatctagtttttctctgcttttcagccacgccagtgtttttaaagatgcatcatttttgcatttcgcgctttccatcactttaaaaacactgacactgtttctccagctctgagttaggacagtagacctttaggggaatatttgagtgttgctctcactgccacgctgcggaaatgaagacagagcttaatgttggagacctttggggccagaaggtgtaaaaccttgactaggaagagagcctaatctttgaagaagtgtctgcctccttacttagtgaggggtgcatggacagtatttggccagtgcttcaagatagctgatgcacagtgatttacagtcaaagatagcacctgcccttgagttggtattgactgagatggccaacagttgaggacatgaaagaacattaacagtcagtcaactgtacgtgtcctaattgttactggaagaatgacttataaatggaaactggaagtgagcccacttgaagaggaacggaggttgacagtggcactggaggctttgaaatcacagctgaaaactgtacagcaaactgcaagcgctcacctcgggagcagccgcagacctcgggatcattgcaacatttagcgcatggggtctgcagaattacattactgctacttctacaggctgtggaaaaaagtgggtggatttaatgctgtaaggaggtgcatgtactgtacaaatacagaagcctccagggtggtattctgtgtatccgtgaaagtggagtgtgtctcaaagtgggtcattctttgctgtctttggggtgctgatttctggggtgcaggcatacatgcccagttgcaggatgcttttcttaatgaggtccagtgataacatccctctctcacccagactgtgactagccgccgcctcctgctgcagcaaccactctcagcccccaggctttcaataggtccacggaagagctgcgtgtcagttttaaaaacaatcccactggtgtttcttgtcattgtcctgctcttgtggccttcctcctgaccctttcatgtcagctgtgattccttttctttctttcttttaatcttttgggagaaattttcttgttagacatgatttcacactgtagaggccataaaattaatttgcttagagacccgggttcgggtcacctttccgtcattcagtccttagataacacctcattccctcccattactgtcgtgtgtgggttgaggagtcccaccaggccaagccagagagcaactgttctgttctcacttacgtggtgagctgtttttcaagaacattttttttcatttggctgtgtggtctggagaacaccttcctaagccagcggagtgaagttccacgcactgaccagccccgagctcactggagcgagtcatcttccggctccatggcagcccagccccacccacaggcagctgcctgtcacccacgctggcatgttccctcatcctacccaggcagcgggaaaacctggctgcttctgggatcctactactctgtcctgtccacaagccttcagagtcttggattcctaccctcaaacatcaactttgtgatttatcttcttgaaaacaaccacaaaaacttaaaatcaaaactctctaagggagtttcgcacaacccttgaggaatagttaaatgcccacggtgaaaccgagcttgtaccccacggtccaggtaggggcacattcctgaagtctcacaaagcattggctctctgtgcccccaaagaatccagagatgctagtaaatagcagttttgatcagaagcttggaaggccctggtgtacattcttaaatgacttcttttctggggcatcaaaaagcttttacggttctcaccaggcagttcattctgatgggcccctacgctgcaccctgcttgggccccatcccggcacgcgccccgtgcagcacagcacaggccagctgagaggctgttttaagaaggcgtgtttgtgtggtacactcacgggctcaggacaacatcaaaggtaatcttaaaaagagaatctctctctgtcttctctttttatattcagaaaggtcatttctaaaccaactatttgcaccaaggcctctctggaggagtttaccccgttgttattttttacttgctattacaataagtcacttatcccccaaacagatttaagaacaataaacaaatacaaaaggaaaaggaacatctcatcagtaacaaagactgcatctaaaggcattgagtttgtgattcttttacatctctttccaagcaaagcaggagtcctacagagaaaggaatctgaaagatgaaaattataaaaatagtaaaaggatccagtgttcgtcagaatcttgtaatttctggggagaaatgaagctaaatacagtcttagcgcttcgttcatatgcaggctgatctgtgatataactaaacttagtttttggagtatatccactgtggggaaatgtggtaaatcatattctcagcgaatgaagatacttttcctgaatttaggcttcatattttgaagtcgaattctgcaaaacaagaaaaaaatagatctgtgtgctacactgaaaactgaacaaggcacgtcgtaagtcagtcacacagaaggcgcagctcagggcgataccaactagaaaagtaacttttttgttgactctgatgcctctagtgatgttggattttttcccccattgcagacagcacagataggaaaactgtgcaatttggtccaattatagtcctctctgtccctccacaccttcccccattgatttaatgaaggacttggaggtacaattcactgataaatagtccctctgcccagaatgtttattagactgacagcagcgtgcactctcctcgctttttccctcaccacttatgactcagatgaattttaataggagcaaaaagcttttatttgcactgtaatttcacttaaggaacatatccttcagaaactggcagacgcttctatgtcttgattgcaaaacacacactcaggagtaaagaaacatgcaaaagatgttattattcaacctgtcacagtgtcgcaaatccacttggaacttaggccatcaaagctctgcccccacccttttcagtaggccctgtgaagaggcacttagagattcccgccgtccccatgcagaattaaagggggaattatattttgtttttgcatccctgccatcatgatgcccacaggaggctttgagttacagcaggttttttgaatgaaatggagctgtctcactgctgcttctttcttacccaagagaaatcagacctggtagggatccagaaccttcgggtggtggttccaatttcaccaagagacacttcctcaaaccattttatcttttttctgtttggatagaccaaattgtggctcatagatttattcacggagaggataggaattctcttttttgaaatgttctgcttcactgaactgccctaaatatgcccgattgtttgagagccacctacagaaggtgccatgaatatacttgtctgtgcgtattttccatcagtgtttataacatcttgatgttattgtctctcagtgcagaaggctttctcattatcttgcatcttttcctaaccatcttgttacatcagaaagactacatagtgcctttaagaaaagccaacgttttcagtcatgaatataacattttctgtcactgaaaaaatggaattttaaatactattttgcccaaaatgaacactgaaccccattgtcttaacttactgatacgtagtgcagccgctcttggagggctgtgggaagctgcaacagccatctgctgccatctactggcgcctgtccacatgtcacctcctccatcccctgggtctgcccagctcatgggattttccttgatagggataagtttgtaggtggtgaagggaatacaagtaaaattctcagttttctttataacgttttgagatgtttttcttaaagatacaggatgatacttatcaatgattaattttaataactggaatagcccttatttcaagaactttctgaaatagctcaatatatgacagaaacaaatatattttgatgtgtgcagcaattgagaaccatttgaatttaaggctcttactgtaatttgaatttaaaagctaaaaattgatttagaatgaatgctacttttgaggaaaatttcatttaaactcatttatggtttggttttgtttttcccttaagtacaaggtgaatatcttaaccagacttgccgcagaattgaacaaatttatgctggaaaaagtgactgaggacacaagcagtgttctgcgttccccgatgcccggagtggtggtggccgtctctgtcaagcctggagacgcggtaagggctgtgtgtgtctctctgcaggacatgctggtctccaacttccccttccaaagcgacggctaacggcacagcacgattcggctctttgcagttcttacttaaccgacgccccctaaacagcaaaatcgattgcgtgtgttgtcgacctgtttcacgtttgcattacgttggtgccaggaccctcagcgcttcccctcccaaatgatctgggagtggagcagaaagaaggccagatgcattccatcattttgcaaatgcagtgttttgggaagtactttccttaaaagtgctgcttactctctagtatgctgtgctcaaagcatccattgaagtcatgccagggaataatactccgatgaggaactttttgcatgattcctggaacaaatgtctaattgggaagaagagttgaggaaaggttaattctgcaatctgtacagtaccagagcacttccattacttggtaaataaaatgtagcatcacagtttgaagtttttcatcttgatcttgtgacattaaagcacaaatcaaagctatattatttcctcgagataacttacatggatgaattgataggatgcacacattttcttagaacatggatagaaatctctactgatgagcagcaaaagtgaaaagaaaacaatttaggaggcaaccagatttccaggtacacttaaatacttgcatttttattcatgtgcaggaaaatagcatccggacatgactgtctctcatggatgaggtggtgattccgttttgtatctcaggtcactgggacttacattttagtgcctcctgatttctcaatagtacagataaaatatctgcttaacattgaggaaaaaatcaggtagttggcattggcttctagaaaagtatttgcaataaatgtgaatattaagaaaacatgatcagttttagttgtttgaatgaccagccctgaaactaatatgcgaagttagaaaaccgacttaacagctgctttacctggtgatacagaaatagaactgtccactttttcagaaaggcataaaagaggctacgtggctgtgaattgttgtttgctgtgaaagcattgatactcctggaagaaagccctctttaagactgtctaatgcccacgtgttaaggatttgggagaggccataagaaaaattacgtgtgtgtgtgtgtgtgtgtgtgtaatgtgtgtaaaattcaggggaggacatcttccttctccagagttagggtcgtaagaggatagtctcgtggccttgacattaagaatcgttcacttgcacgtgacattatcagagctgtcagtggaatcttctagtgactagatatgtaggttcgtaaacaatataagggttttgttttgtttttttcatttttcttaagttttttttctggaaggcatctatctagtctgtatactgccagcctgagctttccactcctaattgtgtggctttaattataaaatcgtgtgtgtgtgtgtgtgtgtgtgtgtgtgtgtgtgtgtgtgtgtttcaagtaagtgttttccttaaatccttttctaacacctgaatccaaaccggagtggagggagggcgggcagggatgagggagaccactcctgcctcaagcctggagggcaagagggtgagactgcagccctggcccctcacacggccctcaaggaggttgctcagaggcagtaaacggggcgctcccaaggccagatcagcgcagccttctggtttctttaacagctgctggctcctgatctgactttcccacataccgaaagggtttggcctttgtacgttccatttcctggttaataattgaatgtagaaaagcaaggcatttcgtaaatgggaacaatgtgatatcagtccttggttcattgatgtagctcagatattaaaaacacccaccaataattaaatgtgtgtactcattaagaatggtttgagaactgttaaaaatatgttacggcagagcaacggggcctatattttatgcattcctttaaattcagagtacctggggggcacgcgtagtgaacaggctcaggacctcgggatctgtcagctccctcctaagttctgtttgcgggggctgctcaggtggggcgtatacttgcttttatttgtcttttttggtacttgcagaacttcctttcatattctgtgccattgtgttttgatgaaacagccttttctcttgaattactgcttgtgaaaaatgtcccaaaccactaataccgaaacccaatgcagcctgagaagtttcatcgtcggctcttagcgcaacttctatagttaaattctgcttagtgtaattaaaacacaagaagcttccttggaccagaggcacgtcacttacttgaggccattgtgaggaaacactacctgtcacgttgaaattttgcggttttaagtgattttaacaccgcggggcgtgttgtgttttcctccgcactaacaatagccgggcgaggttccccttttatgggtgggaagataatggagtcagtctccttggtgtattttcaaggaaaataaggaccctaaaacaactaagggccttacaagtattctgtttttctttgaaatgttactttttatcgtttaaattccagtaatctatcatgtttctgtttagcttagctgaagtaaaacttgaccaatcgtagaatggtgggcctggcaataagttctaaaaaaagtgtcacataaatcgtaatgaacaaatctgttttgtgaagtaaacaatttgaacacagtttaaaaacctcaggaagaagagatgtggggtggccgttgagaagtagtgaatccgctcggggcgcttggtgtggcagggccttgtgcactgattcatttgaaacactcagcctgccctaaacacagaagctgtgttttatttgaagggcttctgtagggttcacacagcaaaagttcctaataactttttcagtgtctgttatatactatttaacattaaatgtggcaggtcacattttaaatgattgtgtaatagtttttccgaacacgtggagagaggatgttaatacacagtaaaatgcaggtaagcaaacaaatcaataagaaagtacagtggattattaaggtccagaatcagtaatataatttaggaaacaactgatagaataaattttagtgcctttttatatgccttctgaaaatgtttctgcagtaactcatttcagtttgaaaactcgttttcttagactcgtaacactattgtaaactgggagcacttctgtaatcaaagttagcatgactcagctgtttcaaacttctacctttatgatactcttgaacagaaatgttagaaatatatatattttcagaataacggtagaatacatttttccacatgtcaaattagacttatagctgctgaatttattgcataattttcactttgactttgaagtcaaataaagtcatgatgagcacattcgctttgttagccttttgatatcagaaacaaaaccaccccataagatagtcacccaaggaggcattttaatattgcatttagttaagattctttcaagtaatgttcgtattctgcagtcatcacagatttgcatcagaaatactcatttaatacaccaaacaaatgagaaacaaaccataagctgctatatactcatctgcatttctttctttcttaacaattagtgaaaccaggtgaaagaatagattgaaattaagtacctgttgctgctttttcttgcgaattagcccattcgatattagacttcgggatattttggtggggctaagatgaaaagatccacctcgtgatggaattgaccttcagcaggggacagtgaggtgtctgcggttgttcctcttgtgaacaacgccttaaaggcgagaaacagcctactgtacagtgtgccagggaaagcatcacatcggtgggcgtcggtggcaacaccacttacacttcaccctgattttgtttcctccttgcacgtgctcctttgacagggcaggctcccaagcaggtgtgcagtcagggccacaagacacaggcaccccatcccatctcagagtctgacgtcccctcctcccctttgtctctaagcctcatgtaactgagcttatagccgaccatacagaactggcaaacttggtgagatacctttattttttatttcttaaacaagattttaaaatttcataagctctcacgtatcctaacgagaaggcagggctgggccctcccgacgggtgtttgcctggcatcgcgcttgtgtgcctcatgcagcccaggctcgctcactgcatctttccctggcagaggggctagcctggctgcttcatagactttccagtttctggataccttgatttacaatcacaaaataattgcagtaattaaatttatatgttttatagcaatagttattcaagcagtttatttgacaagatgccagttttcacccaaacctcagattgtatctcacagcatgtacacagagatccatgcatttgttaacattttaagactttaaaattatgaaatactacaaacatgcagaaagttacagagaagaatccaacaagcactcctgtgccctttgttcaccatttccatatgtgtttcaaattttatttaacaatgagacattacatataacatgaacttcccctgtggcaagctcctccatctcattcctgtcctgtcttcttcagaggtaacgactacccctggatttggccttttaatcttttccagataacatttatttttaaatgttaagagttggtttttggccgggcgcggtggctcacgcctgtaatcccagcactttgggaggccgaggcgggcggatcacgaggtcaggagatcgagaccacggtgaaaccccgtctctactaaaaatacaaaaaattagccgggcgcagtggcgggcgcctgtagtcccagctactcgggaggctgaggcaggagaatggcgtgaacccggaaggcggagcttgcagtgagcggagatcgcgccacagcactccagcctgggcgacagagcgagactccgtctcaaaaaaaaaaaaaaaaaaaaaaagagttggtttttgttggaggtaacaaatatctattagtagataagaggaggcagaaaaagatgaggaggtaaaaaaatatctattagtactgggaatttttacagttgaatatactcaatgataattataaaataaaaaatatttatgtggatcagtatattaaatattataggagagtcttctccaagcttggcgtttgatttttcaggagtgatctgcttgggagtagaaggtgttttctttgttttcaacatttttataagtgaccattctcagccttaccaagatgtaaactatctttttctcttttaataaaaataaaagtttacaaaaaatcatcctttcacggagcgctttcaggcagcatgctttacgaaggtagagggtccaggctaatttccaaaggtattgtgaatgacatcagtttccactagttctctttgtaactgcaggctttggctctgattttgagctaacttagagggcagcagggagtcatatttttcttcattttaaggaattttaaaagaaactggacttgttttatatcggccacaagtctgtactcttacccttagccccttgggtgctgcccagttctggggagccccacttgagagacaaggggagcaccaggcagacggcacgtgtgcctgaagtcccgagccggcagcggggctggacgggtggcccctgggttcccgcgccctccagagtgaggccgctcgtgcatgggccattaaaggagtcttcagccggagaaagggctgggcggcgtctcctgcccgcctggtctgtctttgtaatttgatgatggttccatccttgctcaaatactgcagtctcccgtggcctcctccccgtctcgctttacatgaagatgttgggatgtgaatacacgtttcttcttcaggaaatatcaggggatatttaccagcctatcttaccggctcagaggaagttgctattaatataatcagatgcgagcaggcagtgccttttcactcaatctgagatgcctttttttgtgactgttaactgaacctttcttcagatctaagggccttaaaatgtgtggcattcaggcacctgtgttccaagcagaccagcctttaacaatgaaatggtgggattttcacttttgtggcgtagacaccagggctgatattgatccgtgtttttccggtggtccggcgttgcagaagtggaaactgcagcgggctggtaagccctccgagccttctgtctaatttggcagaaaaacacagaatgtaggacaacaaaagaagcctcctttttccataaaaattcttcctcccacccacccttcttccccaaaaaggggacttaatttttcagctgcacgcagtgatttggtgctcactcttgcatcgaaacagttgcggtctgaacaggcaggaaacagttttcttttaattgccgaaatcattcggaagtgcttcatgccctgcttctgtacagcagatgctgtgcattaattggcctgcgtagaagtgacccagggttccttgcagcgggcccaattttaggcagagggtttaaatagcttatttattattttgtataatctggcgtacattgtgtgctcctgcacgtgtcgtatttcatggtctgcagtttctaatgtcatgtgggtttcaaaacctgtgtttctctggtaatgtactagcagcaggtaagctcaaaataccatccatcaggagctaattttttatccagatactccaatgactgatgaacctgtcttttgtatgaatgtttagcacagtggaaagccatatgccactggcaccgtttcctctgcattccttacagttgctagagagtgggcttcctggggggcggggcggctcgatgctgtgaacgtcccctggcctctatttcaacgataacacctttaaaacagccctgggtttgggcaacaaaaagaggatgggctgtcttaaaggagacctgactccctcgtcattttctttatcagaaatacgactgcacactcttaatagggaaccttgttttgttactccccgtctgttccaaacagacctcagcccattagaagggcctcccttgtgtgggagaccacagctgttactgtaaatctcatccactcactgtatcacccccattttgtggctctgaaggatgaaattgagaaatggaatactgtgcagtcatcctttacatctccaattttaggcctttgccatcattttcatgcttttattccaaatcaaataacattagtgagctacaccaccttctgatgaatatctggtcttgagcaccgctttcaagcctgtgcttgtgggggcttccttttatgtttggtggtcttttttcccccgttctcttctttttcttcctgcactttctttgagcgttcttcgtggtcatggcagtctgcagtttgaatgatcggcattgccaaatgtgtccctgtcttagcatgttttctgagagggggcatgtgcgggagaaggttctctgtcttttaatctttgtggaaggagtgaagagaacttggtagaaggatattgggggctttaatcagaaataagaagtggtttaaatcattagcacaacaaagcatactataagcttgaagataaaagtctctggggaaagagtcctctgaaaataaatggaacttgatagatttccatatcatttataacttcccttaattacacttggaagacttgccagtaaaactggaaaattggcagcctatatccattagagtcattttgccgaccatggcaagcagctggctttacgggatttgattcccatcactcacaattcatcatcagctggaggtgtctgcagctcttcagcacagagcaatgctgggtgacactcgggcccccacgacatgcgaaaatctgctgagtaaatgggccgaggtttctctcaagccttgtttggggcaaggccgactcctgcttaatgagtgccgctctgataatcggatgcgaacgtgaaccttgacctcgtgtcaaaggagaggacgcaataagctggatgaaagatacaggattcaggccttcaaactttacaccaattagacagggagcggggagatacatcaggcccactaggttcatcaaaaagacttgtgaggcttgtgaccattttgtaagcccaacattggagacatcctgtcacaatcattaagtctttatcagatgattcacaaaagtgttggagaaacgtgcgcacacatcctgcaggaacgggccccgcacatgggggcgtctgatggagacggaatggtggagggccctctctgtgcacccaattaatgcttggcttcccagccaccctgggcaatccggaaggtgttgcttccattgggcccactgcccagctccctggtgtaccctacatgtactctacggtgtgcgacacattctgcaggagtcagcgctgctgggagcaaggctccaaagtcctaaggtgagagcccctgctcccaagggccgagtgctggcattttgctgttgttggaaggagcccagctcaatgcccagccatccctggagcacgccctcgagtgtcagcctcttcccacagactggggcaggtgtagtttgtgtttccattgcattctttgacatttggtttgtacatttggttctccagctcaattttttccaaaggatgaaacatgttgaaattcaattaagctcgtgtgtgtgtgtgtgtgtgtgtgtgtgtgtgtgtgtgttggggtagaacatgtttctgttgagcaagatgtatctcactattttgtaaggcatgaaggaagtttttaaacaccatctcttagggatgaattagggaaaacggtctacaaaacagatggtgcaaaattaatagagaagtgtgctacttagtttttcatttacagctaaataatctaggctgggcacagtggcacacatctgtaaccccagcactttgggaggccaaggtgggcggatcacttgaggtcaggagtttgagaccagcctggccaatgtggtaataccctatctgtactaaaaatacaaaaattagctgggcgtggtggtgcacacctgtattcccagctactcaggaggctgaggcagaagaatcgcttgaacttgggaggtagaggttgcagtgagctgagattgtgccgctgcactccagcctgggcaacagaccgagattctgtctctaagatagatagatagattagatagattagattagattacataagatagatagatagataaaatagattagataggatagataggatagaccgagattctgtctctaagatggatagatagatagatagatagatagatagatagatagatagatagacagacagacaggcagataagatagataggatagagctaaataagtagactagtagacaccacgagaggaactagggaggggaaacaggaatgaaaggcggatggagcagggaggatctaattctatgattcagtgctgtgcttggatggggcagaagatgggatcgcttcagtggggacacgccttctttaaagtcctttgaattgaattgccggactctcacaatcagacagaaggactatttgaatttcaggcctccccacttttcctgattgtctcgggctaaatccgaggtttttttctgatgaacaactggggacccagcacttgcagttacctgtgcgttacctctttgcaaatcacccacattagaagcacagagccagccagaaagatggtcagtggcagccacagcagagccccttaagctcctgtccaccacccacttgctcccaggccctggcggggcccagagtagagctgtagccaggtcaggctggcctttgcccctagcgtgaccttgggaaatccccaggccgcatttcttcatatttgcagttgagttgctaacgcactcacttgaagatcctgtaaaacagaagcaggagctgcctgcctgtctggcccgcagattctgagcaaggggatgggaggggacgtgtggtggaagggcacacctactggcagagagggtaggggctgtgccacccatgtgaagccaatgtacttggcggggggacggggctctggccagtcctgggccctcagatgcctgcagaggaagggctgggtgggtgtttgggaggccggcatgcagtccccaggaagctcctccacctggagagagaacagtgcccagagcgggagagtggattcctcatttttggatggcatttctactatgttctgttgagtctcagatccacttcccagagagtccccggtcctgttgcctgagtgctcagtcctaggtcagagtcagtcgcagtgagtccagcttctaagaggacacggccaggcttccagggtcccctgtgtggagctggctggcaggtgtgctgcagtgaactggacctgctcctggattccctggtctttgcctgcctttgaagagagaaaaaaggctgtaaaatgccaactggagggagtgactgttctgacacccctgatgggggcctctgcattgtctctgcgctgcccctcccatccccctgcaaacagccctcgaggctgattcttcgctctccctggaatgcagatgccacgtgaaaatgaatcaaaaagggcagcgcgggcagcgcttccaggcccagctcctcagcgcggtgtctctcctccgtgccagcgccaaagccttggcatcgtctctcttcctatatttctatgccaggaagaagcagcccaccacctgaacagcagaggaaaagagtacatcggctcaggcgctccagagtgccagcaagacagcttgcgccacacgggggggccagagggggacttggagatcatctggggatttcaggaaagaacattctctaggcgcttctgaggcattggacgaatatggccacagtggtgtgaggggccaggagccccatgccaggacacccacccacaccacatagccattgccctaggaacctggacttgcccgtttcaaagactgggaggccaaagaaaaacctggccggctcaggacgctgacccatcggggcagagcgaagtgagtgcgcagcatggttttcagctgcagctcactcctgcagggaagcctcacgcttaacgccagtgggcttaacccagctcagcctggctgcccctcaggatgaaaggcaagttctgaacgcagtctgagcaaaggcccgtgggcgctcccagtctcctagcatggaatgcatgtagctctggaagtcattcctgtgtctggagggttttccggaagctgccttgtgccttgttgtgggtactcgctgtgtcttgcagaggatgggacagtggtcctcgtggcgccagggccgagctgttcccagttccccgggactatagacagaaatatgtatatttggtggtggttttttttttttggtaacagctatactgagatgtaattcacatacaatttagccctttaacgtgtacgattcggtggtttcagtcaattcagagttgtgtagttgtcaccacaatcaattttggaacatttttatcactctcaaaagaaaccctgtacccttcagcagtgactccccttccctcttcaaccccaggcaacctcgagtctgtctgtagagatctgcctattctggacatttcaggtaagtggaaaacattccaatttccgaacacctctgttagtggcagagccagactcagagatccccagggtaggccccgccgccagggtccccacttctccagggtcagggattttttttttttccaacgaggactttatgagagagagaatggcttttctctactgttcctaaagatgagcttggaataggaaacattagagattgttgctgctgttcatagacacatattttggggcatttgacaaagaatttcttaatggcttcattcctaagtgttaatgcaaaattagaatgcttttaaaacttctgcccatttttgttttccaggtagcagaaggtcaagaaatttgtgtgattgaagccatgaaaatgcagaatagtatgacagctgggaaaactggcacggtgagtccctaagtccccatcagcccaggccggccctgtgatggaggaacgcccacctttgaatcgtgggtggtttggctggaaagggccacagaggcgccctctccccctcgcttctacagaggaggacgttaggattgggagcttttgccattctgccctgatgcatccctgcctcgtagagagcgtggcttccaaaaagtctgtgctttatgttcaggtagtcaaagaacaattgttcttcaccttaatgtctttctttcaaattaaggggtctttaatttttaatgtttacatctgtcttgaaggcagttagttatctgagacttaggtgacacagcagcaaatggttttacaaattgcaaaaattaatgtaactcttcaagacaatttctctacaaagggaacaattcagttgcagatcaagagaagccaaaaccccatgtacatgtgggacttaattatttagggagaaaaaaatattagtactgaaattcattcatagtgaaacttaagtgtatttttttcttgaagatagaaaagtccttttaagcagtaacttcattattcttcctgtgactaaaaagactgaaaagatgccgttagtaggtaaatgatccttttgtgagggccgttgtggtttggaagtgtctgcatgggagagcatgatgggaagcgcaaggctggccgtgttctgcatgtggccatgccttggggacatcaggtgcaaagagagatccatcagttcataaccaggtttgcatcagagagacacacaacctctgtctcatgctctgtcactgcagaaggcaatgaaatggattctcagagaaggggcagcggggatgtcatgcctggtcccggctgggagaacagaggcccaggtgtatgccaggggctcctgagcccagcccgccggtctggaggggtgtggacagttgcactgtgctggtatggtgtgaagagtagaatgacatgatttgtggcgtttttaaggaattctttctaaattacttctttaaaaagtgaacaagaaaatgttggtttctgttcatgtaaaaattttatctgttctttgggatttaacatttgtgctgccctagtatcacgacatccatccatgatgagaacttggcctaggtgtgggggaccgagaacgtgtgtccgccgcatgccaagggccctgtgcggcaggtctgaggtgctaatgcagaaatgaccttggcctcatcagttccctgaaggggcatggtgccatgtggtagtaggtttcctgtcctcgtggcctgggtctccctcggccctcctagttggagtcttcctgtgcattctgttcacctcaccccatccccaggcctctcagttccaacccagccaagaagagcagaagtggcccgaagcccccgtgcaaagtagcaggccctggttcctacctgcgaggccacttttcctcccagagaaaaaaagttcacaaaggaaacagatcctctactctggtcatcgctgcatcactaacactgcgtcctctagtagggctgctaaatggaggcaggagcattgtggaaagcagccttttcagtccaagcagcatctgcagtggccgatgagttctaatccatttttcattttcaggcccaagcaagagcctccaagaagtcaaatgactgtctcttccccacctcaagcccctccttgctaattttaagtcagaacacaaatttcggaaagcaaaacttgataaagattgactgaaaccggtaggacaaaaaggcacagttccacccacccatggtgctggaaagggcgaccgcacagccccacctgccaaggactccatttcccttcagaaaatggaggtcaggccagggaggtcctcctcttactcagcagctgatctgactgtcgtgtgttttgttcctttttttcttttacactaagtattccattaattctcagagaacatttccacaacctcaaaaccacagagagggaggctaggggttagaactcacctggcagtgaagagcctgcctagacctgagggtgccagagcgcaggccacagcgcaaatgctccggagagtagccctcaggccagccactgtgagggtgccgaggacagaggagacgggaaaggggaggagtgagccacggccacggccaccatggcgcctccctgttcaccagggtcccttcgatgggctccggtggggtggggtggcttgtccctgtgctgctgagcttgcaggactgtgcatttttagaaatggattaggagcctgccgcctcttggttctggttactaattcttactctcccctccccctgcatttttcaaaattcaaggtgaaatctgtgcactgtcaagctggagacacagttggagaaggggatctgctcgtggagctggaatgaaggatttataacctttcagtcatcacccaatttaattagccatttgcatgatgctttcacacacaattgattcaagcattatacaggaacacccctgtgcagctacgtttacgtcgtcatttattccacagagtcaagaccaatattctgccaaaaaatcaccaatggaaattttcattgatataaatacttgtacatatgatttgtacttctgctgtgagattccctagtgtcaaaattaaatcaataaaactgagcatttgtctaaa

SEQ ID NO: 57 - DNA, 441342 bp, Homo sapiens; identical to SEQ ID NO: 56
  source 1..441342: mol_type = genomic DNA

SEQ ID NO: 58 - DNA, 441342 bp, Homo sapiens; identical to SEQ ID NO: 56
  source 1..441342: mol_type = genomic DNA

SEQ ID NO: 59 - DNA, 441342 bp, Homo sapiens; identical to SEQ ID NO: 56
  source 1..441342: mol_type = genomic DNA

SEQ ID NO: 60 - DNA, 441342 bp, Homo sapiens; identical to SEQ ID NO: 56
  source 1..441342: mol_type = genomic DNA

SEQ ID NO: 61 - DNA, 441342 bp, Homo sapiens; identical to SEQ ID NO: 56
  source 1..441342: mol_type = genomic DNA

SEQ ID NO: 62 - DNA, 441342 bp, Homo sapiens; identical to SEQ ID NO: 56
  source 1..441342: mol_type = genomic DNA

SEQ ID NO: 63 - DNA, 402725 bp, Homo sapiens
  source 1..402725: mol_type = genomic DNA
gcagaggggcggtctgcggggacaacaatggcggggttctgggtcgggacagcaccgctggtcgctgccggacggcgtgggcggtggccgccgcagcagctgatgctgagcgcggcgctgcggaccctgaaggtgaggagcaacggggcctcgcgggtccgggcttcactgggcttctagccgtgccgcctctgggcggctggcgccgggagagcgctggctgggtccggctgcccccgcgccccggttccgcatcagctacaccgcttgctttcctccctcccggagttcgcgtggcagcgggctcaggaggcatccctcgttgcagctgttcctcgcggggatcctgcggagcagagaggcctagggcagaggcagttgggtgcccgcacgccctccgaggcggctgatggctttgggcaggcatattgctcgaggtctgcttccagggccccgcggcattggctttgtcttaagctttccagggtgtctttttaggtgtccttatagtttccgtgttctgttgcctctttccagcatttttgaagggacactgtgaactgttgcttaagtagtgttagggttgtgagtttgtcttatcttttaaagtattataccatgtcaggactgccaatagattttacgtttcatttgaaagcctgttttaattgtatgacaccccagtctactgtgtaccaaatgcatcccgtgaacttactttccttttcggtatagtggtgagcctgattttggcactgttctaaacacatttcatgactgttctgtatacctaggctgtcatgatggcagattgacaaacaggttggagtgcttgtgtgtgcttctgagctctgtctccagtcaatgtcgagtctgtcgttaattctggggcacagaccacctaacctactttataaggtttgttgaggcacttgaacacattctttaaaatgaaggtcccctgaaaaccatctgtcagctggttcagtgtgcttgttaaacttccttttaaaaaataattattaaaacattgccacataacttgatttatagtcatttaattttagacgttgaagacactttagagacgacctgccccatcctactctttaaagaggagggaaccgagccccaggtgggcagtatgagagctggagcttatcgacatggaagtgagtggcacctatgtttgttttgtgtccaattcagcgtgcggactttcactgttttctgtgttcccatacagtttagtgttctttaatctttatcattctgttcatctgtgttggccacttcaattgcagctgtaagacttatgcatttacataggaggcaagttagtatggtgtaaagtgtgggctttggggtcaggcgcatgaggctttgtatattggacaggtctcttccttgggcgtcagcttcgtccttgtagctatttttttcaacaaatatttactgaatatctcctgtcttccacttctggggaatgaatatggtttctgctttcttagaaattttactctagtagggagactgtaacaagtgtaaaatggtattaggggagatgcccgggtgctataagaaaataaaatagagggatttgaccaagccaagattttgaattctgtgttctagatactgttctgttgctttgcttgaactaatttattcaatctcacaacagtcgtatgtcccccatttacagaagatgaaagtgaggcactgagtgttaatgtgacttgctcgaagctatagtgccaataagtggcaaacaggatttagaactccagaacctgtgctcttaatcatactatgctatctacggtaagggagtgttttcctttggaactgaaaattgagacaagttttgaaggatgaagtgaccttttctaacaaacagagatgaatgttataggtgagagagcagtgtatgcaaaggtcctgtggccagagggaatgacaggttagaagaactgaaaaaagcctacagaggctctgatgcagagagtagatggtgttggggaagctggcaggagtcagaccatctggctcttatagatcacattatgaggtttggtgtttgtcttagagcagtgggaagacattgatgttggaggtgggagggatgacactgacattttagattggagaggctgagaggaaggctgttactgtacttactgttgtacacttgttatacacttactgtgtaatacatacgctttgatgattcttacctggttttttccttttaatgtgttggcagagactgcatcttgtctatttctgtgttcttagtacaatgtttgacacaataggtgctgaatgtgtaacaatagagtagcattatgtttgtgccggtaaagaattcctccttggggtgggaagcatctctgaagttcactatcactctaggggaacttgagctgctgcttagcttctctctgcgcttctcttctatgaacttgaaatatgctctactgagtctgtttgaagctgaatcttttgaagattttaacccctcccatccctccctccacctctgcaaaccttttggttggttgaaaagcagccagctaactctagggtctagtctagagaattctgaccattcttttagccagtcaacagagtttatttatttttagggtatatgtagagttcaccttttagtcttatttgttttgtgtatcagctttttaagcacattctgttttaatgcctagttttttcttctgcgtaaatgttttcagtggctctaggatgttggttttatggtaattgctatagttattattgaactcttatatgccttgcatgatttttctttgcttttctttttttttgagatggggtctcgctctgttgccaggctggagtgcagtggcgcgatctcagctcactgtaacctccacctcctgggttcaagtgattcccttgcctcagcctcccaagtggctgggactacaggcgcacgccaccaccaccggctaatttttttttgtattttagtagagatggggtttcaccatgttggccacctcgatcttctgacctcttgatccactgccttggcctcccaaagtgcttggaattacaggcatgagccaccgagcccaatggtgtgatttttcatatatcttttatccttataacaactaggtaaaaaatcccaattttacagtagaggaaacaaagctcagggcagttaagtagttgcttaaaagcacaattggctgaagtagaatttgaaccttagataatatgattctgaaggctttcttttctttcttccttttttttttttgagatggggtctggctctgttggccaggctggagtgcagtggcatgatcttggcctactgcagcctctgcctcctgggctcaagccatcctcccatctcagcctcccaagtaggtgggaccacaggcacgtacgaccacacctggctattttttaattttaatttttattttttgtagagatggggttttgctatgttgcccaggctggtctcaaactcctgaactcaagcaatccacccacctcagcttgcttttctaattacaaattgtctcatttgaatcatggtctcattgtgtgatgcattcatgaaatttgaatgtttaagccctgtgttacttgacatccattattttcttttgtaatcagtaaatatggaaaagaatgtttaggcttatatgaatgctttagaattgcctggaggttaatgtttccaacatgctgataaatttctgacaaatcatttgggaaaagaaatttctgagattattacagaaactagtttctggtgtaaaaaaatgtttatagacatttatatatttatacatctaccatttggattttattctgttcctgagaggttcagaacagaggtaaaaactgctctagtccttttctaagaggaaaagatgtgacatttttgatgaagagtgagggaaaaggatttgtttaaatgattccaaactttaaaaaatgtaggtgggagaacaaggatgaaaaaggaatttgggaagaaacacttttttggtggggctggaaacatagtgtttcattgtaggtatctggagttagatgcccgcaggagccatgctgaggtgctgggtatcagtggctggcttttgggccagggatacgaggctagagttagagttagaactgtgagccctgacggatatagtgagtcagttaatatttaattgaataaatgcttcgttttataaccctaaattaggatttggaagaaggaagaagagacaagaggagttagaggtatggtttgagaggagccaatgtagtgtagtgttaccaaacctaggaaagaaatttcaagaagtagttagcattcattcattcatttgtctagagatctagctctttactcagaaagtgtttgtggagcattttctaagttccaggtactatggcacgtacagaggagagaaaaagaaattaaaacatattccctaactatgtcccaggtgcagagaggctaaggaataaaagattgatgaggccaggtgtggtagctcacgcctgcaatctcaaccctttgggaggccaaagtgggaggatttcttgagctcaggagtttgagaccagcctaggcaacataatgataccacccccacccccggctatctctacaaaataaaataaaataaaataaaaattagctgggtgtggtggcacgtgcctgtggttctaggtacttgggaggctgaggagggaggatcacttgagcccaggaggtcaaggctgcagtgagctgtgatcacaccaatgtactacagcctgggtgacacagcaagaccctgtctcaaaaaaaagtctgggcacgatggctcatgcctgtaatcccagcactttgggaggccgaggcaggcagatcacctgaggtcgggagttcaagaccagcctgaccaacatggagaaatcccgtctctactaaaaatacaaaattagccgggcatggtggcgcatgcctgtaatctcagctacttgggaggctgaggcaggagaatcacttgaacccaggaggtggaggttgcagtgagccgagattgcaccactgcactccagcctgggcaacaagagcgaaaatctgtctcaaaaaaaaaaaaaaaaaaaaaagattggtgaaagaatttgaaaagatctttgatctttaatgagaataattttagtagcatggtaaagtgttatatacaaaaaatactgcttttgacaacactcttgaatagttgaagcaaaattatattttttgaaagataagcatattgcataactttcaaaaattagtttctttattttaaatgcctattgacattttcgttagaaaaaaccccacaaactgatgggatcaacctaataagatcaaaataaaagtgaatttaaagaatgttggaagatacagttttgtgatttcattcacaaaacctaatacagcatccatgtggcatactctctttggtattgtttgtttgtttttgagatagagtctcatgttgtccaggctggagttcagtggtgtgatctccgctcacggcaacctccgcctccggggttcaagtgattctcctgcctcagcctcctgagtagctgggattacaggcatgtgccaccatgcccagctaatttttatatttttagtagagacggggtttcaccatgtcggcctggctggtcttgaactcttgacctcaattgatccgcctgcctcggcctcccaaagtgctgggattacagatgtgagccaccgtgcctgccctctctttggtattatttattcaagaaacctttggtttcctagagctgctgtacaaatgaccatggacctggtggcttaaaacaacaaattcattctcccacagtactaaaggcctgaagtctgaaatcaaggcatgagcagggccatgcttcgcctgaaggctctaggggagaatcctttcttgcctctttgagcttctggtggctgcattcattccttggcttgtggctgcatcactccagtctctgcctctgtcttcacatggctgccttctcctcctccttcttgtgcgtctttccctctcattcttttataaagacacttttcattggatttagggccatgacaagatctaggatgatttcatctcaagatccttcactttgttgtattggcaaagacactttatcacaggttccaggacgtggacacatcattttaggggctatcgttcaattcacctacacgtagtatgtgtcagacactacttagagctgggaatataattgtgactgtttctgctcccattgtggttacatttgagtaaggagactgtgctcgtataaatagaaaagttcagagagtgagaagtgctctcgaaggaaaaagataggttaatgggatagagagtggtagtggtgctgagttggggatgttacctaatgagaccatgggggacatttctgagcatgtggcatttggacaggaaactgagccagccagccatgtgactatatgggggcctagcattgcagaccaaggagtgccagggcaaaagctctgaggggagattgcatttggcataattaagggatgaatgtggctgctgtggttggagtgaactgaatgagggggtgatcttaggagatgagggaggaggagtgggtaggcgggacagagtcatcaggggcttgtatttggaatttagtaatgagagtccagttggaggcatttaagcacattgaatttatgtttggaaaagacgtttgtgactagtacgtagcgaatgtcttagtaggggtgggagtaggattggggactggggtgggaagagtggaaacagagagacccatcaggaagctgttgtagaagaccaagctagagatgatggtaacttgtgctagggcactggagttgctgagaactggtcagacttggaatgtattttggagctagagccagtatcttgctgtggggtttgaaggcagatacagatgtacctcatatcttggctttattgaccctgcagatactgctttttttttgttgtttttacagattgagggtttgtggcaaccctgctttgagcaactgtattggtgtcatctttccaatagcacatacttacttggtgtctctgtgaaacattttgataattttttcattattactatgtctgttatggtgatctgtgatcagtgatcttcgatattcttattgtaaatattttggggtgccgtgaaccacgcccatataagttggagaaacataattgataaatgtgtgagttttgacttctccaagcagttattcccctatgtctctccctctcctcaggcttccctaattctctgagatacaacaatattgaaattaggccaattaataatcttctaagcgttctagtgaaaggaagagtcacacatctctcactttgaatcaaaaactagaaatcattaagcttagtgaggaaggcctgtcaaaagccaagatagactgaaagttgggcctcttgtgccaaattgtaaatgcaaaggaaaagttctggaaggaaattagaagtgctactccagtgagcgcacaactgattaaaaaaagtgaaacagctttattgctgatatggcgaaagctttagtggtttggatagaagatcaaaccagccacaacatttccttaagccatagcctaatccagcgcaaggtcctcgcttcagttctgcgaaggctgagagaggtgaggatgctgcagaagaaaacttggaagcagaggttggttcatggggtttaagaaaagaagtgaggccgggcgcagtggttcacacctgtaatcccagtactttgggaggccgaggcgagtggatcacaaggtcaagagattgagaccattctggctaacatggtgaaggatcagatgattgttagcatttttgagcaataactgttttgaacaataattaattggacctgaacctacagtatctgtaaggtatgtacaaacagggaaaggaaggaattaagagtgacttttgaagggtagacacacaaggtcgctattgtgtgattttgtgtttatatgcagtctccagaatagactgatccatgaagacagaaagtagattagtggttgcccagggcctggaggagaggggatgggagtgactgcgaatagttaagggttgtctttttggggtgataaaaaatgtcctggaatcagtagccatcatggttccatgccttgtggatatactaaaaaccacggagttgtatacttttttaaaagggtgaattttatggtatgtgaattacatctcaattaaaaaataaaagaatggtccgggtgcagtggctcacacctgtaatcccagcactttgggaggccgaggcaggtggatcacctgaggtcgggagttcgagaccagcctgaccaacatgaagaaaccccatctctactaaaaatacaaaattagccaggcatggtggcacatgcctgtaatcccagctactcgggaggctgagacgggagaattgcttgaacctgggaggcagaggttgcagtgagccaagatggcaccactgcactccagcctggcgacagagtgagactccgtctcaaaaaacaaacaaacacaaatcttcgaatacttatgttaacaaagtaaagcaaagaggccaaggtgggaggatcacttgaggccagcagttcaagaccagcctggggaaaatagtgagaaccccccagccgcccagtctctacaaaaaataaaaaaattagtggggcatggtgacatgcatccatagtcccagctattcaggaggctgaggtgggaggattgcttgaatgcaggagttcaaggctgcagtgagctatgatcctatcactacacttcagtctgggcaacatagtgagatcctgtctcaaaaaaaaaaagtacaatgaagctaggtgtggtggcagggatgtgtagtctcagctacttaggaggctgaggtgggaagatcatttaagcctaggagttagaggctgccatgggctataattgtgcctgtgagtagtcactgcagtccagcctgggcaaacatagtgagacccccatctcttaaaaaaacaaaaaaagtaaaataaggtgaaattaatatattttacttaatatattcaaatattcaaagtattatttgaatatgtaaatgtaaaaattcactaatgaggtcttttacattttctgggtactaagttttcaaaatccagtgtgtagtttactcttagagcacatctgaatgtggctcgtggctgccatattggatggaacagctctagggcacagattgtgctactaatcaagtcccaccttgaggtgctgggactggccttttgaatgcagtgttagtcagcccttggccaggcagggtcgggggagctctcaggcttgatggagagctgtatagttgaggaacatggtcgagatgagggtgcaggtgtgagccgttagttgtcaacacagcagttagagaggatctgagtggccactgacaacatctgctacagcgggatggggaagaatggcctggcggaagagtcaagggtgggatgatggagctctagagttgacatgtatagtttcctggtgcttgagcttagtacagaggcagagcccagagaatcttgagtcttgaacatctctctcaaatattaggtgttcaacttggcttttggcagacactgaagattggaatggtctctaagatcctgaagactaaatagtctatttgaaagaaaagctgtgcttccaggaaaaagccagacctaattaagtgtcttcagagaagggcatgggctctgttacaatgcatgatgaaataccgtgtcataatacatggataagaccttcacctggaattttagagatgaagcaagatgaagtaaactaatgtttactttgaccttggtgagatcattttatagctccattaacccagttttgaggatagtttcttctttgaagcagaatgcattctgataatgaatttatctcataatgagttatttagtattattcatctgaatgctactgcgggtatgttaacaacagtagttttggttttggcagaaatagtgttcagattgttctttaagatatttgccagtggatttaccagttttaactgccacgtgaggccacatcttgcttatgaaagtaggtgctatctaatcttttttttttttttttttttgagatggagtcttgctctgtcacccagactggagtgcagtggcgtgatctcggctcactacaacctctgcctcccgggttcacgccattctcccgcctcagtctcccgagtagctgggactacaggcgcctgccaccacacccggctaattttttgtatttttcgtagagacagggtttcactgtgttagccaggatggtctcaatctcctgaccttgtgatccacctgcctcggcctctcaaagtgctgggattacaggcgtgagccactgtgcccagctggtgctatctaatcttaagaaaggatttttttccagccactgcaaacaggatttgtttccctgtttgcagtggctggaaggcatgcatccagtttgtctaaaagcctaccatttcccccgctttttgtgtaagttattgtgtgctgatgataatatatgcaagactgtgctagccatgttagacattctcatttaatcctcatagcagcattatgacctagataagtactattattatccccagtgtacaaatgaagaaactttctatatatctaggaaatgtcagagccaagatttgaatccaggtcagaatctgagtctagaccagaactcttattgactatattattctctaatggtaattcccaagtggttctggtataattttaagaaagaaggtgacagttacatatttggatttagttttcatgtaaaaccttacattttttggcactttactgtttataaaaactcatttgatccttttaataactccctaggaaatcagggaggtgtcatcacctacattttgtagatggaaacgggggcccagagaaatgattagctcaatgactcacagctgagagttgacccaagtcttgtgactctgagggtcaatgccacttcctatgtgccaagccattttcaggcatttcttttctatgtgtggaaaatacaggaaatcattattcctgtgggagagaaccagtggcaatatgttactggggagtcattttgcacacgctgacctctctcattttggctgtgattggctagcctttataaacagaattgattaaagttctttctcagaacctttgttgctaggaaataccttacaaagaattttggactgggcgtgtagccagtttgttacatgcttaacaaaaacaacaaacgttaaaattctgtgtagaggtccaaattagcagacttcttcaaacgttttccttcatttagaaaataaactttatgttgtggctttacacaaatggtctgagtgttgacctgattcttcatttttgaccttccatgaatgtctcccaggaggaaacaggaacagagcctttatggggctcattccaaaccagttcagacttgtcgtgggaatggttcacattggtagttgttctgttatagttgtgtttgcttgtacgagttctacttcttcttttttttttttttgttgagacagtgtttcgctctttttgcccaggctggagtgcaacggtacaaacttggctcactgcaacctcggctcactgcaacctccgcctcccgggttcaagcgattctcctgcctcagccatccgagtagctgggattacgggcatgcaccaccatgcccagctaattttgtatttttagtagagatggggtttctccatgttggtcaggctggtctcgaactcccaacctcaagtgatctgcccgcctcagcctcccaaagtgttgggattacaggcatgagccaccgtgcccggcccgagttctacttctagttactgggtaaccgggaggcatctatgctttttacagctttaggccacattattacaagttcacatgtgtgcaagctctgtggaacaatatcatatctttgagtagatattagtgtttatctgggaattgccactgtttttcttatctagaaataaaaaatttcagaaagctcttgaccaatctgtggttaaatcttataaccattacagcctcagcctgtgacctttgaaaagttaaagtccttgggactcaactttgtcataaaattggggataatactcttgtaactcacagttatgcttgaaggaatatatgagagatagtcttgatctttaatagggacacagtaataatttcccgttcacagttccttcttgttcttggtcttttacttggtaaaggttttattttataaactatatctttttgtatcttttacctccacttttatacagagattacattttttaaattaattaaataattaattaattttttctgaggagtttcgctcttgttgcccaggctggagtgcaatggcaggatctaggctcacagcaacctccacctcctgggttcaagcaattctacctcagcctcctgagtagctgggactacaggtgtgtgccaccatgccccgctaatttttttgtgtgtgtttttagtagagacgggatttcgccattttggccagtctggtcgcaaactcctgacctcaggtgatccacctgccttgacctcccaaagtgctaggattacaggcatgagccatggtgcccgactctttaaaaaatagttgtacaaatttttcagttcatttaaaaatgttgctataagaacattttgtttcttatttgagtcgttatcatcttagaaagttctaagaggtggtacctgttggttgccttttgctggtttttttcctccatttttttccttctagctttaacagtgactactgggaagttctctctctgtctctgtctgtctctctgtatctctctatctcttttctttttctcctttcttttctctcttttcagtggggtcttgctctgttgcctaggctggagtacagtggtgtgatcttggctcactgccacctcaaactctggggctcaagtaatactcccacctctgcctcctgagtagctgggattccaggctgtaccaccgtgcctggcttagtcacttttcttaatgtttttaagcattaagatacgctttcttcacaaacagttcaatgaatgagaaatatccttgattactgatattgctttttcatatttatcagccaaaccacttctgtaccagaaaatgtgaaataagaaatcatgctgaagacatcagcaaatataaaaagaatattttattatgttctggccactgttaaatttgaagctccttgagaccaagactctcgttttgtgtttttaaaagttctgtgtggtctgtgacatttctgaccctgctctatccttttgaatgatcagaaaggctttcttcaaatttgcttggcccctcgacaattcttgttttgcttttctggagatcgttttgatgcttttggtttctcttacataccaaggggctgtgtctgtagatatgatttcccttttgtaattatatttatggtatattgcctagaactacatttattgatcagacacgttcgctagaacctaactggaagaaatatcctgaaaaaatgttctaaagcccatcaagtatttgcaatttattttgctttcctttttttgtagcatgttctgtactattcaagacagtgcttaatggtgtcccgtaatcttggttcagtgggatatgatcctaatgaaaaagtaagtatttaaaagatattctcaacaactaaattaaacttatcatggttttactttctcgtctccacactgtgttcagtggacagatgagattttgttaaggctgtgtggtcattgatcactctagcattgtgtgtttctataggtgctcagtctttaggtattctgtttttcattgtgggccacagtctgaatctttttaattttgtatttatatctttagcaaaaattgaatgcatttacaatgtgtttcctttgtttccagcagaataactaagaaaacatttgttcttaaagactgggcatttgagagatttaattaaactattgagtttttctttcatttacttaatacttttttttttttttgagatggagtcatgctctatcacccaggctggagtgcagtggtgtgatctaggctcactgcaacctacgcctctggggttcaaacaattctcccacctcagcctcctgagtagctgggattacaggcgcccaccactgcacctggctaacatttatatttttagtagagatggggtttcaccatgttggccaggatggtctcgaactcctgacctcaggtgatccacctgcctcagcctcccaaagtgctgggatttcaggcatgagccaccgtgcacctggcctcatttacttaatatttatattatttatttatttatttgtgagatggagtcttgctcttttgcccaggctggagtacagtggtgtgatcttagctcactgcaacctccgcctcccggcttcaagagattctcctgtctcagcctcctgagtagctgggattacaggtgcgccccaccacgcccgtctaatttttgtgtttgtagtagagacagggtttcaccatgttggccaggctggtctcaaactcctgacctcaggtcatccgcctgcctcgagctcccaaagtgctgggattacaggcgtgagccactgtgcccggcctatatgattcatttagattgaaggtaattttgtgtattataaatttcaggacaaggggtttctaattaaaatgctattacaataatgtttgagccttgtagggactagaagaagtgattggaaataaaatatggtttcatgccttcatggcaatgaaggcatcgaagtgggcgggagttttggttaagaagggattgttcaaggtgagtgtcatcaaaatacaactgacaggaatgattatttgagaatgacatgtctgaggtatcttctgaatcatgtgctgaagtgcgcaatactgctttccagattcttttgaatctggaggcctggaggaagaaagagtctacatatcttcagttcagtagaaatacaatgtgaaacacagttgcagggtgatatggtttggctctgtccccatccaaatctcatctcgacctgtaatccccatgtgttgagggagggaggtgattggatcatgggggcagtttcttccatgtttttctcatgacagtgagttggttctcacaggatcttaagatcttacaagtgtttggaagttcctcctttgcactactctcccctgctgccttgtgaagaagggtcctgctttccttctgccatgattgtaagtttcctgaagtctccccagccatgcggaactgggagtcaattaaacctttgtttataaattacctagtcttgggtagtatcttcatagcaatgtaaaaaccaattaatacacagggcaaatgtgattttcaattttcctttttattttttatttttgagatggagtcttgctctgtcacccaggctgtagtgcagtggtgtgatcttggctcactgcaacctccacctcccaggttcaagcaattctcttgcctcagcctcccgagtagctgggattacaggtgtacgtcaccatgcccggctaatttttgtatttttagtagagacagggtttcaccatgttgggcaggctggtctcgaactcctgacctcaaatgtcttcctgcctcagcctcccaaagtgttgggattacaggcatgagccactgcacttggccaattttcaattttctaatagccacattaaaaaaaagtaaacaggcaaaattaataatatctcaatatctaaaatgttatttaagtacataatcagtataaaaagtattaacaagacaccttagattcttttttttgggccctaagtcttctaaatccagtgtatattttatacctctggcatatctcagtttgattagccacatttgaagagcccaataacctcatgtggccagtggctactatattggatagtgcaggtctattgaattagttatgataaactccctgttatgaaagctgtagtttaatttaaaatcttcatcataggtgatatgctttggggttcatgtatccatgtgttgcattccaatctcgaagtaatcagctatcctaagtggctacactcttaagagtaattaactaacatttgttgaagaggacacattatagaggggtggaatactacaaacggttcagccatctttctccttatacactggtagccttcctcattagcgtaataactgttagaagtgggctatcagccaggtgtgatggcccacgcctgtaatcccagcactttgggagtttgaggccagtggattgcttgaggtcaggaacttgagaccagcctggcgaaaccctgtctctaccaaaaaaaaaaaaaaaaaaaaaacaccccacaaaaattagctgggtgtggtggcgtgcaccagtagttccagctacacaggaagctaagttgggaggatcacttgagcccaggaggtcagggcttcagtgagccatgattgcaccactgtactccagactgctaggctaaagggcaagatcctgtctcaaaaaaaaaaaaaaaaaaaaaaaaaaaaaaaaagaaaagaaaaggaaaaaaagaaacgggctgtcattgaggaagtttgtggtattcgtcaatatatgttattggctattgctttagggaaattctgtgcctttgtactattagaatgtaataatgtagttggcctttaattctttacctttaaggataatactcgggcccgatccctaaatgaatagttctgtgttcagccacttgtctggtggattcttgatggcttagtctgacagtatggttagccaaagcagaatattgtttttttttgcctatggtgagcctttcttgcagtcttttggagccttacaaagtacaggaagttaagattccactgaacttatcaagcaggttttatgattctttttatgtcttaataaatgtttgtatgtgtggacagagtttggtctggtacttgctttcattataacctcatagtgaagttacagaaatagctaactgacctcccacattggtgaccactggtaattactaaaaataaataaatgtatgtaactgtctgggtttagcacatttatttatttatttttgagacagagtctcgctctgtcacccaggctggagtgcagtggcatgatcttggctcactgcaacctccaccttccgagttcaagcgattctcctgcctcagcctcccgagtagctgggattacaggcacacaccaccacatccggctaatttttttttgtatttttagtagagatggagtttcaccatgttggccaggctggtctcgaactcctgacctcaggtgatccacctgtctccacctcccaaagtgctggcattgtaggcatgagcgaccgtgcctggcccaggtttagcacatttaaagagatacgagggataaaggtgtagaagtggaatctccttggaattcacttagcatgtttcgtcataaatcctgaaatcaattctgctccctgctatctttgccatctcctttgctgtgcccttgcctaaggtgactgtggagaaactgtgtttccctcagtgagtgatgaatattctttggcacctattcatagtacaggtacatgttcagactaagttggtcgcttcacccttcacttgagggctgcacttaatcagacctttctccttcccggattcctgctgtccttgtaaccattcattaaatactgacctggtttgtttatacctactgtcccaagtgcaagtagacttggtctttggtgtaatacatatttgttaaataaattgattctcgtttgaatctgttattaactcatttcttattccacattttatcagtgacttacatcatgtgcaaattatccgggtgaaatttaatcattactgaaaacgttattttttttaacttgagttttaacaagctaacttgttgtcttatgtatgttcatgagaataaggaagatttaacttatggtagcttgcttggatcaagaccattaagtttcagttggccttaagttagtgtgagccagtacagtactgtgttgttcctgtcacactgatgtgagctggctgggctcagtggcttacgcctacagtccctgcgctctgggaggccgagacacgggattccttgagaccgagagttccatatcaacctgggtaacagagcaaaaccccgtctcttaagaaaaaaaaaagtgatcttaggtgttattaataacatagtgtttagagcttgcattgttatactctgattacattatatcatgatatttctgacatgaatacctggatgtgaactctctgactttgccactagtgaactttgtaagtgatttaaggcaagtgatttggcctcatcaagccttagttttcttatttgtaaaacggagatattatcagaactgacttcgtgggattattatgctaaatattgtcatcatagccattacctgatagatgagataatgcacagaagagattcatcacagtgcctgctgtatacaaaacgtgtcctaagtgtcggctgcttaatgtccttaactgaattttgcacatttggaaagcaagactcaaagcccatggatagtgagtagctgggtgtaaactcatgcctgtccttttccagagctggtggacttacccattgtgctgtatcctttctcagaagagttgggcaagtgacccagtgtccagagttctgccgtcattccaacaagtacccagtgcagggccagctcagtcctcttggtctctgaatggagtgtggtgctagctatggagttagagcctgggagagagcatctaaacctagggaagggaaaggaagaaggagggatagagagagaatgggttaagagaaaaataacaacagcaaaaaagatccttaggaaatcttttacttcagatgacattattagtacagttatagagcagctactgccaaagttcttcattatctcttctggtacctgaattctcatctatcttcaaggatccaggatcctaatttatagttgttttttcctgagtgtcttcagggtgccttatgagtgactctccacatataggatcaagtcccagttccttgaatggcatatgagtccttccatcatctggacttttttttatcctagctttatttgctacaactctcctaagcataccatgcgcttcagtcatattgagaattccttgtagttgcttagtgctaccctcttcttccagtgtcacggcctttacacatgctgttcatgtgctcccttctctgtgtgtagcatcctgcacaaagccttattagagcatttaacacaatttgttgtgtttgtgccatattttactttgaagttgccaaatgcacttgatatttacctgtaattgttgatgcagaggggcagttttaaggttgggtttaattgatttgtatgcatattcttttataggcatagcctacctggaagaatatataggagaccagtaacagtggttgccttttgggcagggacttgggtgtctcttcagtgtatccccttttgtactttaaaaattctgaattatatgcatctatgatttatttagaagaaaattttatgtatggaagattaattgatatgattagttttattgggttttatgcgctaattggtaatacattaatagcccttaacagagaagatgtgtcaggtgcaggtatttgttttgttatagcttttccccagttagacagataggggcacactcctaaattcataacagtctggcatgtagcccaaaggggtgaagaacagtagccatagctaatgctgaatgagtatatattacatgctagacattattctaaacactttaagagtgttaattcaaatcattctcacaacctcttgtggcaggtgctgtttttacccttattttacataccaggaaatgagaggcaagaagggtgacttgttcatagcaggacacacaggaggagaacatagaatgttgggagttcagcctgggtggcttggctgcagactgactcgtaatgaccattctgctgcctgaacagaaattagaatggggattcttgcttaattcttccattgttatcatgatttgttgtattcgctgtaacaattgcttaatatgtaatttctaggagtggtgtttgtggtgattatcagatgtggtctgtttcacagttaatattaacatcatattttaaaacccatttaagaaagtgtaaacattgtgttctcaggatatgcttactgtttaagaggggtttaccatgaccatttaaatacagaaaagtagatgattatgcattctcagacctgagatgtgagcaaggctctgagtggcttcgagttttatcacattagaagtttacctatttttaaggcaggggcttggctcgggttggaggagttaagacatatatgatgtaaaggttaaaccaagacctagcaagcttttttcacttctgagattctggactttttcctgtatgttaaaatactgctctaggccgggtgtggtggctcaggcttgtaatcccagcactttgggaggccgaggcaggcggatcacctgaagtcaggagttcgaggccggcctgaccaacatggggaaaccccatctctactaaaaatacaaagaaattagccgggcttggtggtgcgcacctgtaatcccagctattaggaggctgaggcaggagaatatgttgaacctgggagacggaggttactgtgagctgagatcgtaccactgcactccagcctgggcgacagagtgagactccatctcaaaaaacaaacaaacaaacaaactgctctaggttatataagagtactttttaaaaggtcatttataactctaactcttcttttagaaatataactgacactttttttctgtagttccgttgaacttaaaaataattcacaaatacagaaattaccgtgtgctaatgtgtattacatccaaattacttggaatggtgtgttttgaaaaacgattagcttgtacaattttagagtaggaagaaaaccttactaaatagctttccatttgagtgctaccagtttatgtggaaatcaaggcctacagagattgatttacttaaagttaaataggtcattagtggcaaagctggacttgggtttaggtctctagataaacacaggatacacaacttctctactgtttggtctcagctgcttcaaaatttggtggttattcaaacttaacattggattcaaatggtgtaatctgcttagtctgggcatttttggatatatgcacaattaggtacctattctgagttactgaaaatatgccctgtcccaacagagatagcagataaattatacttacttagtatcagacttccctttgaaaacaactcatgacacttagaatttcccagaatttagaaaataaattgtcaagtaattttggccaaagtgttttttttgtttatttatttatttattttttgagacggaatcttgctctgtcacccaggctggagtgcagtggcacgattttagctcactgcaacctccgcctcccaggttcaagtgattcctgcctcagcctcccaagtagctgggattacttgggattaccagcacttgggattacgggcatgcaccatcacgccggctaatttttgtatttaaattatttatttatttatttagagatggagactcgctttgtcaccagacaggagtgcagtggcgtgatctcagctcactgcagtctccgcctcccgggttcaagccattctcctgcctcagcctcccgagtagctgagattagaggcgcgtaccactagacccagctccttttttttttttttttttttttttttgtatttttagtagagacagggtttcaccatattggtcaggatggtctcgatctcctgacctcgtgatccacccaccttggcctcccaaagtgctggattacaggcgtgagccaccgtgcccagcctttttgtatttttagtagagatggggttttaccgtgttggtcaggctggtctcgagctcctgacctcgtgatccacctgccttggcctcccaaagtgctgggattacaggcgtgagccactgcacccgggcttgaccaaagtcttttagtgtctgaaatatcatttgaagattttcttttggctacagaatatgtagatacccccattgtgaatacattaacctactatgctttaacaaagtaattatagaacccgatcatatcagatgaattttgtagttccctggttgtaaacggttatactatttaataacctattttaatattaccctaagtatttatagtacatttaatattactgtaagtaatatagtatttaatgttactctaggaagtaatgtttattagggttatattcagtgttgatgttggaaaaacttggtgttttttggtcttaaaccatcggtttaaaagtaacaatttctaatgaatgtgttttttctctcttcagacttttgataaaattcttgttgctaatagaggagaaattgcatgtcgggtgagtagaattttcgtcttattttccattttactctgaaattatttattaaacccctttaagtgtgaatcactattaatagacattaatatattttaaaataggttattagaacttgcaagaagatgggcattaagacagttgccatccacagtgatgttgatgctagttctgtaagtatatttttgctttgtttaaatcaggacttaattttgggtcaagcagaaaaagtgagacatacaggctttttttcttggcctgcacaagatacattcaagtttaaaaactgtttacttgttcactgttgtgttaagcaaaacgacagtatcacagtatcttctatatgtgccgtaagtattttcttttcatagctttaaaaacttagacagaaaaattgccaggctgattgctggtcaccaagtagatttaagcaaagcatgagaaaatttgagtcaaagattaatgaaatgtttacacagtgctcccttatgagagcactttcccccagcatagcttcagtatcactaagggaatgctacaattgtttaacctttcctaaatgcttcaacgtgttcagctgaaagtttgacaaaaatgaaaggtaggctaatgctaattggatacaaacaaaagaaggtttagcataaagcagatatacttttatttggtacttttaacacagcaggccttttttttttttttttttgggacagagtcttgctttgttgtccaggctggagtgcagtggtgtgatctcacctcactacaacctctgcctcctgggttcaagcgattctcccgcctcagcctccggagtagctgggattacaagcacctgccatcatgcctggctgatttttgtatttttgtagagacagggtttcaccaagttggccaggctggtgttgaactcctgaccttaggtgatctgcctgccccggcctcccaaagtgctgggattacaggcttgagccaccacacccggcccacagcagggattttttttagtagtaatgttatgaatgagtagaaaaaaatcccatggggaaagaatgtaaattattaaatctttatggcatgaaatataagtagttgaatactaatgcaagcattgtttctcattgtctcatactacttttgataatgggaccctttggtagggtccatcagttaatgacagggatatgttctgagaaatgcatcgttaggtgaattcaatattgtgtgaccatcacagaatgtacttacacaaaccttgatgatacagcctagtacacacctatatagtatagcctattcctcctgtgctacaaacctgtgcagcacgtgactgtactaaatactgtaggcaattgtaacacaatggtaagtatttgtgtatataagtgtatctaaacacagaaaaggtacagtaaaaatatagtataaaagataaaaaatggtacacttgtatagggcacttactgtgaatggagcttgcaggactggaagctggtctggatgagtcagggagtgatcaaaggcctaggacattaccgtcactactatagacttcataaacactgtatacttaggctacacgacatttatagaaaaatagttttctttcttcaataataaattaaccttagcataccataacttttttaaattataaacttttaaattttgtctttactctttgactctttcttttttttttttttttgagacagagtcttgctctgttggccaagctagagtgcagtggtgcagtcttggctcactgcaacctctgtctcccgggttcaagccattctcctgcctcatcctctccagtagctgggattacaggcatgtgtcaccacgctcggctaatttttgtatttttagtagagacggggtttcaccatgttggccaggctggtcttgaactcctgacctcaggtaatccacctgctttggcctcccaacgtgctgggattacaagcgtgagccaccacgcccggtttactctttgactctttcataataaaacagcataaaatgcaaacactgtataactgtacaaaaatgttttctttatatccttattttataagcttttttctgtttttaaagttttttatttttcatttatttttgactttttgaacttttttggtaaaaacgaagactcaaatgcacacattagcctagacctgcagaggatcaggctcatcaagacatcagtaggcatgggatcacatcaagttagaaagcttctacacagccaaggaaacaacaaaatgaagagacaacccacagaatgggagaagatatttgcaaactacccatctgatgagggattagtaactagaatgtataaggagctcaaacaactctataggaaaaaaatctagtaatttgattaaaaaatgggcaaaatggccaggtgtggtggttcacacctgtaatcccagcactttgggaggccaagcgggcagatcacttgaggtcatgagtttgagacctagaataaataaatggatgtttaaccagcctggctaagatggtgaaaccctgtctctactaaaaatacaaaaattagccgcgtgtggtggcacacatctgtagtcccagctacttggagactggggcaagaagcttgaacctgggaggtggaggttgctgtgagccaagatcgtgccactgcgctgtagcgtgggcgaccaggcgagactatgtccaaaggaaaataaaaaggggcaaaagatctgaatagtcatttctcaaaagaagacatacaaatcacaaacaggtatatgtaaaggtgctcgacattactgatcattacggaaatgcaaatcaaaagtacaatgagataaaatcttaccccggttaaaacggcttttatccaaaagacataacgagtactggcgaggatgtagagaaagaaccctcatatgctgttggtgggaatgtaaattaatacaaccactataaagaacagtatggaggtttctcaaaaaactaaaactatcatatgatccggctgctagatgtacatctgcttctaggtgtacacctagcaccagggaaatcagtatatggaggagatatctgcactcccatgtttattgtagcatttttcacaatagccaagatttggaggcaacttaagtatccatcaacagatgaatggataaagaaaatgtacatatgtacggtaccattcagccatagaaaagaatgagatcttgtcatttgcaatagcatggatggaactggtggaggacatgttaagtgaaataagccaggcacagaaagacaagttttgcatgtactcactcatttgtgggagctaaaaatgaaaacaattggactcatagagagagagtagaaggatggttaccagaggcttggcagggtgtatggagcgggaggggtggggatgattaatgagtacaagaatatagttagatggaataaataagatcttgtatttgatagcacaacagggtgactacagtctgcagtaatttgtggtacattttagaataatttagggaatagaattgggatgcttgtaacacaaataaatgaatgatttagatgatggctaccccatttatcctgatgtgattattatacattgtatgcttgtatcaaaatatttcatgtactccataaacatatacacctcctgtatacccacaaaaataaaaaaagacatcactaggcaaataggaatttttcagctccattattggagctgaaatgtagatgcagtacattaccgaccaagctgtcatatggcgcatgattgaattctgatctacaggtagacttttcagactttgcaaaagtggtttcaaaagaattgttgttaggtttttctcatttgtaccttccctgaagcagatgtggtagttttacattttagagacttttcaccacttctggctgaaagcagtagggaatataccagagattatgatacataatttataataaaatttaccagaccccacaatggaagcaattgcacactcagtcaaaactttctcttactatgacctactttaggtcaatttctagaaagatactataagtaaaagcaggataatgatggtgggaatgtcaaaagtttcatttaaacctcaacagtagggtcaaatctgctatgtggtttctgtttcagtctcaaggaggctgaaaaggtgaattcctgtaacagcatcttttgcatcctcagcacgtgatcacagaggttactatcatagctaatcagctttataatatcagtaatatgaaaaagccatgctattcagatgtattaatttttgcatgtttgttttcaagaggtgagcattttaaatgtaacttggagtaaaaaactttataggctttgtatgttaatttcacatgtggaaatgtaaatactattccagtaggaaaatactgcaacaattgattgcaaaagctattcattgtctattataaacaactaatttttaaggtaattatgcaaggaaaaagatgaatggatactgcacatatcaactaataagtcacacaaggaaggaaagccagctaacttgcaaacaattaatgtttgatagaaaaatgttggcttttagagatgattatgcagtttacctctgttggtcccttccctccaacatgttcttcaaaattgtcttcagtattcttggtccttcgctcttccatgtgaattttaggatgagctggccaattaccccccttccccaatttttagataccatgaacaagatttttataagtataacttttgcatgtctttttgtgaacataattttgattttttttgggtaaatatctaggagtggagtagctgggtcttagggtagataaggagttggcaacctttttttgtttgaaagtaaatacatttttgtctggatagcaaatatattttagattttgcaggcccctgtggtcgctgttacatatgcttctttttgttttgttttgttttgttttaacaacactttaaaaatgtgaaaactattgttagcttgagagctgtgcaaaaacagcccttggatcagatttggccagtgggtagacagtattttgctgatgcctagaataaatacatgcatgtttaaatttataagaagctgctaaatagttctccttcatggttgtatcatattttactccctccagaaatgtctaggtcagggtgcttttgtgtccttgccaacacttggtgttttcagtccatttgattttgtgttttatttttaagtggttgtgaagcagtatgtcattgtgtttttaattttagattttcctgatgaatactgatgttgagtacttttttgtgttattggtcattcatttatatttttttctgaagcatttcttcaaacataatgaaaaaaattagaaaagtagtaccagtatattggtatcagtttactgttatataccagtataacggtatctgtatacccttcacctagattcagcaattgttaacattttggcttgtttgctttatatttgtatccatatgtacattgtgtgtgtgcattttttttttttttggctaaacaatttgaaaataagttacaggacatggatgaagctggaaaccatcattctcagcaaactatcacagggacagaaaacaaaacactgcacgttctcactcataggtgggaattgaacaatgaagacacttggacacagggtagggaacatcacacactgtgtcctgttgtggggttgggggatgggggagggatagcattaggggaaatacctaatgtaaatgacgagttgatgggtgcagcaaaacaacatgagacatgtatacctatgtaacaaacctgcacgttgtgcacatgtaccctagaacttaaagtatatatatatatgtaaaaaaagcagcattaaaaagaatcccctggacaggaaaaagaaaaaaaaagaggccgggcgtagtggctcacgcctgtaatcccagcactttgggaggctgaggcgggcagatcatgagggcaggagatcgagaccatcctggctaacacggtgaaaccctgtctctactaaaaatacaaaaaattagccaggcgtggtggcaggctcctgtggtcccagctacttgggaggctgaggcaggagaatggtgtgaacccgggaggcggagcttgcagtgagctgagatcgtgccactgcagtccagcctgggcgacagagcaagactccatctcaaaaaaaaagaaaaaaaaaaaaaaagaaaataagttacagacattgtggcattttacccgtaaatactattcatctcgcagtaataagtatggttttctacatatctataataccttatgaaacctaagaaaataactcattattctataatatcatgtaatatgcctaccacattcaggtttttccagttgaccccagttgtcctttttaatatttttctttgatccacagttcaatcaaggttcatgagttacatttgtttattatacctctttagtctcttaatctaaaatagtgcccctattctccctctttttttgtttgatttttattatgttggcttttagatattttggctttgtatggaatctattttctcatgaatagattcagattaaatatttgacaagactacttcataagtgatgttctttctttttttcttttttttgtgacagagtctctctcagttgcccgggctggagtgcagtggtgagattataactcactgcagcctgacttcctgggcacaagcgatcctcccaccttagtttcccaagtagttgtgactacaggtgcatgccaccacgcctggctgatttttgtattttttgtaaagatggggtttcaccatctttcccaggctggtcttgaactcctgggctcaagagatcctcttgccttggcctcccaaagtgctaggattacaggcgtgagccaccgtaccccagccagtaatgttattttttttaatagtaatatcataacaagaggttcttaatgttgaattgttctgttgttatgctaagtatgatcatttggtttcatcaggtcttcccattataatggtacattttctttttttttattaaataatttttggggtgagtttttgaatccttgtgaatattttgtccctcaaccacctctcatctaatgtttttgcatcgataatgaaaattgcctgagcctgattactttggttacatttgtcttgtttgctgtctgtggagtaagctgttgattttctgctcctttttgaatctgcctgtttttatgtattatcttttttcttatgtatttgaggcctttagtatatttatttttagcatatttaatttaaagaatctatcatattattgtattatttcaagtttgtgggtgtttatttctattcctgactcttcctcataacatattgtttcctcgcatgtttaaattttggtgtgtgattctatgtttggtgcttttgttgttgaatttcaagatggtttgggttatggatttggccaggtaggataggtggtatatttgtttccatcacaccctccagggtatcactcatctgggactaatttttatattaaatttttggcataaagattgtcaaattttgaagataatgggaagaacaaaatgagattgcacacacacagatacacacctgttgaataggctcatggtttctaatatctagagacattttcgtttactttgaaccacagagatacgagcatagggtttatcctctctatttcgtaggttgattcctcccccacaacctttcactgagaatgtaatctttgagcctcctggctttagacagaagggtttccttcaaacctccaactcacacgggatctgtttcctttctctgatcgttaaaacccaatcttctagattattgagattcccaccttcactctccaagactggctcttgtggatgcagactgattttcatttttatattatttatttatttatttatttgagccggagttttgctcttgttgtccaggctggaatgcaatggcgcaatctcagctcactgcaacctccatctcctgggttcaagcgattctcctgcctcagcctcccgagtagctgggcttacaggcatgcatcaccaaactactgaattttcagtagagacagggtttcaccatgttggccaggctggtctcgaactcctgacctcaagtgatccacccgcctcagcctcccaaagtgctgggattacaggtttgagccaccatgcccagccagattttcagattactttttttttttttttttttgagacagagccttactctgttgcccaggctggagtgcagtggtgtgatcatagcaaactacagccatgaactcctgggctcaagtgattgtcctgcttcagcctcctgagtagctgggactacatgcacatgccgttgtgccctgcttcctttttctttttcatcccttgtagtttttttgtgagccaagctcttcatttgaaggatgtttgttatatttaatctaggtctttagatgtttctaaggaggatttgcaggttatttagttggcttattgttggtttgtcttaaaacaatatgacatcctattctttgttgaggaaattcccttaatttctttgagaaataaagactgatctagagcagtcttaaagtcaggctttccctaggaaaacaattcatttataatgatgagattaatgtgcctgaatccaggggatgaggctatagggaagcagtataaaatactccaatgggaattggtcagggcaggagaaagcaaaatgggagttaagcctcttattaagtcatgaatttttttttatgtttcattttccaggccctaggaaagcacgcttattattctctgggaagatttgtggagaatagtttatgaagagaagacaattctagtgcaagaatgtaaccagctgggattttgattgatattgcattgtgtctgtagatcattttggagtgtatagctatctcaacgtttttaagtcttcctatccatgaacatgtgatattcttccatatttaggtcacttggatttctttcagcaatgttttgtagtttcatactactataagtgtaattagttttttaatttcaattttttaaattagttgcaagtctgtagaaatacaaatgattttcatataatgattttgattcctgtaaacttgctgaactcttttattagttctaatagttttttagtggatttcttaggttttttttttttttttttttttttaaagatggagtttctgtcacccaggctggagtgtcgtggcatgatcttggcccactgcaacctccacctcccgggggtcaagtgattctcctgcctcagcctcctgcgtagctggggttacaggcatgcgccaccacgcacagctaatttttttgtacttttagtagagatggggtttcaccatgttggccaggctggtctcgaactcctgacctcaagtgatcctcccgctgtggcctcccaaagtgctgggattacaggtgtgagccactgcgtctgggccttaggattcttttttttttttttttctctcttgagaccgagtctcattctgttgcccaggctggagtgcaatggtgcgatcttggctcactgtaacctccgcctcccaggttcaagcaattctcctgcttcagcctccggaatagctgggactacaggcatctgccaccacacccggctaattttttgtatttttagtagaggtggagtttcaccacgttgaccaggctgggctcaaactcctgaccttgtgatctgcccacctcagcctcccaaagtgctgggattacaggcatgagctactgtgcccggccaggattctttatataagatcatgtcatgtgtgaatagagatagttttacttctttccatctggatgctttttatttcatattcttgcctgatttctctggctttaacttccagaacaatgttgaagaggtgagaggaggcatccttgtcttgttcttcatcttagggggaaagcattcagcatttcacccttaaatttgatttaggctctggtattttcatagactttcattatcaggtggaagaagttaattgctattcctagtttactgagggatttttatcaagaacaggtgttgcattttttcaaatgctttttctgtgtttactgagatgatcatgtggtttttgtcctttatttatatggtgtattgttacattaattgatttttttgggtgttaaaccagccttgaattcctgagattaatcccacttggtcatgctgtgtaatcctttgtatatattgctggattcagtttgttagtattttattaattttgtgttcatatttacaagagatattgtctgcagttttcttatgatgtctttgcttggttttggtgttagtgtgatcctggcctcatgaattggaaacctttctctcatcttctagtttttttggaagaattggtattaacttttctttaaatgtctggtagaaatcaccagtgaagccatctgaatctgggcttctctttggttagtttttgattgttaaatctacctttttacttattgtaggttttttcagatattctgtttctttaatcagtgtctgtagtttatgtctttctacaaatgtgtccatttcatcaaagtttctagcttattggtatagtattttcttatttttattttataaggtcagtagtaatgtctcctctttcattcctaaatttagacatttgagccttcccttttttcttggtcactggcctagtctgttcaggcttgttatggattgtcatagtctgggtggcttataaacaacaggaatttatttctcatagttctggaggctgataagtcaagattgaggcactgttagatgttgtccctggtgagggctcctttcttagtttcttagtggagccttcttgctgtgtcctcacatggtggaaggagcaagggaaggatctcattcatgaggtctctgccacaagtgttctgaaatagcattccagaagtacaaggtgatacagttagtcaagagctataaattggtggataggaaaggcaaaaataagaagattgtattgagtttctagttatacaatgaactgaataactccttttcttttgagacaaattctcactctgtcgtccaggctggagtgcaatggcaccatcttggttcattgcaacctccgcctcacaggttcaagcattctcatgcctcagcctcccgagtagctaggattacaggtgcctgccaccatgcctggctaggatttgtattttagtagagttggggtttcaccatattggccaggctggtctcaaactactgacctcaggtgatccaccctcctcggcttcccaaagtgctgggattacaggcgtgagccactgcacctggccctgaataactctttagaaacagaaaaaatctctggtggttggttaaatagtaaatataaataaatctataaatttcctatatatcaataaggtagaaaatacaacaagaaatgtaacctcgtagaagcaatggaaatgataaaacactgtatgatgtgaatttaaaatgaaatttttaggacttacatgaggacttcttatttttgtatagggaaaccgatttttaaaaatgctcttttctgtacattttctattaaatcctaatataacaacataatggggggggattgacaaagagtaaatatgcaagaatagcctagataattctgaggaaaattgatggggagtagcctaacatattaaaatacattttaatacattgtaagtcagcaagaagacataggtctatggaatacatttgttagattttaggcagtgggatgatgtgggaggatttttgagttgttaaagagggtctcatgaatattatgtggatttagaagacaaggtaattctaggattgcttgcctctaatttactgagatttttaggtatctcagagaagataagaaatataaggaatgagaaatgtttaatggctttagtgactaggagtttctaaatggacacatgggcccatttcattagtttggtgaatagtgagagcaaagaatttgggaatttaagattgttgtacttctccaaatgaatgttttaagtataaagactagtatgtctttccacaaaaatggtaaaatatattgtcacatttatatcaaactgctaaaataagttttgatattttttaaaaaatgagatctcatcaggttaaatgaaaagagttgagaatcttcattcccaaagaggaaaatgattctgtatatcaacagaatcattcaacctttgactgtattctctatctacgttcctaaattgaacctatctatacatattttgttgctttgtctgtgtacagtcatgttggatttaaatgagaaatatctgattttaccacgttgaaacaagaacctaaaattagggaagtattcactgtgactcacatcttacccaggcagcctgctgttgaaaggatgatccctggtgcgcactgtagtctcagcctcaggattctataatgagattgagtggggtttcctgtgagcactctggggtgattgacagtaaggtgagggcagtcatcactttttatgcctacccttgatgatatgtccctgctgtctggggagggaccgaggacgaataggacttggtgatgtctaagtaattagtgtatgttggttccagctgaacaaactggagggtaatgatcaggtaaatggaaatggaacacattaatgcagactaaggtataaaagaccttagggttaaacttttcaacattttatgggattattagaatatctttatttcattttttatatttacatgtctctgtatatacatacacttatttatatttttgtcagtgtatcttcagttttaccttagatgtatatagagatgaaagcaacttaaatgtgaaaacctcaaacgcattttttctcctttacatgatttcagaatattttcaaactttttctgtttggaaaggagttaaggttcttaattaaacattttctttttaatttcacaaaaattgttaatggacttgtttggagctgatgcctatcactgatcctcaaataggagcaaatgactaaagtcaggcttggaaaacttttttggggtgttaactgaaaagtatcaggtgaccttttatttgtgtgtgtgtgtgtgtgtgtgtgtgtacttgagaatgttatatttcagtaacattttcttaaactgccttttcttagtaaaggatattttaagatgatggctgtcctggtccatgtttcacagttggtcttaattagatcagaaatatttccagacatttaggttgcaataggaaatctataggattcttaatttattcttacaaaaggtatttatagttgccattcttcaatattaactttccttatcaacagcaaaaagtcttacggcaaagcctctggagagtgactgcagtactgcatttaatgggaagggaggaattgtttgccttagtatatggttttgaatctgggagtctggtaattaggtaatcaaagggtttaaaaaatggcataatggctttaaaacttgctattgctcacttttcttataaaacttagctttcagaaatctttttagattaagaatacaatgtacctactatgcaaatttaaaacaatagacttttcattaaagaactaaccaggagaagaaagcatttaagatgtgtagacatttcttttccttttctttttttcttttattgtctttggaaaaacttattttgcagaaacagtatactgtatcaattttaagtgttttgattatctttgacttggctaaattattttctctgcatttttgggtaaaatggaataggatgggattcctggtaggtatttgttcacattaatactatatttaattggagatcctgcagaatagtagcaggaggctgaagagaattatttagcattagcaatggctcgtctgggagttgtggactaatcaaggcgctgtagtgttagtggtggggatgatgggaattatgacgattatgacatgtaagcatgtctgtgtacgaattggacaggcaatgagttaatcaagaagtatgttaaatggctcccatgctgattcattattatctaccatagtgcctgtcaggttgtgtatttaaaaaacacaatcattgccaaattcaatatgtatatgagctgaattcagccattgtttgcttttccataaaataacctcagatttccttatatgtataaaaatagaaaattgtgtcaactgtgctgtgatttgtgtttatagtatggtatcttttttttttaacagagtcatttaaacctatgtttgctttgccctttcatatattcgtgtaaatattctctggcttgttttctatgcataaagggtttgggtttgaaagtgaaatttatgtgtctttacttttcaagatgaaaaaataattccagtatttcagagacaaattaatatttaacacatgaactatggacaaatcaaagcatgaatcttttccaccatcaaaatgcttgaatttaaattgggggtgggggtggaaacctcctttgctgtagcggggggtctctttgtgccaggtagacagacccattctgtgcccagcatggttggggttatctgtcaggaaactatctattagaaatgctagaaatgtatgtattttgggggaatggaactaataaattgaattccttttagaaaataaattgaaatgcagcataaatccatgagcaaactggattatatctctaggcaaatttaaagagttattgtacagatgaacaccatttttttttattattgtgagcactgccaaatttaataaaactttctaccaaactgtgactttcatgtattaacttaattaaagcagtgttatgggtaatactcagtgttaacctgtggatggctgttattgaaatccattatcaatggagtcagtattagtggtcagcagcatcagaagtaaaacttgcaaccaagaccctcccatgggtgctgtgagctcagcaggttaaattgtcaaaaaccagtaaagcttcttaaaggactgatagcttaagccacccggagttaaaggtaaactagtcattccagtcaagatggactatgactttatttagcagtcaggcaaaaattatatttgggcaggatttatatcagtatcttcatgtatgacttattcatttgtatgttcatgtaccttgctatttaaattcaataaaaccatccagctttttttaatctgtgggaagtgacttgtggatattttcttttataaaacgttaaggagatgtcttaagactttctgaattttttgttaataacttatactgaagttactttttacttatactaaaattttaaattaagaaaaaagtgaaatattgtattaatatatctttttggttttgtttattttataatttctggtaaacttaaacaacatggttttaaagggaatttatgtatttcagtgtaattagtacctgctgttatgaaaaagcacctaatcatggatttatttttctctaagcagctatttgggaaggatcagaagtcctatcttactgaaaaagcatacatataataaaagatttgagggccgggcgtggtggctcacgcccgtaatcccagcactttgggaggccgaggcaggcggatcatgaggtcaggagatcgagaccatcctggctaacacagtgaaaccccgtctctactaaaaatacaaaaagttagccgggcgtggtggtgggtgcgtgtagtcccagcttctcgggaggctgaggcaggagaatggcgtgaacctgagaagcagagcttgcactgagccgagatcgcgccactgcacttcagcctgggcgacagagctagactccgtctcaaaaaacaaaaaacaaaaaaaaagatttgatatacagtttaccttattctatgttccagtgtttctaaggccatgacttaactcatttttacagcctccctcattcagactccttagtggagggaaaggacatgattattccaaataatgcctctcactcattcagaatctatggtgtactggaaaagcacataattacataaggattgaattactgttactgttttaaattgagaaaattggggcttcaagtataaagccaatcttcgggttgccaaagatcactgggctagtaagtagtggagctgagattcaaattatgtgtaacttctaagttgtactgtttccactgtgcatgttgcttctcatactaagtatgaggaaaagtcccctcccaccacaaaacgaagtgaagtttattactttgaaggcagagtttttattagtgcctgttggaggctgggtactatgataggtactggaactagaagagtgactggaagtgataggattgctgctttagagatgggtatagagaaataaaacataaataattacaaattgtgataagtgttatgagggaaacaagttgttgagagagaatcatggttcccttcagtaatagggtgctcagggaaagtcttgctgaggggtaaaatgtaagctgagaatgatggatgagaaggagtcagccagctaggcagacaagaccgcgtgcgcaaaggctctgagtcaccccagtctgcttctgtcctcagtactctactatagagttcttgctagtgtgaccaccagttttctcatgttaagtccagtggacatttttcagtcctcttctgtttgacttcccagaatcttttaacactattaccctttttcagacactctcatcctctggctttggtgccattttaatctcctagttttctctctacttctgtggccctcctctgtgtcccctctacaggaatcactcaaggtttgattggtgggctcttcttaaaattgttttattttttgtactttctctacccttaccctgaaagatggcattctcttccacttctgtttctgtggttttaatcaaccctagactccaactctgttttctctctctctgtgacgtctctagttgaatgttttaccactacctcaaacccagcattacccaaactgaactttgatccttcgggcttcttgtatctgaatcctcctgcagaagcacaagatgtaggaatttatgttcaccatcattctttctttcatttctcatttccaatttatgagcaagtccttttcataaataattttggaatctagtcacctatcttcacttcgttattgcttctttagcaaggtcttttaaaatcttctagtgaatcttttaatcttttagactgataaaattaatttcatctggggcagtttatctaatgtgaactgtttcagtttctgaagttttgtttgatagcgaatgctttcttactctgttttggaattttagttcataggctcttttttctggtgaaagttaaaaatgtttattgctcttcatgcttcatcttctcccttccctttgcttccttgaccttcctcttcctctctctttcctagtttctctctcaccccggccattgctgcctcccaccttctccctgaccagtagttttgtgggtgcccccccgccggcattttggattcctaatctacatccaggtcttatggtgatagtttggacacatggcagattagtcccagcagcttgttcagattttgaccctgaagctgtggttctgcctccctaggtccacagtctccaggagttgtagtgagctgtagttgcagacaatacttggtggcctcctcttcaggccaagggcagttcctctttggcctggtcttcaccagtggctctggctctcttctcagtcttgtgagaacattctcgccatctgtactttgcatttggcacttcctgcttctgaggaaccagccagtggttagcattgttatgcgtttttctcctgttttgagtttgtgaaatgtttaccatttatttctgcttacctgttttcttagttttcctttctgggttttattgtcattgttgtacatttgaagtagagagagcttttgaaatatgaactcactgtgccatcctttttttgtgctaaatttattgaagtccacaaaaaccagagaaaaatgtcagatctcaaaattgtgtttttgctcaatttcaagcatcaatttatccaagttacccacttgatacctgacttgccctacttagcaagtcgaggcattgttttgctggctctggcactctggctatagccagtcactcaccccacttgggattgcttcctttgctgcttgttcctgctgctgctcagtggcagctgccaagttggagtagcaaagggaaaagtttagtaggcatcttttaggaagacagaatgctgtctggagatggcagtggtggatttatatctgagtcattcatctgaattggaacctgtacaaaggaaaagaggttctagctcagataaatagatataaattcattgttgctatcttcaggcattcatttatttaattagatgcactgaaaagcactctcgaggtgtggggacagggtgtggtgtatccaatggagagtttgtagaaattgttaagttgaggtacaactgcttataaatagtatttgaaaatgtcttattttgtaaacaactgagtatttagttgattgcaaatcttcctgtaaatcaatgatagattagtttagtttccgggtctatagtatattcctcaaatggatagtaggtatttttgtaaaggggactttataattaaatatagcaaagtgtcttccgtggactgtattaattaaatgttacagatccccaggctgcactgatgaaactcagctgggatgctctacatgtgatagggaaatttggtttcaaaattacacaacctatttgtgaaggtttcgtgtaatttttcttttcagtaagaagtgtttccatgtatcagtttttttacatttaaaaaagtaatttattttcaattgtggtaaagtatacataacataaaagtttaccattttaaccatttgttatcaaaagatgatgagatctgtggaggaaaaaatggagagctttattttctatagaaaaaacttgcagactggggaggcatagttttcactagtgaaaatgttgctctaaagagaaaaaaaaaggggcttggcttaagtagggaaagttcttgccctcattctctgtgaggtctgtgcaaacgaaggattcaagcttgttcggttcagattgaaccctaatctggtgccagaagtgtctctgtcagatgttccttcgaaaggctggtgcaggggaggtttctgctgcaattcttcttggccccagtcacaggaactgttctggcttaagaacagttcttaatcaagagccgtgatttccaagaacgaagggtggtgaccactcttctctcactctgctatggccgcttggacccattgtctaaatgtgggtatattagccacagggagtgcatctcatctggagagcttgcagttttatttacaattttatttcacacatttttaagcatacagttcagtaacattaagcacattcacattgttttgcaggatgaaaagttctggaaacgggtggtggcgatggtttcgcattatcaatttttacctagtatgcttttttttatacagtgttttaaagtgttggaaaaaacttatgcctttacagtattttattatattagcttatgttcattgtatggggttgtaggcagtgacagatactcaacctttaacaaataccgttgagcacttgttatgtgaagatgctccacatcttttgaactaggcagttgtggttcctgcactcttgtggcttccagttcagtggaagaagcagacattttataattacatacatttatgacattagtgtaatgaaaaattatagggtgttttgtaagtgtggaacaggaggatctgaaccagcctggggagtcagggaatgcttttttgaggaattcacattttggcagagacctgaagggggtgacaagagttaggtgaagctgggagaggacaatactagggcagaatagagcttggtaatttccagaaagttagatagggctaatgtactcttaaacaggaggcctgcagtgttgttcacaatgttcacctatatgtagttgtgtttgttttttaaatttttaaaaattatcctatagtaataggatacccatctttcatacccttctgtggatatcagcacatgtgtagattatgtcactactagcacaatcagaatgcagagtagttccattacccctcagactcccttgtgagtcattacccctcagactcccttgtgtatcccattagtgtcacatccttttccaccctgacactggcaaccacggatgtgtttcccatcactatagcattgtcatttccacacagcgtgtaaccttttgagactggctactttcactcagaatatgtttttgtgattcatccaaactgttgtgtgtatcaatagaatgttccttttttattaccgagtagtgttgcattgtgtggatgcacaggtttttttaaatccatttacctgttgaaggacatttgggttgtttccagcttttgacaattatgaatagaactgttgtaaacatttgtgtacagattctgtttctctagtataaatatctaggagtgggattgctggtcatatggtaagtataagaaactgctagacttttccagagttgctataccagaatacaatgagagttgtagtggttcttcatccacttcagcagtcttgtcagtatttttttttttgagacagagtctcactctgtcaccggggctagagtgtagtggcaccatcttggctcactgcaacctccacctcccgggttcaagcgattctcctgcctcagcgtcctgagtagctgtagctggcattacaggcacctgtcactatgcccagctaactttttgtatttttactagagacggggtttcaccatgttggccaggctggtcttgaactcctgacctcgtgattcacctgcctcagcctcccaaactgctaggattatagacatgagccaccatgcccggcctcattttaaccactctaatatggtttggaagtagtatctcattgtggttttaatttgcatttgcctaatggttaatgatgatgaccttcttctcatgtgcttatttgccatccatgtatccttttcagtgaataagctttgcctgttttttaattcatttgtttgtttgtttttctgttgttgagtttagagtgttctttatgtattccgaatacaggtcctttgttggatgtatgattggcaaatagtttcttccagttggtaggttgtcttttttgtcctcttgacagtgtctactgcagatcacttgtttttaattttgataaagtcagctgatcacttttttcatctataggttgtgttttactgtcatgtctaagaactctttacctaacttcaggccacgaagattttcttcaagatttttgtagttttgccctttattgttagatatgtgatccatcttgagttaattctctgtaagatttgcagtcggtttttttgttttttgtttttttgcatatagatgttgaattatttcaacaccattcattgaaaatagtatttctctattgtgatggttaatattgagtgtcaacttgattgggttgaaggatgcaaagtattgtgtgtctgcaagggtgttaccaaaggaggttgacatttgagtcagtggactgagagaggcagacccacccccaatctgggtgggcaccctctaatcagctgccagcgtggctagaatgaagcaggcagaagagtgtggaaggacttgacttgctgagtcttccggccttcatctttctcttgtgctgcatgcttcctgacctcgaacatcagactccaagttcttcagcctttggactcttggacttaactggtttgccaggggctctgaggccttcagccacagactgaaggctgtactgtcggctttcctacttttgaggttttgggactcagactggcttccctgctcttagcttgcagatggcctgttgtggtacttcaccttgtgatcatgcgagtcaatactctttaataaactccccttcatatgtacatccatactgttagttctgtccctttagagaaccctgactaatacaattacttttgcacctctgtcaaaaatcaaatggggtgatatttggatgggtttcttgactctgttctttttcattcatctgtgtctattcccttgtcagtactacatagtgttaaaattggattcctctacctttctttttctccccccatttttccaaaactgcttcagctattctggttcatttgccttttcgtatacattttagaatcagcttatgtttatgtacacacacaaaaaaaatcctgctgagattttgattagaattttgttgaatctacatcagtttgggaagaattgacattttccactgtgttgagtcttccaatccatgaacatggcatgtctcttaatttatttaggttttctttgttggtggtggtattcttagacagggtcttgctctgttgcccaggctggagtgcagttgtgtgatcatagctcactgtaggcttgaccacctgggctcaaacctcccacctcagcctcctgagtagctgggattacaggcttgtgccaccatgcccagctaggtttttaatttttttgtagagacagggtctccctatattgtcaaggctggtcctgaactcctgtgctcaagcagttctcttgctttgggattacaggtgtgagccaccatgcctagcctgtttaggtctgctttgatttctttcattagcatttcatagttttcaatatgcagatcctgcacatgctttgttttgtttgttttttgtagacagggtcttactgtgttgcccaggctggcctcaaactcctgggctcaagtgatcctcccaccacagcctcccaaatagctcccaactgtaggtacatgccaccatgcccagcttgtactgttttgttagatttttaacctaagtgtaatttttttttggagactcttaaaattgtattgtttggccaggcgtggtggctcgcatctgtaatcctagcactttgggaggctgaggtgggaggatcattgagccaggagtttgagaccagcctgggcaacatagccagaccctgtctctacaaacaaacaaaaatatagtagggtgtaggggcacatacctgtagtcctagctgctctggaggctgagagggagaattgcttgagcccaggagtttaaggctgcaatgagttatgatcacaacacttacattccagcctgggtgacagagtgagactctgtctctttaaaaaaattattgtttaggccggtgacagagtgagactccgttattgtttaaaaaattttggtttccagttgtacattgctagtagtagaagtatgattaatgtttgaatgttgaccttgcattctgtgatcttgctaaactcattagttctaggagtattttcgtaggttccttggggttgtctatgtagataatcatgttgtctgtgaacagagacagttcgatttttttttctttataatttgtatgtcttttattttatttttttctgttgctctagttaggaattccagtatgaagaggaagaggagtagcagtggtgcacattcttgccttattcccaatcttagtggaaaagtgttcagtcattcagaattaagtatggtattagctgtgggttttttgtggttgctttttatcaggttgaggaagatcctgtctactcctaatctgccaatgaatgttgaatgttgtcttacacttttcctaaatcaattgatatgatcatgtggggtttttttccttttgattgtaatatgctattttacgctgagcgattgatttttttagtatgaagctacttttgcattttggttgtggtgtattgttttttatatattgctggattggacttcttaattttttgttaaggattttttacatcattattatgagggacattggtctgcagttttctttttgtgtactgtctttggtattagcataatgttgtccttataaaattaattgggaaatgtttcttctctgaatgagagtgtataaaattgtttttttttttttttttttgagatggagtttcactcttgttgcccaggctggagtgcaatggtgtgatctcggctcactgcaacctccacctcccgggttcaagtgattctcctgcctcagcatctcaagtagctggggttacaggcgtgcaccaccacgcctggctaatttttgtatttttagtagaggtggggtttctccatgttggtcaggctggtctcaaactcccaacctcaggtgatccacctgtcttggcctcccaaagtgctgggattacaggtgtgagccacgcgcccggcctataaaattgttcagaattctccagtgaaaccatctgggcctggagatttcttcttcagaaggttttaaatgacgtattcaagttctttaatagttattggagtattcaggttatctatcttattttgagtgtgttttgttagctttgtgttttgccatttttgaggaattggttcatttcatctaaattgtccaatttatgcacatagaattattcttagaaaccttttattatccttttaatatctgcatagtttgtagtgataacctctttcctttcttattttggatgtcgtttttttcttcttttcttagtctttttagagatttatcagttttattgatgctttagaataactagcttaggttgcattgatgtcttttttctctattttctcttttaaaaattattgatatctcctctgttgtgttcttccttctactttaggtttattttgcttttctttttctggtttgtaaggtaggagcttagattattgatttgagatatatcttcttatttaatactataattttctctctaagcactctaagtgcatctaatatttttttttatatattgtgttttcatttttgttaagaatgttttctgagacttccttttttgcacataggttatttaaaattgtttaatttccaagcatttggagatttttctactgtctttctgttatttatttctaatactaattctctttgttcagagatcatattttgtattattatagtttttttcagtgtgttaagttcattttctgatccaggtatgacctgttttgttgcatgtttcatgtgcacttgtaaagattgtgtcttctgttgttagacttcagtactgtataaatgtcagtgagatacaactggtttgtggtattgtccagttcctctatatccatgccaattttctactacttgtctttcttttgagagtcttgatgtttccaacgatgactgggttattgtctgtttctcctctcagttctgccagtttttgctttatgaagcactgttgttaggaacatacacattaaggattattgtatctttttggtgaattgaccctgttactattaggtaatgttcttctctatcccttgtaaatttctttgctctgaagcctactttttctgatactaacctaggcattccagcctttatttgcttgatgtttgcatcgtattttttcccatcattttacctttaaactacatatgtcattatatttgatgtgactctcttgtacacagcatatacttgggtcatattttgacaatctcttttaatttgtatgtttaagtcttttttttttttttatttttttcgagacagggtctcactctgtcatccaggctggagtgcagtggcgcgattatggcccactgcagcctcagcctcctgggcccaagtgatcctttcacctcagcctcctgagtaactgggaacacctctagctaattttctttcgtggagtcgtggtctccctatgttgtccaggctggtcttgaactcctggactcaagcattcctctcatttcagcctcccaaagtgttgggattaaggcatgaaccaccacacctggccacttttatgtttaatgtagttattgaaatgtttggcttttgggctactgttttattattttgtttttctatctagtttttttcactgtttcactctttgtgtcttcttttgcattatttgaactttttaaaagtattcctttgaaatttattgtgtttatgactatctcgtgtagtttttcttcaaattaatactttattgattataatatacatacttaacttcctatggtctattgaaaattcatattttaccaccttaattggaatatgtcagtcttaccatcatgcaggtatctacattctcttcttatgttatggttttcttacgtgttatatctgcatgcattgaaaaccccatcagacaatgttaaaatttttgctttcaacagttaaacgtatttcaaaagcaatgttatcatttctgttgctcttccttcattccttatgttccagatttccttctaatgttattttccttctgtctgaagaacttccttaagcagttttagagctgatctgctagcaactaatgctcttagttttcctttatttgaaaatgtcttggctgggtgcaatagctcacgcctgtaatcacagcactttgggaggccgaagcgggtggatcacgaggtcaggagttcaagaccagcctggccaagatggtgaaactctgtctctaccaaaactacaaaaaaattagccaggcgcagtggtaggcgtctgtaatcccagctacttgggaggctgaggcaggagaaaggcttgaaccaggacagtagaggttgcagtgagccaagatcacaccactgcactccagcctgggagacagagcaaaactccatctcaaaaaaaaaaaaaaaaaaaaaaagaaagaaagaaaatgtctttatttcgccttcattcttagaggatatttgcactgaatatagagtactgagttgacagttctttctttccagcacttgaaaaacattatgtcacttccttctggtctttgtggcttctgatgtgaaatccatagtagtttgagtatcattcctttatagttaatgtgttgtttttctttgtttactttcaggaattttgtctttaattttcagtggtttgattatgttttctgatttctttttgttaccctgtttgagattcactgaccttcttgaatatgtaggtttatgtcttttaccaaacttgggaagttttcagtccttattaaaaaaaatattttctcagcatggtgctgagaacattttttttcttcttttctctgatagacatgtatgttagacctttaagtattgttccatagtctcttgttaattttttctactctttttttctctcttgtttcagattgtataatttctgttgatcagtcttcagatttattgactctttcctttgtcatctgtagtctacccttgagcccatccagtatgttttttttaatttgattattgcatattttagtttaaaattttccattggtttctttttacaaattctgtttcttttctgatactttcaaagtttccatttgtttcaagagtgttcataattgcttgttggaaaactttaataataacttccttaaaatctttgtgagataatttcaacatttttgttactttggtcttggtatttgatttttccttccctgtaagagatttacttggttcttgggttaattttagatattttgagtatgatgttatgagacataatcctctgaatttagttcatttctttttaggatgttaatatttttgtttcagtagcaattaacttggttggcttcagagtgcacattccagtttttttttgtttttttttttcctgtgggcggtgggtctttgtactcctatacagatccaccccacatatgtgtcaacaactcatcagtctgggatctgtggttagttcagtgtttaaattctttggtatacttattagaattacatccatacatgcccaacctagggatgagctcagaagttcataaacaactttattgtgtcacttctccatgctagcttctcccattctggttctttaggccttcacttttcagtcttcttacttagaaatctgaggttttattaccttgctctgctgttcaaattttgtgtttgtgtccaggacgtgtaaagagcacagagagagcagaaaaaaccttggggttttacctgccctcttgagactgcagtttcactgattgaagaagaatgtttcttctctcattgttttggctcttgctggcatctatgtctgcctctggtaccacagccacaaaattacttgggggttggggcaaaaaagaatagagcaaaaggaaaaaaaatatgggaattgagatttccataatgttgtaagtatcaggagctccctttcctgccttttgagtgagatgaataggggttctcctggagttctctccatcagtgtccccatgcctactttgcatttcaggcttttccaaggtcggtcagggagatcatgggaggaaaagaaaatgataaaactcaccacttgtttatagtaatttgaattcttttcttccttgatctgcctgctactgtttgcttttccaagtctataaatacttgattcgtgcattcttttgaggtttcatagttgaattcagtgggatagttggggtggagcatgcttagtccatcttacctgcagttagaatggccaggggtgtttcttgaaagctacttagaaaacaaatgtgggaaggaattagcagaatgcatctttgcatcctgtatactatgttgtgtatcctatattatggtaaaagtttggttagataacagaggaaaataaaggaggttttcattgttgatagcactatgtcctaaccttcatctgaggttactgggagagaaaggaaagtgttacagctaattgcttgaatgactcaactgcagtaatatatagtaagctgctattaatgatgcagtatagcttgcctcctgtggatgttattttctttccataggagataaacattgagaatcacagacttcccaaaatccaaacactttaccgtgacattcaagatccattcaagttcctactgatttttcttctaccatcctttcccatcagtcccttttcatacactttattttcaagccatctcacagatttctatactggcacctttcacatttccaccatttcgaatgtactctttctctgttagttctctctcactttttttcatttattagaaatccagttttattgttcaatagccaattctctgtgaaaccatttgtacatgttattttttattacatttatttatttatgtatttatttatttatcagacagagtctcactctgtctcccaggctggagtgcagtggcgtgatctcggctcactgcaacctccacctcccaggttcaagtgattattatgcctcagcctcccgagtagctgggattacaggcatgcaccaccatgtccagctgatttttttgtatttttaatagagacagtgtttcaccatgttggccaggctggtttcaaactactgacctcaagtgatctgcccgccttggcctcccaaagtgctaagtttacaggcgtgaaccaccacacccagcctttattactcttaattgcagttggtgtataagtctttcataccagaccaaactcctggaggggtagaggactgtgatttatcatctttttataccttgctgtaataaagtatacctgtaataaatttttgagtggatcagggaaaagaaaggaagtgttcatgatttagttaatgttaaagggatatgatgggtggaacatcaaatagttgaattacataagagagtggaaaacaaaggcaagtactgtttaaatggaattaggaactaatgttttgggaaatatgtttcgatgactttgagtgttggcaataatacttggaaattcattttttctgatctttttattatatacagtttttcttccagtagggcagattttttttttctctagtcttttctcttctgagggccagctgccacctcctataaggtagagtttttctaccttgtgctgtccagatgtttctttttatttgaatttatttatttactcttttacacaaaagaggcatgccaacagctgcactaagtgttctttcctaagccagccagatgtttggacttggagaaaagttagattttgaaataaaagacaggtggattatagcccttcattcaaccattcagtttttccttgcctattgctgctgccaggtagggtgtctttaacccgtctttatagtacctcttgtcacaaatttagttccagaaattaaaggactaactcctcctgaaatctctatgagatgaaatgagccttctttttttttttttttttgagatggagtcttgctctgtctcccaggctggcgtgcagtggcatgatctcggctcatgcaacctccgcctcctgggttcaagtgattctcctacctcagcctcccgagtagttaggattacaagtgcgtgccacgacatccagctaatttttatatttttagtagagatggggttttgccatgttggccaggctggtctcaaactgctgacctcaggtgatccacccgcctcggcctcccaaagtgctgggattacaggcatgagccaccacacccagctgaaatgaaccttcttacagactagattctatgtggttgtcctagtatgaggctggtaagcttgctgacatcatgcttgggttttcatctgatgaggttcagctggtggcccagcatagcgtatcaggctccctgtgtatgacagtgccgctggagatgggtcattcttcgactagtaggtgatttgatctcccctgatacatttatgttttttcacattttgggctctgattctcccccttacatgggcttcaattccaaggaaggtaggagttgagatacaggtacccttctgtttttcaatcctgctactcttgctgtgtttatctgagtgtggttctcttatactctgtaaactaagtccctaaagaggaacttctgttcctggtagctggacctacttaaggagttgcaggtaaattcagtgaatggcatagtcactttgggtctttaactattgagttaaaatatctttggccaggtgcggtggctcatgcctgtaatcccagcattttgggatgctgaggtgggtggatcatttgagggtcaggagtttgagactagcctgaccaacatggtgaaaccccgtctctactaaaaatacaaaaaaaaattagctagctgtggtggtgcacgcctgtagtcccagctacttgggaggctgaggcatgagaattgtttgcacgtgggaggcagagattgcagtgagctgagattgcgccactgtactccagcctgggtgacagagcgagactctgcatccacaaaaaaaaaaaaataaaaaaaaaaaataaaaatctttattaattattagtcttggatgaataggaagaaataaaaattgtttcttgagctccttcaaagtacttattctgtcttcgggtatagaatgattttcttttttgggaaatggggagaaagaatatttatttttgaagagaaaataaaacacttctagacatttttgttttctttttgttgttgttgtttgtttggttttgagtcagggtcttgctctgtcacccaggctaaagtgtagtggcacgaccatagctcactgcaacttccaactcatgggctcatgcaatcattctgcctcagcctcccaagcagctgggattacaggtgccagccaccatgtctggctaattaagagaaatttttttttttttttgtagagatggggcctctgtgttgcccaagctggtctggaactcctgggctcaaatgatcctcccatcttggcctccgaaagtgttgggtttacaggcatgagccaccatgcccggccccagatatttctgatgtctttaaatttcataccactgcttggtgaaaaatgactgtgctaaggaaaacttcttgagctccgtaactgcttttcatgattaccttcaatgtctgggagctaactataccaggaagcttttgagtggttgattttgctgctatttgtaatactcatctgatagtttttggtaagaaactaaacagccatataccgtaaatcaagagctgtcctgtcttttgggatcccagcaaaaatattggataatgtgggaaatggaatctgagcccagaaagccagcttttagagtttctaggaatgccatgatgtctgcatagatactaggagaaagatactcaccattaagatacataaatagaggaatggctgtagtaatttaggactggtatgatcactttcatgtactcatttttatatcatattagatgctcactagattagttgatgcttttcatgacagtcttaaaaataagttttaactgattaattgtagaaaactatgttcttgtttataatctttgatttttaaattaaaaatacatacactatatatttcctatgttaagaaatgaaaaaatttaaaagtcctgacttataattaaggctgttgggatgagccagacttcatcttcctgtcccaaattcccagggatgagaaaaagttgaagagaaaagacctaaagataaacaacaaaccagaattttgatggaaaatggtaaagagtactcatgggatcctggaaatgctggtcctggaaacagtgaggaattttgcaagagagatggctgatgggatcatgccccaggaaaccccagtctgaaacacagataggagaggatggctgcaaagatgggagcagctccagaggagacagccttgagcacaagaagtgacatccagctaggtgattcttccacactcagtgtccatgagggagcagatgattcgtaaacaggtagagccatatcttggaattctttagtagttaaaaagactgaggtggatctctgtatatcaacagagaacatctctaagacattaaaaatggaaagagaacttgtgtaaggacacatatggtataatgataccattaatggtaaaagaatcccaacctaaaatatctttatagttacctatgtaaaagcatacagcataggttctcaacagtggcattgttcacattatgggttagaggactctgtcatgggcgactgtcctgcacactagagggtttttagcagcatccctggcgtcttaccctctagatactagtcgtgtcccctcaggccccagtagtgacagccaaaactatctacagacattgccaactgtgtcctgggggacaaaattgctccaagttgggatcccttggcatatattgaagtctaataatgcatattcacctgttaagtgattaccggagagagacattgtaatggggacaggtgtggtcagtggagttgttagctttattttgaataagaatgtttaggtataacggtagggcgcagtggctcacgcctgtaatcccagcactttggaaggccaaggcaggcagatcatgaggttaggagatggagaccatcctggctaagatggtgaaacccatctctactaaaaatacaaaaaaatagctgggcatggtgacatacacctgtagtccctgcgactcaggaggctgaggcaggagaatcgcttgaacccaggaggtggaggttgcggtgagccaagattgcaccattgcactccagcctgggcgacagagtgagactccgtctcaaaaaaaaaaaaaaagtttagctattacatatatttacatatattacatgtaattaaaaacaaaacaaaagatagttttgcttttttttttttgagacagagtctcactctatcgcccaggctggagtgcgctggtgcaatctcggcagctcgctgcaatctctgcctcctgggttcaagtgattcttgtgcctcagtctcccaagcagctgggaccatagatatgcgccaccacactcggctaattttttgtatttttagcagagatggggttttgccatgctggccaggctgatctcaaactcctggcctcaagcgatctgcctgcctccacctcccaaagtgctgggattacaggcgtgagccaccgcaccggccagctttgcttttttataagatatctgttgtattaaatttaaaaatggttaatggtggctgggcgcggtggctcatgcctgtaatcccagcactttgggaggccgaggcagacggatcacggggtcaggagtttgagaccagcctgaccaacatggtgaaaccccgtctccactaaaactacaaaaattagccaggtgttgtggcacatgcctgtaatcccagctactcaggaggctgaggcaggagaatcacttgaacccaagaggcggaggttgcagtgagccaagatcgtgccactgcactccagcctaggcaacagagtgagactctgtctcaaaaaaaaaaaaaaatggttaatagttagaagaaatacaggtagcttacaaacgtgcaaatgtgcccaaactcactaataaccaggaaaatgcgaattaaaaaaatgaatcatttttctccattacattaataaaattagaaagataaatcatgttcagtgatggtgtagtgttgggaaattaatctctaatagtagtgtaagttgacctaagattttaaatgtgtagtttgtggtatttgtatttaaattaaatatttttcttatagaaatatacatatgtatgcagattggcatgtttagggaagcttattgcagcgcacaatacctgcaaattggaaccatgtccaatactaggagaatggttaaataagttatggttcatctagattactagaaatactgggtagcagttaaaaattatgaggtagaattctaaaaaaaaaaaaaactgagtgataaaattagttgtagaataaaatgtagtgtgattcagtttataccaagaaaaatcttaaacatgaaataaaactctgcacctttatttctgcatatccatatgaaaatgcttaggtaagtttggaaggacacatgcaaaactgatcatggctggataacaggaaatgggactaggagcctttaaaacggggcagggaataatggttatctggtatctatactgcttaagctttttttctttttaaccaaaggagtaactcatacattacttgggtaattacaataaaattgaaaaatgtaagaacatctaaatgacttgctttatatgcatagtgtcatcatttagtggcctgtgttgagcagtgatagctgctgctggggctctggtagggctttaagatcccatgacttttggtggctctccatattttgtggaattggcattagctgttcatatggtttggaaacacttttttaaaaatattgatttcagtggagattatttcccaaccctattcctagaatttcactctgttattgcttcagaaagatgtattcagaaatatatgcctgtgtatttatgacttcatcactagactttgaatgcatgtgtgatagctttctctttagtaagtggaaattaatcttaaagattgcaagctagagctgagcccacactcttactggtattttcttgtttcctcccctaacctaacttgtcatagtttttcttaggtagtattatttatttctttttttactacgtagtgacattcttcaaatgtatactttcactctggcttgtccgtaattggctggaaattgtgatggatctatatagttttttttgtgtttttaataaaatctgtataacataaagtttactattttgctcattttatttcatttatttaattattattttatatttttacagatggggtcacactgtgttgcccaggttggactcgaactcctgggcttgagtgatcctcctgcctcagcctcctaagccgtggggactacaggaactgggccactgcacacggcagttttagtctttttattttttattttttgagacagggtctcactctgttagccaggatggagtgcagtggtggaatcacagctcactgccaccttagcctccacttgggaagcctcttgggtctgccactgcttgtcagaaactttttactctgaattatgtcatatctcaggtgtttttacctagttattttgcacattacccttctcaaaggcatttgttcaagtttttcctaagctaatgaaggaaaacaaacctgagtcatctcttggctgtcactctgcctctcctactctttacatccagccatatgtacagtcctcaccccacccaccccacccctactctactttttcctctgctttattccgcagtcctttcatttgtggtctggtacccaccagctacactgacatgactcttgctaaggttttgcttgaatacttgatgtctcctttctctctgtcattcctccccttctcccttgatgcttctactaaggggtcagtggtatgagaagatagttctcctcctgctggttttcattattttgttgtttactgtatcgtcaggaatgcatgcttgcaagacaaagactaaaacaaaaaacaaaaaacccaaacagcaaaaaaaccccaaaacacctttgttttggttccgagatcgattcagtattagttcccttttgtgaaatgaaaacaggattgtagaaaatgggctgggaattttgcaactggcaaaaacgtattctctttttttcctgtagtttaaaattttaccactttgaaaatcatgtaagttatcttagaagaaaaatagtagtccactaattctaccatccaaaataaccatgaataaatatgtcttggtgctacacatgtagtttttcaaaatggaatcaaagcgaatctttaaaaaaaatcattttgttttctatgatcaaattgcctttctgggaaaggacatgccagaatgttagttttttaaaacttataaaagtatctttagatactttgaatgaaatagaaagagttctattctttttttttttagaaataggattttatctggttgtttgattttttttttttttttcagttattcaaatgaagattgatgcagttggctttcctttaaccttttagtctttcagggtaattttctttctttttttttttgagactcccaacaagtttattattttttaaattgtggtaaaatgcttataaggaaacttgccatcttaactatttttaagtgtacagttcagtggcattaagtacattcacattgttgtgcagccatcactataatctatctccagaactctcttcatattccaaactgaaactctgtacccatttaacagtaactccccattccaggctcgccacagtctctggcaaccactattctactttcaggataattttcattggttagtaatgtttggataatttgattagatttggtggatactgaagactggccgggttatgtaagctgttgctactttcagccaaggagtgcatctagtccgtattacatcatccttggagtgttctacccagtgtcttgcattgaaggacatcagaaggaaaactcctgtattctcagtcgtggtaaatagtgtccacttcattacagatctccttgagtgataggtttcaaaatatctctaggcatgaagaaacatttccaaacctgcttgtcttctctacctttctcagtatgtactagtttagaaggtattcaaaatgtttcactgagaccattgagttttatgctaaatataacatctggcctagcactttttatcactcatatgcaatctatttgataaggacagggaccaaatagaatgtctttttcaatgtattttaggcatctaattgactaatatgaaattttctattaatccagagtttttaaatgcaggcataattcccccccaccccgcccgcaaagattcagtcttgctctgttgcccaggctggagtgcagtggcctgatcggctcactgcaacctctgcctcccaggttcagcaattctcctgcctcagcctcccgagtagctgggattacaggcatgcaccattacgcccaggtaatttttcttttgtattttttggtagagacagggtttcaccatgttggtcaggctggtcttgaacccctgaccttgtgatccacccgcctcggcctcccaaagtgctgggattgcaggcgtgagctactgcacctggctgcaggcatactttttaacctatttatatccaaacatttaaatttattttttatttttattatttttaatatttttatcattgtatatgtttatttatattattatttcaaattgtttattaggtatgaattttacaaactttacttatattagcggtaacggtggagcgggagagtattgcgccttctccaagctccccggcgagaaccaccaatagtgtggtggaacttacggccgtttccaagggccagggctcttttggcctgcagatgtcagcccacacatctccctgtgctgtggactgatttggtgatccattaggtgtcaggatttcttctgatagctttatggaatggatcagtgaggataacctcaaaaaatttgtatgtggaatcttcaccaacccagtaagaattcaggactctcaaagccccacagtggcgtccagcttgctcctctgcaacggactgaaggcttggagcaaactttagctggttaacaccatgatggacaggcttgccataagttgcacccttaggaactgggcgttttcggccaccacggcaaacacgaatcctatatataacgtaaccttgcttggcctcgcagcccagtcagcgcgctttatcaggctgggtggggcggagagccctgtggagagcagagagctggcggtactgccagcagcggaccctcagaagaaagcgcatgacatcagactgctgctttctccgtagctcctggatgtactcgtatgcacccatcttggcttacctgatggctgctgccagacggaagaaaagaagtttaatttattttttaaaagttaataaagaagatgatttttctcagtcctgtaagatgaaaaacacatctgttgttctagttatttggaaattaggctcatacgggtaatagttgatgctagtaatttttctctgaagaataaaataattcaaaatagaaaactaaatgcttggctgggcgcggtggctcacacctgtaatcccagcactttgggaggctgaggtaggcggatcacctgaggtcgggagttcgagaccagcctgacccacatggagaaaccctatctctactaaaaatacaaagttagccggggttggtggcgcatgcctgtaatcccagctacttgggaaggctgaggcaggagaatcgcttgaacctgggaggtggaggttgcgatgagccgagatcgcgccattgcactccagcctgggcaagagcaaaaactctgtctcaaaaaaaaaaccaaacaaacagaaaacaaaacaaaacaaaaaaaaccctaaatgcttgatgggaaagctaataatctgctttaaaaatctctattggttttctgagaacggagaagtttatgaagacaaactatacttagtgttagtatttaaaatgctttacttttctttttgaaacatatagccagtaaatcctgcttagttgattagtgtacctcagtttaaactttccatggttgttatgtatttcctttgccattaaaatatataaaaaggaatttatatttttcaagatgttgaaatttttgaaacaaatatatctactcagcctatgcaatattaagtcattctgcagaatagcatctgcattgcttgaatattgtttgtttgttttgtattattaagccaaaaaaaacacctcacacatttcatacaacaatgacaacaaaattgaaatagagtttcaaaagtttgttagattgttctttccaggttgactcttaagtgtctctttaactaaggcagtagagaattcaaatgttttcttttgcatggccttttgctactagtgaccctgggctagactgtgggcttgttgagatgtgaatgtaccctgccccctgaagtaagatttgttcctgcaaatggaggaaaagaagccaaccaatcctttataaacaatttgtgtttagtccttctttgtaaagtccatagcagttttgacctgcttttaatgcatgatttattcaattgtttattggagcactcttttttttttttttttaaactggaacaatcttaatcacccagtaaaatatattaggctctgagctagttcttgataggtttattttatttatttatttatttttttgagacagagtctcactctgttgcccaggctggagtgcagtggcgcaatctcggctcactgcaagctccgcctcccgggttcacgccattctcctgcctcagcctcccgagtagctgggactacaggcgtccgccaccacgcctggctaattttttgtgtttttagtagaaacggggtttcaccatgttagccaggatggtctcggtctcctgacctcgtgatccgcccacctcagcctcccaaagtgctgggattacaggcatgagccaccgcgcccggcctagttcttggtatgtttataaaacgtttgtgataacataggaaaaatgtctattatgctagttaaaaaacaaaagggtgaaaattatatatgcggtatcattacgaaagtgtatttagagaaaagactaaaaatgtcaatactattaggattctctctctcctttttacttttgaatgcatgttcattatagaaattttggacacataaacacatgtgcctatgtgtatcttttaatttcttttccttgataaaccaccaattgccatatgtattgccaagattaagaagactttatgtaggtgtagatttttaccttaaacataatgaaaaaaaaataataaaagttgcaactttttgtacctcaaagacaatggcttttaacatttgataatgaaagttattaagcaagctgctatccaagtgtatctatgagtaaatagctttaatcacataacattgggctaggggagattaaaaaaagaatttaaggcgtaaccttatgatctggtggaggagaaattgtaactgtgcaaagcagttaaaatgagattgttgggtagatgagattatatgctaaaatctgcactaactactctcagagtttagattagaggagattcatcctaaattgaagtacttgggaaagatccagtggtagatgtgaaacttggagtccatcttctataataggtggtatctgaggacaataaaacaagtgtggatttaagtttaaacaaagacttaaatgtattctttttaaaggattgtgaagtactcaatttctttcttacagaagaaaactacaatcacaattacaacaacaaaattgacagtaacaggatctgaagtggacagagggcaatagggcaatagaggagggggcatcctggtctgagggcagaagagcaacttgaggttgggggcataccaggcaacgataaccacgaggaaggccttgctttgaacacagggatatttagaagccctttgcaagcagggctgcttttccctacaattggtattattaaataattaccgaatgtatatatttggatattttatagtaagatattgacctgaaaatcccttgggcatttacctgatcttttacctttcaatactcaatataattttttactaaagtggaaaatatttattgaattgacaaagagaattcttagctttctaaaagactacttttttagttttttaagatctcatttaaaacaaagtatttaaaaattatttcataactgaagactctaacagaaatactcaggtatttgccacctttgacttttttttttggtagaaggtgggtcataaatgtttaggtatatgtttgtgttccagtttttatatctgccttgcaaaataattgtaatctggaagtttctgaaactggaaagccattaggaaattaggaaaagtcatttaaaaagatagtaatcctttcatcagttaaaaagaatagactccttttagaactaagcagtttactctttttcatattgaatgcttagcttctattatgcaaaataaatagatttaaacattatagagtgagtagtcttaaaaatggagcatacattcctgaattttgagtagctttagaacttaatacacatatcatttcttttaggaataaatgtaaaatggatgaagattgaatgtgagagtatttaaatgattctcaagattttctggttcatgtgttgtgatattgaactctttctttcgtcttaggctttaatttgtgcctggtgctgacctgatgctgtgcagggacactcactgcatccctccattcagtccctctaattatcccaacttcctggggagcttgcttagaactgggcatgagtgctctttattaaaatattgggctaccctggctacatgtaacaaggtagtttttgatatcaaatttatgtattgatgaacggaataggaagctaaaattgtttgctgtgattttacataaagagataggggatattatggaaattatttggttagacaatgaattaggctgtaataaatgaaatcatggttaatagagttcctgagtttatttgttgcattgttgctttttagtgcatactcaaaaagaaatacgactctataaatgataggcagaacaatcagatttgcaattttgtgtgtatttgcagatgatggtaattctttttgctgggcgcatctgttaatgcagaaatttgtctcctcaggttcatgtgaaaatggcggatgaggctgtctgtgttggcccagctcccaccagtaaaagctacctcaacatggatgccatcatggaagccattaagaaaaccagggcccaagctgtgagtctgaatgaatctatctactgcagctgtttcatatgtagtgagcagaaagctagagtttgtatttaaaaaaaaaaataggaaagaatgattgaaaatgctgttgcagttagttcatgtcacatgagttaaatgtggtcgaattcgctactggaaatcaaaggctttgtagcatctggcagtgttggttgctgatcctgcaggtggctgctggattcagctttcacaccagggagcagtttcagttcatttccaaatttgctaggaaaaaagaaatcccaattagttttgagtattaaccctttccgtgtaataagagcattttaaaaaattctgtgttataaacaggatccaaagactgtgttcaaattccattttaataatttaaaaattacttatacctagtacacttccagaaataaaaacagcacatttggtaattattttagtttgttaatgtcagtagaatgctcataatttacaaggataaatcattctctccacccccagttctgtttgaatagagtggaatccaaggaaaaaaatgatttctgatatcagaaacagtgttttttcttctattttcttttttctttttttaattatcagaactaattatatatagtgttaaaaactatgcaaagttatctctaaaactggatggaaacatccaacaccagcaattaagcctggagcgcttcaattagcgctcacatttcttttgaaagaaatgttttagtaagatgaatgtttaaataaaaagcctaattcgtgaacccatattatagatgtttacagtttattagcacagttagtgaaggtaaaacactttaaccttttaactatagcttgccaaaataaatatgtagttgagtgttgataaaatgaagttggtggaatgaaaactcttcttctctgatacagtagtttaaattcttctgtaccatgctcataaagcttagttcagctttttttttgttttgttttttgagatggagtttcgctcttgttgcccaggccagagtgcgatggcgtgatcttggctcactgcaacctctgtcccgccaggttcaagcgattctcttgcctcagcctcccaagtagctgggattacaggtgcctgccaccatgcccagctaattttgtatttttagtagagaaggggtttcaccatgttggtcaggctggtcttgaactcctgacctcaggtgatctgcctgcctcagccttctaaactgctgggattacaggcaggagccactgtgcccagcccgagttcagcatttaaaagtcgctgatacgtagctatttctggattatgatactggttcctttagaaatttgactctctttttagcagaattattttactagaagtatgttcaacactggctgatactgaagtggcgaaatttatgtttggccagtctgggagagccaaaaattacttgattggatcaggctggtagattgtagcaatgtggcttgtgggtgaggatagtataaagtagttgtggatggcaaagtttggggtgaggaaggaaagaagagtagacattagaagaaaaaaaattcagagcacaaaataaaagtaaaaccacacctccattttagttcagtttgatagaaacggcttgttggtagttgccgagtattattaatgccatcaggaataaaatgtgttagctgtcctagtagtctgggttttggaaattaccagttcgtgagtactgtaaagaaaggagaatttagagtttttcatccatctttgccaaggttccttttacataattctttgatgcaccagccattgtgaaattctccagaattgtgggcaaagttagcctcaggaaaaggagagagagttttgttgaatagtgtagacaaatgccagtgggcaggaagctatgtgggcatatactccccattgtggttaggacaaaggtagtgtgtggaaaatgaatcagttaggacaaagggagtgtggagaaagtaaatataagaggcagtttcttggaatttgattctgatcctagaaatgtgagttagaactgatcagtgtataagagaagtgtacttattcaagggctcttgaacagtaaatattaatacataaatgcactgtacattttgcttataaagcttttgcaatatgataaaattgaaagtgctttttgctttcatttctaaggtacatccaggttatggattcctttcagaaaacaaagaatttgccagatgtttggtaagttggtaatgaaccagaaactgttcatttctttttcagaaagcagtgtggtagcatggctttgtaaatgtgggtagtgatggattatagaattttaattaacccagcagttctttgaaaattgtgacaagtgaagtggttttagtctgaaactcaactgtttatttgaagagtaattataaaaacagaaaagtttacaaaatcaccattacactgaatgaatgatacctggtttattatatactgcatgatatttgaattaaagttaaaaacttcagatttttaactgtaaatatgttagggagtttagtgagttattgtagtgatttaattattttgtggcatttaatatcaaatcttaccaatgcctctattttgggtgaagttgtttttaatgatctaaatgtccccttccagctaggtgaattaacgtatgtttgttattaaattgatttttccaggtatatttataacttcattcaagatggtactgaaaccttattttttaggtactagaatatgattttgattaatgtttgtacatatgtttgttattagatcaattatgccaggtactatcttaatttattctaatatgttatacttgtttctgtggcatacagtcatgtgttgcttaacagcgtgaatacattctgagaaatgcatcattaggcgagttcatccttgtgtgaacatcacagagtctacttacagaaatctacatggtagagtctcccacacacttaggctaagtgtgttatagcctattgctcctaggctacaaacctatacgtgttgctgtactggatcctgtaggctgttgtaatacagtggtagatatttgtgtatctaaacatgtaaacagggaagatacagttaaaaatacagtattagaatctatggaaccactgtcatacgtgtggtgcctcattgaaatattctgtggagcataactgtactcgtattctgttcttccacggattggaaattatttgtgaatgttgttattttctagatggaatttccacttaaaatctataactttaacttgaaacaattattaagatcacagaattgtctatttgaaccaccttgctttgtgggtccaaaactaaggcctaaagagatatcctgagggggcaaattacatggacacatccagaggttccagtttcccaggttttatgcagcatatctacatttttttgtttatatccctttttattttttatcttccttggaattttgaccaagattctgttattataaaaactatttgaatataatacttaaatttagatgtgtatgtgtgtatatatataatgtaatgtattacatttaagtccgtatagatgagaggtcggcacactacagtccacaggacaaatgcagcctgctgcctgtttttgtcaataaaattttattgaaacacagccatgctctttcatttatgcattgtctatgctgcttttgtcctgtgacagcagagttgagtagttgtgacagagaccatttggcctatcaagcctaaaatactttttctatggtcctttatacaaaaagtttgggaactcctgctataaatgaatatccaaatccaaattatatgagtaggataagtgatgtggtgccagtattatacatttattcctatacagttaatacatttatttattttatatattatatataatattatatacagtttatgcattttttcagttattaaaaaaatgctgcctttttttttttttttttttttttttttgagacatagccttgctctgtcacccaggctggaatgtagtggcatgatctcggctcactgcaacctctgtctcctgggttcaagctattctgcctcagcctcctgagtagctgggattacaggcacacaccaccacgcctggctaatttttgtatttttagtagagacggggtttcaccattttagtcaggctggtcttgaactcctgatgtcgtgatccgcccacctcagcttcccaaagtgctgggattacaggcgtgagccactgtgtctggccaaaaaatgcttctttaaagtctgtttaaggcctttgagaaggatatattaataaaaatgaatccaatctggttcccgcgcagaatgctgcagtccatgggtgctatgagtcctgggtgctcatagtcatgttacggaaaataagttgatacacaaataacttcacttcagggaagaaaatactgtgagataagatcaatatctttgtaaatgaaagtaagaaggatgatttccatctggggttctacattagagaaaaacctgtagaatatacaacctcctcctttctttcacacgagttttctttccaaacctatttccccatttcccttttatcagtgctgtgcctccacccagcctgactgtgcgctgctcccatgcgtggctggctctgccctcagtgctttcctcactctctctgggtgggtgtgcctggcctcccacccaccgtgtctaactgctgcctgcccttgaaggcacagttcatatgcagcctctgcggggaaagggttctagatccttctgttgagaagtaatttctttccttggactttttgtttcagtttgattggaatgtttttgtttttggaaaaatgatttgtgctttatctgatacattgtttttacttaatatccaggactaaaatgattttttgattttttttgcataactgctgtgtatttgctttagaaagtgtacaataggccaaattcccccaatgtaaaaacacaccaaactttacaagactgataattttttatgctgagtttacgcgaagtgggattggattttatacagtccctgctgtccatgacttgaaaaagatcatgtgggccgggcgcggtggctcatgcctgtaatccctgcactttgggaggctgaggtgggcagatcacttgaggtcaggaattcgagaccagcttggacaacatggcgaaaccccatctctactaaaaacataaaaattggccaggtatggtggcacgagcctttgatcccagctacgtgggtggctgaggcaggagaatcgtttgagcccgggaggtggaggttgcagtgagctgagatcacgctactgcactccagcctaggcaacagagcgagactctgtctaaaaaagaaaaaaaaaaaaagatcatgtctttttgttattgcttagatagttcatagaaaaaacaaagctacacataatcctcataaaaatagcaattttcaataattttaatgtgctgagctaacagattttatttccaagctgttttctattctgtattttccctgcaggcttcttttattatgagcattaaaggaccatccatgggagactatgaggattgttaggatgaggcaaagacatcttaacagagtttacaaagagctttgaaacgtgaaactaccttctctggaaaaatgggatgttggcttgaagatatttcttagtattctgtgttttctttctggtttttctatgttgttttaatcatattatcataccttgtcatttcaggtaacatagcataagttatagtaattagtttcaagagaaacatatgttagaatttgtgttttgtgtttggatcctatctgtgtacttgaaagatacacgtatatgtagatggatagtgagttccatcaggatgctcagcgttgaaagcataggagggaactgtgctgagcgtgtgaggtttggcgattgtgctcttttatcttctttctttcttgagtttttagcaagataagacatgtaactactgtaaaatgagaggtaatttttaaaatagccactgggttaaccaaaaaccttttaaatagctgtggcatccagtgtgggcaagggtcacatagttttgttcctggaagtgtaaattgtttcagacctcccccggcccccagaaatttgctagtatttatcaaaatttaaaacatctatatgttctttaatttaacagttccacccttaagaatctcacttacaaagatatacttgagaaaatgttcatggtaaggtgtttcataatagcaaaatttagaaagtgttcaaaagtaaaatgtggagaatggtggcttccctgcagggtcattggtcctcagttacaaggctgcagtccatgatgtgttatagtttaaagtgtgttgtaagcactttgtaactaatactaaaattctgaagttagcaagtttgccagtgactttgtttaacaatttttttgtttataaaataaagtggattaaaaatgatccatatgatactctactcattcatatttggactttttttttatttgagtaggaaaaaataggagagacttagaccttgcaagcccagggttgtttataactcttattttcactatatgggctataatctgcatagctcatggaaatacattatttttatatatcgcagcttaagaagggttgagaattgttactgtagtgtattttgtgtagacatcattttaatgacataaattttcttattaacattattatattttccattttggacacagacctttgattttagtatcttaaaatttttaatttttgagaatgtaaaatgctaagaaatttaagcacatgaaaacattgaaaattaggatttctttccatctttgaaccttcgaaacaagaccccaatttaagtctttagaggtcaccactgttaccttctggagcatgtgtgtctgtatgtgtgtgtgtgtgtgtgtgtgtgtgtgtgtctgtctgtctgcgtgtgctagaattttgctatcatttgttttgtaagatactcttagttgcttaagtaggacttactttttttatatgaaaagaagtggcatagaacttttcttatataagaaaacagtggtccctaggcttttaaaaataagtatggaatacctacctgcaggtaagttatttaatctttatgacaacttatgatgtattcttatttttattcttggttttatggaagagagaacaatctctgaaagtttaaataaatgccttgtccagtgtcacatagctggtaaatgagagagtatggatccgttgtttagtatatgttccagactgactctcagatgcattggaactgggctgggccgttagtggtatttgtttttgatcgatagctttagctggcatctgttcttgctgttggtggaggcttctctctttctgcttccttcccctcttccccattggtgtatcatcatagagatctaaaaagtagagttgtttcttttgtttttctcatcttgtaacttggatgccagtgaaggcaaatcctcacttggatttgctaacttactaagtaaggtaactgagtgagctttgctcagttaactgagtgccagagctacagcatagagatattgatgcctttaaccactcgttgatattcttaagtggaactaataaagtctccctggatttggaggagaaagttctgtgactcctttttccttttcataataattttataatatttttctagttgtgacttgtacatatgtgatgttcaaaagaattgataagaactaatgaatgcaacttcataaaacccttattatgacagaatatcttttgaaatgtttgagaacgtttcctttcctatatgttggcttaaggtcagcttttagaatatttgaagattttgaatgcgatgtggaatactaaatgctctaaagtgaatgcctgaaaaaggaaaactctccctttacagttagggagtcttttaaggatgtagataggtcagatacttttagggcttgtgggattttggggagtggtttcaataggaaaagtctgggatttgatgaggctgggatttttttccctttgcttgaggttaaaacagattgaagtgttacgttctagttttcctattacgctctctccttactgccctatgtatctattagctcattctggagtcagaatgacagctaaattctttctctgccacttagtagctgtgtgatcttggacaggttgtttaatgtcggcctctgaagattgtgttttattcttactatttgcatgatatgtatttctccatctgtgattttatgttgaaaatactgtgtgtttcttgtagccaggatgtagttgtgtcatgcttttgaaataattctgatggtctctatttttaaattgtagtgtttagactatgaagttttttcttctttagtttgccttagtgtattttcttaaatagcagctttattgagatttaattcatgtgtcatcaggctcaccctttaaaagtatacaattgagtgatttgtagtatagtcacagagttatgtaaccatcactgctatgcaatgtcagtaaaatccattaacatttaataaatgatcaaggtggttggatttatgtctagcattttattatttgttttctctcagtctcccctttttttccttctgttttccttttctgacttggattattttagtaatttttgaaattccattaaaatttatctattggatctatctatttttcagtgttttttctaggattgcaatatccatcctaacatttcatattctagttagagctaatatgataccatttcaagtaaaatgtagaaattttgcgatcatatagtccatcctccttctcttcccatcactatcctctatgttatagttgtcatatgtatttcatctgcatgtattataaattctatgtgaaaatgttataattttgttataaacatgttgaggtgagttaggacatttctttaaattgatctgtcaaatttaaaatatagagacaaatctctagattaaatattttatttgagaatcacagaattggaatttgagacatacacatggggtcttcagtatatccaaggaacaaagagaaggttgaaggttttattagatagaaaaaaaatgttactgattattttgaaagaaagttcattggtacttgaaaagctttgggagctggcaggctcggataggagagtggcagtggtagtttaaaaactagtcttagagtgatagcaggttgtttcagcagttactaggtaaagctggtcttagggttacagcaggctgtttcagcaactgggcctctggatagttcagttcttggagcctgtgctatgtgccctgagtgcttttttcccctgactccttgactcttatgtagttgggtatacaagaatgacccaattcatgtaatcaactttcacagatccaaatatcattcagttgaaattaagactcattttattttggtccatttaaaaaatgttgtcttttaaaattacatatgtatttttattgtggtaaagcagacataacataaaatttaccctttcaccaattttaagagtgtggctcagtggctttaattttattcacaatgttttgcaatcatcagctccagaactttataatcaccccaaactgaaactgtacatattaaacactaattccccatttcccacctactcctagcccctggtaaccttccttttactttctgtctctgtgagtttacctattctaggtacctcacataagtggaatcatataagatttgttcttttatgtctggcttatttcactcagcataatattttcaaggttcatccaagttccttcctctttaagactgaataatagtctactctgtggatataccatattttgtttcttcatcacctgttgatggacatttgggctgtttgtaccttttggctgttgtgaataatgctgctatgaacactggtgtataagtatctgtttgggtccctgcttttgcttctttttagtatatagctaggagaggaattgctgggtcctatggtaattctatgtttaactttttgaggttctgccctactgttttccatagtggctgtaccatttctcattcccattgttttattgtttttaataaccaccaaatcatgcctttccttaatgcaagctctgggtaattagttgactcattggatatttgtaatgtccgctttacataagtttaagaggtttaatttgacagtatcttcctaaccaatatgtttatgcttgttagtctagtgttactgccagagacctattgcacagacttgtgggagtattaatattttttcccctcacattttctttaatgaaaaatttaagaaatacagaaaagtttgaagaattgtactactacaaatgccagtagattctataattaacattttcttatttgtttttaacatatttattcatttgtgttttcctctactcatctatcaatctcattttcattttgcacgtcaacttaagttgtagataatagtacaattcactctcctgtacacttcagcatgcagtttttaaagcagagttcaggccaggtgtggtatcttacacctataatcccatcactttgggaggccgagataggaggatcacttgaggccagaagtttgagggtgtagcgagctatgaatccagcctgggtgacagagcaagaccctgtctcaaaaaaataaataagtaaataagtacaataaaaaaataaaccagagttcattattcatttacagcttttccaagaaagccttattgaaatataattgctattcaataaagtgcacatatataagaaattaattgtacacttatatgtgtacacttatgaaatcataatcacaatcagaataaagaatgtatccttcaactccaaagacttcctggtgctccttcgctggctctttcggccacttcctagccttcctcttcccctttaggcaactactgatctgttttcttatcatagattattttgcatttactagaattttatataggtggaataacacaagttatgctgttttttggatttttttttcacccagcaaaattattttgaaattgatgcatgtaattgtgtcagtacttcattccctgttttgttttgttttgttttggagacagagtttcccctcttttgcccaggctagagtgcagtggcacaacttccgcctcctgggctcaagtaattcttgtgcctcagcttcccaagtagctgggattacaggtgtgcaccaccatgcccagctaatttttgtatttttagtagagacgggattttgtcatgttggccaggctggtttcgaactcctggcctcaagtgagctgcctgcctcagcctcccaaagtgctgggattacaggtgtgagccaccgtgcctagcctgcattcctttttattgctgcattcatttctttttattccattgtatgggtttaccaccatatttttagtagccattcatctgttggtggacatgtgagttgtttccagcttttaactacaactagaggtgctatgaacaagtagttatgtgggcatatgctttcatttttttttggtaaatgcctaggagtggaatggctagatcatttgtatgttttatcttcttagaatctgcaaactcgttggtacaattttacatttccgccaacaatgtatgagtgtactagttgctccacattcttaccaccctttaaatttaactgttatactatgtagtgatgtcttattgtggttttgatttgcatttgtctgatgattaataatgttgagctcatttgctttatatctttgtcgatgtgtttgtgaagtcttttgtccatttttaaattgagttgcttgtcttatttagacatattagggttctttattctaggaaaaatcttttgtctggtacatgtcattgcaaatattttctcccatgatgtggttctgttttcatttactcagcagtatcttttgaagagcaacagcttttagtcttgttgaagtccaggttattaatttttttttcttttatagtttgaaccttttgagtcttaaaaatatgggccaggtgcagtggctcacacctgtaattctagcactttgggagactgaggtaggtggatctcttgagtccaagagttccagactagcctgggcaacatggtgaaaccccatctctacaaaaagtaacaaaaattagatgggcttggtggcatgcagctgtagtcctagctgcttgggaggctgaggtgggaggatcacttgagccttggagtttgaggctgcagtgagctgtggagtgttactgcagtccagcctgggtgacaaaagaagaatgtgtctcaaaataatgaattatttaaaaaaatagatatatgtaatttcttgccaaactcaaggtcactgagactttcttgttttttgttttgtatttttaatgttttatagttttagatctctgatcaattttgagttaatttttatatgtggtgtgaagtagggtctaaattaatcttttttgcatgtggctattcagtttgctatacaatctcttgaagaggttatcccttcctctttgaattgccttggcacccttgcagaaaaagtaatgggacatacatgtgcgatctcggctctctgcaagctctgcctcccgggttcatgccattctcctgcctcagcctcctgagtagctgggattataggcgcccaccaccacaactggctagataatgaactcttaaaaatactttgtccacaccccctttcatttactcccatgtattactaatcctgctgaggccgtcttggtgtgacctccttcctcaccactgaccccctcttttctctctcagaacttccttactttaacaatccagttgaacacatatgccaccttattcagcagttgaatctcaacctgagagattctagtgttcattcttcagttccacacataaccatcgtgagtaagagaggctcattcccatagaaggatgaggtttaagattgctccagtcattaacagtatacaagatgtcagatagcgttttactgggtctaagataaattaggctgtaaccaagaatatttatatatcaaaccagcctctccacacatcccaattataaattctggacaaaatagaaaaagctacataatacctatgggtaccagagagcagccacaattagacagaaataggaaggcgactacccttggaaggaggaaatggcatgggggcagtttccttttttggccttttttgaacagttcctggaatgaattctggagtgttccatgtatgcatgggtcagattccaagcactccagctgaggctaaaagaaccaaagagaattattagctgttacttatgctagtattgggggaaaatattcaagttctacctaggtgactcttgaaccccttttgaaatgtgacaacgtagcagatgctgttgatgctgctgtccaccctttctgcccggttgttagcgtcaccttaggtgaccatcccttccctgtgagtctcagtggtaaattctgactagtgaaatcctgaccaggattcattctcttccttaccaatgaccagtttatgggaggctcatggtccagtttgattcctggcaagtgaggggacctttcaagaaaaggtttcttttcattgtgtgaaataagcctttttaaaattattttaagccattgtaaactgagggtttttattgttgttgggatttttgttttgttattttaattttggccaaaactaccgggttgaaagaccagtgttttacagactgacattctattgaatcttaaaatagaatatagcttctgattcttgtgttaagctttctgaagtaatttagaaacaaaaccctctatggattacatggcaaaaaaggcatgtttcaaccataaagtaaattgttttaaaaatttcccttaatttggccaggcgcagtggctcacgcttgtaatcccagcactttcggaggccgaggtgggcggatcacctgaggtcagcagtttgagaccaacctggccaacatggtgaaaccccgtctctactaataatacaaaaattagccaggttggtggcgggtgcctgtaatcccagctactcaggaagctgaggtaggagaatcgctggaacccaggaggcagaggttgcagtgagctgagatcgtgccactacactccagcctgggcgacagagcgagactgtctcaaaaaaaaaaaaaaaaatcccttgatttatgtaaggattagtcacttttgtatgcaagtagaaggctgaactcatgctttttattttttattttattattattttttgagacggagtcttgctctgttgcccaggctagggtgcagtggcacgatcttggctcactgcaatctccgtctcccaggttcaagtgattctcctgcctcaggctcctgagtagctggaactacaggtgagcgccaccatgcctggctaatttctgtatttttttttttttttgagatggagtttcgctcttgttgcccagctggagtgcaatggtgcgatctcagttcgctacagactccgcctcccaggttcaagcaattctcctgcctcagcctcctgagtagctgggattacagatgcctaccaccttgcctggctaatttttgtatttttagtagagacggagtttcaccttgttgaccaggctggtctcaaactgctgacctcaggtgatcctcccacctcagcctccggaagtgctgggattataggcatgagccaccacacccagcctgaactcatgctttttgattcttctgtatcactcaggctttctggaggtgcttattaactctttgctagattagataagttgctgaattcaaatttagaattctggaaataaatgtagaagggatgctttgagaagcatccttgtgctttcattgtgttatgctattttaaacttacggtaacttcgtgatgtcttaaaatttattttcattgatttatttgtatgtgactcctaagcttagaattcagttggaaagatttttgtttttgttctagtgaaggaagtacattgctcgaggatttttttgggttaactgaagtaatgctagttatctctgttacatgtagttaatgattcttgttgcccccagatttgttctaaacttaaacttttaaatgcatgctttctaaaacaggcaaagaagcagaaataatgaaatgatcactggggctttgtttctgtactggtccttatttaaggatattacaatgttcctaagttaccattttgactcataatatgtgatatgctaatgttccaagcacagagtattcttttctgtatgtttccacttcccaacctacctatggtgtagcgcctgtctgtaccactacgtgtgtgcatgtgtacatgttcctagctttttattcagtcctttatgtgctagttgattgttgagtgcagataaaaataatgtgttgtatttcttaaccacaatatttgatttataaggaaatattttgataacagcatttatagtaatatatgctcttactgattagaatgccacaattgatagaaaatatattggatgtaaattagttacatatttacataatctatacacaagtaacagcatattttgtcagcatagcgtacagtagccataaaataagagtgggtgatacaatagagcattggttcccagtatgttctgtggtacctggggactcttgagaccctttcagacactctgaagtaaacaattttccataatagtttttcctgctctcattctctgaggattgtgcagtagagttttccatgtaacagtagagttatatgatatatgttatcacagcagattgaatgcaggaaccagatttgagaatccagctgtcttaagccacatgttaaagagatttgtgaaaatgtaaaacatttctactctaatgaatttgtcataaaaatgttacttctaattgttaacattaaatgggctattcttttgaaatacatttttaaaaatttcttaattttaacatggtaaatattgatatatacaacatgtataagccaaagctccttgagattgtcaatatttaaaactgtaaagcccagaaaatttgataggcactgtcctgaaaggtgactgggtagcctcttgagatagggtgatgacagtcttctctgagagtgtggcctttaagctgagattctagacagaatgagcatgcctcctctgactactatgccccactccacttccacattcttttttagccttagtataattacttccatgtcaagtcaaggacttttactcattcatttctgaattcctgttgcttaccactttacttactagtcattaataattctttacggccagacgcagtggcctacgcctgtaatcctagcagttcgggaggctgaagccagaggatcacttgagtccaggagttcaagaccagcctgggcacataggaaaaccccatctctacaaataatttaaaaattagctgggtgtggctgggcgcggtggctcacgcctgtaatctcagcactttgggaagccaaggtggacagatcacgaggtcaggagatggagaccatcctggctaacacggtgaaaccctgtctctactacaagtacaaaaaattagccgggcgtggtggcaggcacctgtagtcccagctactcgggaggctgaggcaggagaatggcgtgaacacaggaggcagagcttgcagtgagcggagttctcgccactgcattccagcttgggtgacagagtgagactctgtctcaaaaaaaaaaaaaaaaaatattagctgggtgtgttggcatgcgcctctggtcccagctgcttgggaagctgaggtgggaggattgcttgagcccaggagatggaggctgcagtgagctgagattgcaccactacactccagcctgggtgacagagcaaaaccctgtctcaaaaaaaaaaaaaaaatttacctttcagtggaattatttatatacatttctacacatgagacaaacttttgaaggaagtttaatgtctttggtattcacatcaaactaatttgacatatatttttatttagttttttttaaaaacaaatattttttaggatctgttatttcctattaaattccttttacatgaaagatcataaattgatttttaaaaatgacttctaatgttaatagggctttgtcttttagacatatttgttaatgataaatttgtttctgtaatttttatgctttgtagctttaatttgggcccatacgtaaagactatgtagttttattatcattcctgccgtcatcatccttgatcataccatttaaaagcaatagaagttttaaatggagtagtagagaaagacaatcaggaattaatgagtttagataaaataagagtacaagcaaacaaagttgattgtggccatgttatgaatgcgtgagatttcaacttttaacaaattaataactttttttgaacacttagtgtgtgccaggcactattcccacccctctgcatgtactaactcatttgctcttcctagcagccctatagacaggtactattatttctgcttttcaggcgaagaagcagaagttgctcaggatcacacagctgttagtgccagggcaaggatttgaaccccgtcattaccatgctcataactaccggactatgctacctctgaagaagagattatacagcttgttgtggcacaacacaaaaccttaaaatgttttcagctcttttttttttacccatccttattttttccccatatgactattatttattcagccttttggtatctagcttgcagaatatttcagggtcccaaagggactatataaagagctgtctgtaaaagttctgctttcctcccaaaagctagcagtgggaaaaacaggcaggagagataaggtgcaaagcacagggaggaagaaagagaatagtggaagcagcagtggtgatctgtagtggtgtctacagtgtgctggttctggttgagttggtacgggcagccatgtcagcaaccaagtcttcacttgttggaggactcgctttttacatgctctggctgggatggttttagttactaggatgtaggggacaggaataacggcatttggtagagattcaaaacagcaaccagggatgacgagctgcagacattgatcgatatcaagtaaataataagagatagaagataaaacagctctcaggtgccagaaagcaacttggtaatggagaaatacatatcctagagaaaggtagacaagtgtatttatcctctcaggaaattacctggataagtgtacatttctgcaaagcaaaatagagtcaagctcctgaactcctgctgcataggctggtaggtgttaatgggtgtctgaatggagaaggatgaggacttcaggtttctagtaaacttaaatgtgatatggtttggctgtgtccccacccaaatctcatcttgaattgtagctcctctaatccccacgtgttgtgggaggaacctggtggaaggtaattgaatcatggggggcaggtttctcctgtgttgttcttgtgatagtgaatcagtttcatgaaatctgatggttttataaatggcagttcccctgcacaagctctcttgcctgctgccatgtaagacatgcctttactccgccttcacttgccaccatgattgtggggcctccccagccatgtggagctgtaagtcaattaaacctttttctttataaattacccagttgtgggtatttcttcatagcagtatgaaaatggactaatacataatgattcccttgtttggaggattgtcagatactatatgaaaagcggtttcacatgtgcttaaaaaaacctgtatatgtgccttatggtgtcattatttctaatttatagatgtagaaataataatatttagagaaataaaatgctttttctaatcacatgccagtaggagatcagcaagctgggactagaactcaggttattttgattgaaattcttttttacgaagccctgagggttctaaaaagctcgagtttcactgtgaaccattgtatggaaaacttaaatgtagccagaaaccacatagagaaaataaccaggttttaaatgttttatagtataatatttgttgtggtactcttttatgggctttaagaatctagtatgctggagggctggggtggctcacgcctgtaatcccagcactttggggaggccaaatcaggcagatcacttgaggtcaggagttcaagatcagcctggccaacatggcgaaaccccgtccctactaaaaacacaaaaattagccaggcatggtggcgcatgcctgtagtcttagctactcaggaggctgaggcaggagaattgcttggacctggaaggtggaggttgcagtgagccaagattgcaccattgcactccagcctgggcaacaaagcaagaccccatctcaaaaaaaaaaaaaagaaaaaaaaagaaagagaatttagcatgcatttaggtaaccacagagataaaatcatattcaaatgtgcttgtattatgagtattactcttctttatgagtattctttggaaaaactattgtcacacaataacatattaattatatctttattcatttaccatatttgaaattctcattaaagttttaaaatgtattttaattataaaaataatttacttaaaaagttaataaatactagatgtctgttcacacttcatttttccactgtaagttgcagattagattatgatgaacagactataatcttctaatattctgtgccctagtaaatgagtccttgcttatgtaagtcagatattttgttattttgatatctaagtaattggttattatgatttatttttttcttgacaagcttctgagctttgttcagtcttgtcaagtccctggtgagttttagatctctgagtctagagtttgttgatcgaattaatgaataaaccaatagattagtacattgttgatttttttttcccccaaaccttagatcctatttgctctcttaggaaactgtttgaaagtattgcaacttttagagaagttttgcaaatcttagccacatgtctactaatgttttgcacactatttttagttgatgaaatgtaagcaatttatatttgtcttaactttccatctataaggtagtgagagtggtgacaggctgctctgttttgcagctagcatctttaattgatgttgaattgtggctttccgtgcacacagggttaagtgaaaaggttgcagtcatctagtgagcattttcctttaatgtgctcattagtggtggcaagtccaggtttcagcacatgtcagtaatttacatttcattgtggagaggctgcccttgttcaagagttgtttctaagcctgatgaatatatattgggaataaacagagtagaagaattgaaagccaaataccctgccaggcctttcagttggttctgaagcttccagtggatctctgattagcaatgcataaagcaggatgaaaatgcaaagatgaggcctacaaaagttgtcgcaggtagcttctccccttaaatcctctttttgtgactgcttttccatttcatcttctccaaattcttttttcatggcagacttcgttaaagtgaaaatactctgtgttagacgtaagatgtgaatactacaggatctacctggttcctgtaccccttctaactatgaagccaagtctgatcgttatgcaatgagttttcagaagcaaagggcttgataggcctcggttcttagggatcagatgattgtgattggaatctttgtgatgattccttctgggactcattttttccatctttgcctgattggtaggtaccagcttgttctggcttttgaaagcttgcatagatcagtaaagaataactgtggaggctgtggtcagtgttgttggggatagagacaggactctgaaattgtggtgtttgggaaaatccagaaattttctttttgtagaaaaacttcatatattaaaatgaagcatttttggaacttgggatttgattacaagttacttcatgcatagatggtgtagctttagaaaactcaggcctagctgtttttagaagaaaatgttataattctttatacattttaagtttaattatttacatgtgtataaaaatttgggtttattgcaagaaggtacgttttgatattgctgtttctgtgtgtttgtatgatacatctacccatgtatctgtctacttatttatctttgtggtgctagtcaaaacttgcagcttaagagaatttgttcagaattggtggttagaatcaaaagtgagtgaatttatgacttacattattgaaaaacattgacaaatgtcaggactcaagtccgatttttattattttactgtaaatccagttagatgtgatttagcacttggatcatttaaatataaaggcatgttagtcacagtttaagtctttatattagtttttttaattaggtagagttttaacagaggagcaacatggaaaatgtttatgtgtatgaggataaaaatgcaagtcttgagaatattagtttagtaatgttctgattagtgtttgtagcctttgtaaaaaatgtaaatttaccttctagatgactacttgaaactgttgtttttggatgcttgccagataaaagccctgtgggattaagttctggtaaatcgcttgcaaatttgtgagggatatcagtgactttgagtgtttaactgtccaagctgtcatctacatgcgtcctatcactgcattgggtgaaaaaattaagtttctcagccagttagaattaaaggtgacatctgcttttaattggtgttttattttcttccaagtcagtaaaaattcagtaagacatgaattatcaaattttgcaatgctaagcaacttgtcaagtgacagtaagcactaccttgagcagttgtacagatgggaagtgttaaaatgttgattaatcttccagagttctgattatgagaagactaaagcttatatcatcattgccagctttctagtgtcagagtagtatttatttgttaattttgtagacctttttcaattactgacaaattgtgtcttgcataatgaaaattttactagttttaataagacttggtctattagactaagggtcatagatggcaatgtagaattcatgtttctgttgtctattatttagtaaacatattagattctttttagtaaaaaactgaaaaaaatctaaacgtgagctttaagttttattctgttatacacattcatcctgtgttgagaagggagtatctgtttgaatcttggcaaaggaagtcttgcctgggccccctgttgaaaaagaaaatggattatttctgtttttaccatttataaaacattttaagatgtaaaacataaggacgaaaaaaatcatcaccttcaagtagtccatgtaaaaataactcaagtcttcaaacattctcagaactaaaaaagaccaaagaaaatattcccatcatactgattatgtttcaattttctagttactaaaaattagaacatggcactaagtagactatataaagtatgtctttaaaaattcaactgtgaaggagatcttttttttttgataatcattaatatgaaagtgaagtttctcttttccctgttataacagttctatgtagtagtagaggtagaattctgaattgaaggtggttaggacttatagcaacatttctgggatgagtttttcagtattcccagacttcaatttaattcagggtttcttttttgctctccacttatgaatatgtgataaatattttatgtagtcgtgtacttttgctatagaaaatcagtggattatttaatttgattcaggaaatctaccctgtatggttatttcgatgttgggtagattttatttcaacttaaaacgtagaaaagatgcttaggcaaatgatctaatagttttagatacatttggtaacttgtatcttaaaccccagggccaagtttagcagtcttacacatgtttagaaaatagttgaaaaatagaaaatttaggtctttttaggtaaactatacaaaacacttttatagtcattttgatgcctgataacttcagggttcattgcccctgtacatttttcaaattatttgcttctcaatccataaggctttaatttaccccctactgacaaatcccaaatgggtttttaagaattttgagagtggtctgctgtagttgtgcttcagcactggcttcaattgctgacacagaatctcttaagatgcaccaaatttagaaggataggaggttcaggcagcatttcctctggcaaatactaagattttatttgcggagggtggggacggagatacagaattactgttttctgtaatatttttctttctttgatcctgttttaatgcctgtttattaaaaaaaaataatttagacacaagatttagccacatttttttaattaattaaaatgtgtgggccgggcgcggtggctcatgcctgtaatcccagcactttgggaggctgaggcgggcggatcacaaggtcaggagatcgagaccatcttggctaacactgtgaaaccccatctctactaaaaatacaaaatattagctgggcgtggtggcaggcgcctgtaatcccagctactcgggaggctgaggcaggagaatggcatgaacccgggaggtggagcttgcagtgagccgagatcgtgccactgcactccagcctgggtgacagagcgagactccttctcaaaaaaaaaaaaaaaatatatatatatatatatttgtgcttgtttggatgggcttttttaatcttgaattttatagaataataaagttaagtatttgtaccttgacataccctaacacaattaagtattgcttccataaataattttgatcttataataaacataccttacatactgacgaataatattaacacaaatgtatactcccttagaggtgctcaaaatgactttcatgccacccttcatgcctgctgggttttaaggcataagagaaacagatgatttctgcattttactggaaaaaaaagactaaaatgtacagctagtattgaattggggtaataatctgccacttttttgcccttcaatgctgtcgtgatcttttagggaagtgaggtcatggtagacccgcttgttaatcatttctgcgttttcagctcagtttggtcatgaatacttgacttgctacctatagtcttgcttctgtttgcctctttgcatgcagctccttaaattgtttaaattaccatgctttctttatcatgtgatcctgtcatctattgacaattgattggatcaaggattagtgcctgacccaaggcagacatctacagaagggtcatcctcttcccacaatggtttattttcctgtctgtgtgtgtgtgtgtttgtgtgtgtgtgtacgtgtgtgtgtggtggtcatgaatggtggtggtgccaagaaggttgtgacatttgactaataactgatgatgagagaagcagccagcacttggagatctagagtaagagctctccaggcagagggaatagcaggtttaaatgttctgaggctggaatgagatttgagacatagaatatagagattggatatagagaaaggaactggtgtggcaggagaatcatgaatgagaaaacacgtggtacaagatgaggttgaaagggtaggtggctcagggcagatcagttagggtcattctaagaagctgggatttaggtctgagtgcattggggagctgctggaggagttttaagcatgtggtgcacttctgtatcacttctgacctaatgtgatgcacttctgtatcactgtaacaacagtgcatatcagactgaagaactatgtgattaagaacactttgctacataggagcagaaaaatttaaagaagaaacagtgccctagaagaagttaaattctcttgggcatccacctgtagacgtcctcactccttaatttgtcctgctgttcttagcatcatagctctctgtgaaaacaaagctatcttctaatttatactttgcaaatcatttgcttttccgtaaaccccattcttgcctattggggttaatctaataccaagatccaagattcctcttcccacaatggtttattttcctcaggctggattattcagtattgaaaaacagccccataagacaacccatgggaaccattgaccattcaggtcctaagaacagttagagttagggggtaggtgtggatacagaggttgtatgtatgtggtattccagtttaaggtggccactctcttctgatttctttctcctctgattttgtctcctccgatttctttcccctggtattaattactaatacgcttctttgactttctgtctggctagtaggtgaggttacgttgcacaaatgcttaaatgaatgcatgtatattggcatccttgtatatgggcttatgtttgcacacaaatactcaaattccagtgaagtttgctttgccaacatcctttccaccacaggtgatttgtggaagccagtcaggatcattttatcttccctgacaattattgattcagggattaatcaaggcttaagccattgtgggccactgaaacatgatgaaaggctttcctgggattcctggaaaaggaacctccttattcttaagagaaagacattggaagccaggttctcttgcattctcccccacccaccaccttgtgaatgagagagcttagttgctgctggcagccatattgtgaccatgagggtagctagcctgagggtaaagctgacttacagaataaggcagatctgagagaatggcagagaaatccagaattgggagatatatttttggaagaatttctgtctaaaagtgttggtggggtatgtgttatggcaagaagagagctgggatgtttaatgggttaacagcattttgttctttatcatatatttattgaaaaattttcctatcccattgtgctaggcactgaggaaattatttaaaaaataaagtagggcacagaacttgcctttccaggaaactcatttacaggtattgggttttgattctttctttctttcttctttggaaacagggtgttgctctgccgcctagccggccaggctagagtgtggtagggtgctcatggctcactgcaccttctgcctcctgggctcaagcaatcctcccaccgtagcctcctgagtaactgggactacaggcgtgcaccaccatgcctggctaatttttgtattttttgtagagatgtggtctcgccatgttactcaggctggtctcgaactcctgggctcaagtgatccgcttgtcttgattccttgtataactgccccttgtattggatttggggactgaaagaacacttagttactaatattcttttttttgtttttctttttctttttttctttttttttttttgagatggaatctcgctctgtcgcccaggctggagtgcagtggcgtgatcttggcttactgcaacctctgcctctgtgttcaagcgattctcctgcctcagcctcctgagtagctgggattacaggcacgcgccaccacacctggctaatttttgtatttttttgtagagatggggtctcgccatgtttctcaggctggtcttgaactccagggctcaagtgatctgcttgtcttgattccttctataactgccccttgtattagatttggggactgaaagaacacttagttactaatattgtttttttctttttctttttttttttttttttgagatggagtcttgctctgttgcccaggctggagtgcagtggcttgatcttggcttactgcaacctccacctccccgttcaagcgattctcctgcctcagcctcctgagtagctggaattacaggtgtgcgccaccacacctggctcatttttgtatttttagtagagacggggtttcaccatgttggccaggctgatctcaaactcctgacctcaggtgatcctcctgcctcggcctcccaaagtgctaggattacagcactgtgcctggccagttactaatattcagttttaaattttagaaacctagtacttaaagcacattaaactttgcttactgtggaaccagtgtcagggctgtgagttgccttcagtgatgttgctgggtagccaggcttatctgtgcgttatacgtgggtgctttgaggaatccaacaatgagaagatagctagccttgaagacagcactggaagcagagagtagccagcagtcagtcagtcttctctctgagtttatgctccattctttgaggtgtttctgcaagcctctctgctttccacctctgcttgtctggcttgcggccctgttggaacatgctgacttcattgctcctaagcctacatgatatagaccagggatcctgaaaagaggaaagcctctttttctctctgtccccatgccccattcctaggaaagggaccctgataggtctagtttgggccagctgccttttgccactcccgtctgttcagagagcaagattatgccattcacaaggtctacaactgaagaggtcttttgctgagtttgggaaaagggcagttcaggaaaatcagactaactctgccaccaaatgtctcttaaaccacataattatgggacagtatgataattgcagcaatcaaaggctgttgagtgttgtgtacaggaaggtagtggttaactctggtaggttgggggttgggtacagctgaagagaagattgtcaaacttcacataaagggtctgtgtgtgtgcgtgtgggtgcatgcatgcgtgtgtacgaaggattcatgagggggagtattttatattggtgtaggtgttggtttcctccccaagaatttattcctatcataaatactctctgtgcccctgtgacagtttcataactgtggtatcattagcgttacaaagtacagaagacagaataaaatcatggactttttgagctggaaagaccttgaaacttatctaatttgtttgacatacatcttttgatgtggcagattctggtaaatataaagacaaagcaggttccctaccctgaagaagtttatagggggactacagcagggaagaaatactgggaggagtttctctgattcccaggagaggatagctggccatcgggggaagtcagatgacgaagtcatccattttgatggaggagatgtgcccagaaaggcttcatgacgaaggtggcatttgaagtaggtcttgaagataggtagtgtttaggcaggggagatgatagaggagaagaatgggacacacaggtggaggggacattccaggaaggggctgtagtgtcgggatggcagaaaaaggggtgctgcattgagccatgagctgtgacagacctttgagtgtaagagtgtaagagtaagcccggaaggcgaggggccctgggtactgggcttgaatttgtttataccattcaagctttccagaaaacccctgtgagctttgaaatgcttcaggggagcattctgtgtgaggctggctttttctgcccttttcctcaattcagcaaatggcaagaaacttggtatcatctttgcccacctttgctgttaggccgtgtgctagtctgttcttgccttgctataaagaaatgcctgagactgggtaatttataagaaaagaggtttaattggctcacgattctacaggctgtacaagaagcgtggtgtcatctgcttctgaggaggcctcaggaaacttacagtcatggtggagggcaaagaggaagcaggcacgtcttacatgaacagagcaggactaagagagagagggggaaggttataactatagtagttattgcttcctgatagataatttgtttgtttctctttctcctctgctgaaatacagcctacacaaccataggagttcctgtctcttgattgttgctgtttcctcagtacctaggacagtgtctggctcatatatatttgtttaatgaacaaatgaataagagatgggttatttagctttaggccattcatggaaagtttaataccataaattctctgttaagtaggcagatatttataaatacagaaatggcttctaaggtgtctccgtaagatagctattcaactgttgcacgagcttatgatgactggaatcgtacgccctttcatcatatagaccagcatttggcaggctttttttctgtaaagggccagataataagtgttttaggctttgtgggccatactgtcacaaccattcaactccattctaaatactcagctcttctgttgtagtgtgaaagcagccctagactataggtaaatgaatgggtatggctgtgtttcaatacaactttcattatgaatacttaaatgggaatttcatgtaattttaacatgtcacgaagtattactctgcttttgatttttttcaactatttaaaaacataaaaaacctttcttagctcatagactacaaacgtggtgggctggatttggcctgtaggctgtaattggccagtacttgttatagagctttctgtcttcctcatctttaatggttagaaaattcttcattgtattaactgaaatctatctgtttagaatatttacctattttttcagtagtgaaataggacatatataccgaaaaatgcacataatgtaaatgtacagctttacaaattattgtgggcacccacataatattacctaggtcaaaaagtaagacaaatgtctgcaccctagaagccctttgcatgttcccttcaaatgatgctccttcctcccatcccaggaacactgtcctaactattatgggaatcattttcttgcttctctttatactttcacctccttaatatgcatcctatgaccctggagtttagttttgcctatttttttgaactttctatagatagaatcatatagttaaaaaaatttgctttctgtctttgtttctttctctctttttatcttttctttctttctaatattttctttttttctttcttttgacagttttgctctgtctcccaggctggagtgcagtggtatgatcatggctcactgcagcctcaccctcttgggctcaggtgattctcccacctcagcctcccgggtagctgggaccacaggcacaagccaccgtgcctggctaattttatgttttgcagagacaaggtctcaccatgttgcccaggctggtcttgaactcctgggctcaagtaatatgcctgccttggcgcctcccaaagtgttgggattacaagttttcttaaatttctttttctttttttttttttttgtgagacggagttttgctcttgttgcccacgctggagtgcaatggtgcgatctcggctcaccgcagcctccacctccgaggttcaagtggttctcctgcctcagccgctcaagtagctgggattacaggcatgtgccaccccgcctgactaattttgtatttttagtagagatggggtttctccatgttggtgaggctcgtctcgaactcccgacctcaggcgatccacccgccttggcctcccaaagtgctgggattacaggcgtaagccactgtgcccggctaaatttctttcagtaacatttattagtttcctgcttagaagtattgtgcattttcactgtatttattattagaagtttgagtcttaaaaattattcagttttctctttgatttcagtcttaccattccatctagttaaaatagctttgaatcaatattttatcattctttttcagcattggttcatcattgaattaggcaatcagtgtctttgtgtggcgttatacaagtatttagtaaaaatatccattagggaagggccaaaagtagagtagggctttttagttagacaaaaatggactattcaatgatctggatatggcgtttgaaacaattgtgtatctgtacaaatatatttagtttaatacacacttgtctgtgttgtccataagcacacatttgaatatggccacgagaaagattttgggtgaccatgtggataaaaaaattatttggtacagttatttctgctaatggatggggaatgtatagtaatatggaaagtacaaaataggggccgggcgtggtggctcatgcctgtaatccagcactctgggaggttgaggtgggtggatcacttgaggccaggagtttgagacctccctgggcaaaatgacgaaaccctgtctctactaaaaatacaaaaatggttcaggtgtggtggcacgtgcctgtagtcccagctactcaggaggctgaggcaggagaatcacttgaacagggaggtggaggttgcagtgagccaagatcgcatcactgcactccagcctgggtgagagtgagattccatctcaaaaaaaaaacaaaaaaaaaaagaaaatacaaaatagggatagtgtagaagaaatctgagaatgttttctacaatttaatgtgtatcacctagtaactatatttaataatactagatttatattctcttaagtatatgccaattgagaattgtgcagtgagttcagggatgctgtgaaggaattattttcagaattcaaaattttcaatggataattgagaattaattgcaatgatgaaacatatgtaacatgtagtagcttatgtaaacattagtgttagattagatttgtaaaattcctagttttcccaaaatatttgaattatgctgtagaaaagtccagggactcactcctgcaaccctaaatgtagctatactgatacaggatttggcagcctaatagatgtagggttggagcacaaagaagtttaaaaatactccattccatggatgtttaatagatttatacctgttgattattaatttttgagtttgtggattaggtattatcctccatgattaaaaaaattggagaaagaggataatcactgtaagaacgaatcaagattatgactttgtatgttcagaccaacatgggaagaagaaattcttggtaatacgtcaattgggatctgcgataggctggagaggtttttgggcagatatgggaaataatgctatttttagtctgttcactttcatcaagctgaccacaaggtggggaataatacattatatgaggtctggatgacctgcgatatcatccagagttataatagagaattatattactttaaagaatgtattttttaaatttggatatttacacatgagttagagtcaaacagtgtttttatagctatatcttgactagttatgccaacaataattattttttaaaattgtttctcagtactgtaaggttcttattttattgttgaaaaaaacttattttaagttcaggggtacatgtgcaagttcgttacataggtaaatgtgtgtcatgggggtggcactctttttatttcagtaaatttttgggaaacaggtggtatttgattacatgaataagttctttagtggcgatttctgagattttggtgcaccagccacccaagcagtgtacactgtacccaaggtgtagtcttttatcccccgcccccttcccaccctttcccccaagtccccaaagtccattgtatcattcctatacctttgcctcctcgtagcttagctcctacttatgggtgagaacatacgatgtttggttttccattcctgagttacttcacttagaataatggtctccactttgggaggccgaggtgggcggatcacgaggtcaagagatcgagaccaccctggccaacatggtgaaaccccgtctctactaaaaatacaaaaaatagctggatgtggtggcacatgcctgtaatcccagctacttgggaggctgaggcaggagaatcgcttgaagccgggaggtggaggttgcagtgagccgagatcgtgccactgcactccagcctggcgacagagcaagactctgtctcaaaaaaacaaaacaaaacaaaacaaaacaaaacaaaaacacaaagaaagaaagaaagaataatgaattccatctggattgctgcaaatgccattttttcattcctttttatggctgagtggtcgtattccatggtgtagatataccagtatttatctactcgtcaattgatgggtatttgggctggctccatatttttgcaattgcaaattgtgctgctataaacatgcatatgcaagtatcttttttgtataatgatttattttcctctgggtagacacccaataatgggattgctggatcacatggtagttctacttttagttctttaaggaatctccacactgttttccatagtggttgtactagcttacattcccaatagcagtgtaaaagtgttcccttttcaccacatccacgccaacatctaatattttttgattttttgattatggccattcttgcaggagtaaggtggtatctattgtattgtggttttgaattgcatttccctgatctttagtgagcatatattgaagtttgttggccatctgtatatcttcttttgagaattgtctgtacatgtccttagcccactttttttttttaaattatactttaagttctggggtacatgtgcagaatgtgcagttttgttatataggtatacatgtgccatggtggtttgctgcacccatcaacccgtcagctacattaggtatttctcgtaatcctatccatctcctagccccccaccccctgacaggccccggtgtgtgatgttcccctccctgtgtccatgtcttctcattgttcaactcccacttatgagtgaaaacatgcggtgtttggttttctgatcttgtgatagtttgctgagaatgatggtttccagcttcatccatgtccctgcaaaggacatgaactcgtctttcttatggttgcatagtattccatggtatatgtatgtgccacattttcttaatccattctatcattgatggacatttcggttggttccatgtctttgctactgtgaatagtgccgtagtaaacatacgtgtgcatgtgtgtttatcgtagaacgatttataatcctttgagtatatgcccagtaatggaattgctgcttagcctactttttgatgggattgttcatttttttattgctgatttgtttgagttcgttgtacattctggatattagtcgtttgttggatgtttagattgcgaaggttttctcccactctgtgggttttctgtttgctgattgtttattttgctgtacagaagctttttagtttaattaagtcgcatcttttatctttgtttttgttgcattttcttttgggttcttggtcttgaagtctttgcttaagctctttgcctaagactttgtctctatatttaaaaaaatatatgttgcccaggctgctcttgaactcctgaactcaagcaatccccttgctttggcctcccaaagtgctgggattacaggcatgaggcactgtgcctggctgcattattattttaaatccataaaatcacacctttttcagcttaagatcatttctagactgtcctctcactaaaaataccctggaatcaatatacatgttgttagtttgaaaattctttgctaggttgaacagccatattggaaaagtaccaaatccctttagggttttgttattggtaatataaagaggacagagaatgtatttcaaattagttgtcatttcatgaggtgttgcccttcatttcttggcaggtcttaactagaatctagcctcctcttataatagttgaaaatgtgtcatgactaattaatatgatacaatgagagcactgttttctgattaataaggtgggtggaccttatgaaatgttatctgaagatcacgcacgtaatctttgatggctgttattgcgttatattgacttgtgattcctgtgtgttcaacttctagtgtgaatagtaaggccaaaaattcaaaagggcttttgaagttgatttgtaattaaatagcattattaaaataaagagtcaaagcattgtcaagtgtgataaattcagtgtcaaaactgagcctttaaaaccaaaaagcgtggctgggcgtggtggctcacgcatgtaatcccagcattttgggaggcctgggcaggtggatcacttgaggtcaggagttcgagaccagcctggccaacatggtgaaaccctgtctctactaaaaattagccagatgtgatggcatatacctgtagtcccagctacttgggaggctgaggcgggagaactgcttgaacctgggaggtggaggctgcagtgagccgagattgtgctattgcactccagcctgggcgacagagcgagaccctgtctccaaaacaaaacaccaaaaagctcatgcctgttatgctagcactttgggaggccaaggcatgaggattgcttgagcctaggagtttgggaccagcctggacaaaataaggagaccccatcactacaaaaagtaagaaaaaggggctggtcgtggtggttcacacctgtaatcccagcactttgggaagctgagataggtggatcatgaggtcaggaattcgagaacagcctggtcccatggtgaaaccccatctctactaaaaatacaaaaaaattagccaggcatggtggtgtgcgcctgtagtcccagctactttggaggctgatgtgggaggatggcttgagccctaggtgtcaaagctgcagtgatcacactactgcactctagcctgggcaacagagagagagatcctgcttccaataaaacaaaacaaaacgccctcctcaaatcagaaagcattctcaaccatagtacttccaagcaccctatttgtgttagaagtgtttaaggcaatgataaagtcagtaaactatttcaagctgttggaagtgcatctcagcacacgacagttgtgatttcataagcttcttaaggtttcaagtgcacagcattttaccgcagaactattactgtctcaggaatgaggcccatggaacacaggaaaattctccacccagggaggaaggctgggaggcctcagcagccaatagtggtgtgactgagactctggagtcccttcacacttgtgtcgcagcttactacgggtcacctccgtcctaagtgtcttacatttattaatcatatatcctcacagatagggaaactgaggcacacagcagccaaggaactcgtccaaggccaaccaggtagtatatggtggaactggagtgaaggcaggctccacagtccctgttcttaacctttatactccactgcttctaattccttactttcttttatacaagaatataatttaaaatcctgcccaacacttgttttgtaagattctagtggcatgggaagtgaggggttacagttggtgtcagtcatatttcaaatggctgggaataggggtgataacatacacccaaggaagtcacgctggctgctacaacattgtgagaatatcattctgctgagattttacgcttgctggtagttgacataaaatgaagcttagtctattatatacaatgccagctttttccttcatcagttacaaggcttgactttaatgaaaggagaagactgcattttcaagtttgatctagaaggctatgaaggctctggttggaattattgagaaagacaaatctcaggtgatctgaacgtgttaaattgtaagagtacttaatgtgaattggaggaagcaattctctgaagcaaagggggaggaatttgtatcttggaaagaattgcctttgtcttttattatttatgcagttgataattgcaatattgccacttcacatatgaaaatatcattgtagtaaatttatgtagagttggctaacaaagttcccatccatctttgctttagttcaattgccattagtttcccagagtactttctaattcctctaccacagtactcatgctttattttgattttaattgtgttatattttctcttctagttagtcaaataagcgaggtcctggtgcacctctgtcttgtccatcattgaattcctaggcttaccacagtgcctgacgtagagttggtgttggcagctatttgtaggatgaatgaatacatgactgtgttaagcagacatcaaaggcgtataaaattgaaatctagttgttgtaagacttaaaaagagaggagatccttatagatgagtgctggttgtttgcaggatcattattattctctgatgatcaaaaaactgtttacgcatgcaccagtagtcccagctactcaggaggctgaggcgggaggatcccttgagcttgggaggcagaggttgcagtgagctgagatcacgccactgcactccatagagccagaccctgtcttaaaaagaaaagaacggtttacagatcagtgagagaggtgttttcctaaatatttaaatgtttgcttgcccatgctacttttccaaatcctaattgtccttttccccctcaaatgctccttcctttgtgaagccgtccttgattcccttgttggactctgttcaccgtgtctgatttttacctcttctagtgcactgactattcttaccgtgtattgtttttattttttggtacatgtgttgttgtttgttctactagactataaactcttgagtgtgaaaaccatgtctacttaaccagcctgcttccgagagtgaaaagggacgctaatcagataggacaccgagtaatagatgtgttcaaggctgtgcgaggcaaacctgatggctggttactctccagtaatctttagcttattgaaaaagcagaggccacttgcacctgtttacaagcaggtgagatgggcctgagaaggtgattgaattgcagattcaaaacgctggtttgtgtcttagtcttatctctgtcacttcactagtctaatgactgtgggtaatttatttcatcttgaagaccctcattttactgacatgttaagtagtgatgaccatttatttcctgctgtttcttaggccccctcctttttgtgttttgaggaagagaagatataaaaaaacgcccttgagagctgtgaagtgtcatagatactacaatatcgttttagaatcaattgaagactttctaactttgtaaacaaatttgaatctgatgactgaaatgctaatctataaaatggttttttagtaataaagtgagacttaatacagtgcttttaaatagtatgaaataagtaaataaatattgtagtttttgttagtatcattatattccttgttcttttaattcatttttaaacttagaattgtttcctacagataaacaaatgtcagcttgggtccatctactacatcttattgtcactttcacttcattgcatcattgctcttaatcagaataaagggtgaatttagcaggttgtagggtttgagtagtgctaagtattgtgaggaattgtgctcaaggtaattaattataaatcatagtccgggtgcggtggctcatgcctgtaatcccagcactttgggaggccaaggcaggcagatcatgaggtcaggagatagagaccatcctggctaatatggtgaaaccccgtctctacaaaaaaattatcctggcgtggtagcgggctcatgtagtcccagctactcgggaggctgaggcaggaaaacggcacaaacctgggaagcggagcatgcagtgagccgagattgtgccactgcactccagcctgggtgacagagcaagcctccgtctcaaaaaaaaaaaaagaaatcatgatctctgctattttaatattttgctcagtatttgaaataagctttataatgtaggctatagtaaaacacagcaattaagtgcttaaaacaagaatatcccaactgtaggtacagcatactttacctaaactatatgactcttatttctatccagcaatgggatcaaaaacttgatgcatttcagaaaacacgaggttaagcaagacgtgggaggattttgacttgtggtaaattttgaaagaaattgtaaatattttcaaagaaaatagaaaaagcacacaattcagagaatatacaaagccaattaaaaagttgtaaaattattattattattattatttttgagacggagtctccctctgtcgcccaggctggagtgcagtggtgcaacttcagctcactgcaacctccgcctcccgggttcaagcaattctcctgcctcagcctcccgagtagctgggattacaggcgtgtgccaccacacccagctaattttttttgtatttttattagagacggggtttcaccatattggccaggctggtctcgaactcctgaccttgtgatctgcccaccttggcctcccaaagtgctgggattacaggcgtgagccactgcgcccggccgtaaaattaaatttaatatctgatctgacggactaaacaaaagatctcttgcctttcaccagtttaccagctttctgttctttttcactcttagttcactaagtgtgagtggactgtgaggcatgagcaggaaggggtggcattgggcatttacagcaagagaccctcatgctaagtgaagtgttatcaaatcttcatttttttgcttatactgtaaaattgccaattatattcatagttattgtaagttatattccaaagtttaactggaaaaatattattttgcaaccaaaaaggtaccaattaatattcctgttcatgaaacaataaaaagaattgaatcagggagaaatgaaaacagctcattttaaatattcaaatttaaaatgatataaaatagggatataaaataaaagcattttatatgaggtatagaggaaagaaattacaacttcaaaacaaatccttgtgatcagcttccatgaggaggaccttagcaatgtataccaaatttaaatgtgaagcttcttaccttcttcttacctcatcttcttaaaagatacatctaaaagaaaaactaaaatttgtatcgatatgtttaattaaagcattattgttattattatgtaaagcagaaagaaacttctgaaaaatagttgagtgatacatttaagcatttcacctaaggaaatttagtgttatttaaactgattaacagtatttggcaaagtattttcattagcgttctaatattaaagctagcatttccttaaaggagggaggctaaaattcatcccaaagcttgtttttgttaactcaaattttctcagtgttattgctgaacaagttactgaattttctctgggtatcttctatattgcctttctttgattcttgtcagtgcaaccagtctaaggttttacatgataaaggaaatctgtggagctaatcctagaaacctctttctattttcttacctaacacctccaggcacagagaagacaaaatacttcatttgcattcttaaacattaggaactcagaataagtctttcaactggaaatgttattgcatctacatttcccgaagagaaaaaggttaacagcctactcaggtttatgttaactcatctctttttagtatcctgatgtgcacaaagagtgaagaatgtgaggcttacccacccaggctctttcttctttacaatcaatgagactctggaagtggtatcagtgctgattacagggaaataaaaagaaaaaatcaaatatgcacaaaagaaatggaaaacactaacatactttaatcttagtcttctaggaatagaaagaacatttccaaaattaataacgaacatagtaattcaaattttttaaaataaaaagtttcctccataaatttgaaaagcttaccaggaaagtacaaagatattgagatttatagtttgtttgttgaaatggtttttattaaagtaatcaataccaaaaaactcttgtttgttctaagtaccttggtcagaaacccgaaacatttaataaaagaaattgaacaattttttgacttaatgtttgctaaaaagtagaaatggaaatcatttaattgccagatattaaaaacagaaagttttctattgctgtaatactcactccccatcagtgtaggagaaacaaggttttatatttaactataatatattccttaaaatatacttaagtgggaaacttaacttctgccgacagttacagtggggaaagttaccactgttctctttccctaactaaataccgtacatagctatcatctggaagtaatagtattacttcagtgcattgtgccagtagacacttaatacagaatatactttagactaaatgaaatccagatcccagtaatactgaaacagaaagacacaggttcctttggttaaactaagtcatagtgtacagtgtactataaattaaatacagtttgtgagtatgtcattagattttaattgaatttgcaattagcatcccaaacatttaaaaatcgtgtgggtttataagtttttacttttgaattttaaaataatagaacctttacccccttccactacccatctcccatagcaatcacatccatttatgttcttatcctaatgaatcagctaaattgggttttaatttacaatgagctggtaagagttaaagaaaatgactcctataaatgtagtaggtgagaggctgagggcatcctcttctaggttattctgctccttcctacctttgttgatgccccacagtcaatgttggggaaaattaattaggatttatattccagtcttctctaatgtgttgtcaccattgcacagactcaggacttccagtgcagtgttgactagtaccagtgcacatccttacccaggggactggaacttacccaggatcacaaaaatgacactaggaatgtttctcccctctcagcattcaaatgttctccttatcttttatttttatatatttatttttgagacaagattttgctctgttgcccaggctggagtgcagtggtgtgaacatggctcactgcagccttgacctcctgggctcaagcagtcctcctgccctggcctcctgtgtagctgggaccatgcctggttaatttttaaatttttttttgtagaaacagggccccactgtgttgtccaggctgatcttgaactcctgggctttaccttttattattttaatttaattttattttttgagacagagtgtcgctttgtcacccaggctggagcacagtggtgtgatcttggctcactgcaacctctgtctcccaggttcaatagattctcctgcctcagctcctgagttgctaggattacaggagcatgccaccatgcccagctaatttttgtagttttagtagagatggtttcaccctgttggtcaggctgtgatccaggcaccttggcctcccaaagtgctgagattacaggcatgagccactgtgcccagccttatcttttatttttaatgattattgtttaaagtacactgagttcaggttaaaaaccaactgccaaagtaaattttaacacctaaaagctgggagaaggggccattcttcttttatgcagtaactctttggagtccagatactaacatgccccagatttcatcctggtgctaaactgacttgttttccaattaaaaaaaataaaagtctgagtaatattgcgtaggagtaccagaaatggccttgttggaaaccaaaactatttacattcgttaagaaatctgtttgcaggtgtgtctgccacatttacagcacagtgtacagctcctggcactcaatacacagtgttgcacagcttgccgcaggagcataaagtggaggtagtaaaaaggtaaggaagaaagagggaggaggatgagttgttctctattcatttgcttctcatttcatcactgatttggtggtacccagacctttacagagccggtctccataatactggtgcaggtggcctgatgcccagtttctgttgctcagataatgcagtctcatctcgtctgtgatttcagcagcactcatggcaatgggaacattcttcttctttgcaacccaggagtgagattgaatctctgattaaagagcaaagcttgagtgttttggacatggtaatgctgcagaggtgagttcctgttctggctgtccatgtccaaacaagtgaaacaaatgttttcatactttgcagttgccacgttcattcattcattcattcattcattcattcattcattcattcatttttgagacgagtttcgctcttgttgcccaggctggaatgcaatggcatgatcttggctcactgcaacctctgcctgctggctcaagtgattctcctgcctcagccttccgagtagctgggataacaggtgcacaccaccatgcctggctattttttatatttttagtagagacggggtttcaccatgttgaccaggctggtctcaaactcctgacctcaggtaatctgcccgcctcggcctcccaaagtgctgggattacaggagtgagccaccacacccggtctgcagttgccacatttaacctttagtgctaagtaaacatttcaccatggttcactttgtacaaaatgagaatctttactgaagcatcccagccaaacataagaatgtactttacaattttttttttttttttttttaagcctaaagtccctggaagaggctggcaaactggcttgagaaacacttcactgggcatagagctgctgaagctgctcctagtccgtgtgttgatttcactcctataagttggtggctactctgaaatagttttcaaaatttttattgtaaaataaaaggcagttacaggagaactatacaaaagaaacctatggcttaatgaactattatagggcgaactattttgaaatcatgaaataggtccagacgcagatgtttaccctgaatcctggaaagctgtgtgacccatctcagtgctaacctccggcctctctctaaacatacccattcctttggcttttatagtaatcatttttttttgcgtttaaaaataattttattgtccaaatgtgccaccttggacacaatatttaagtcttgtccatttatttttaaatttgataagtctttaaaatcttagtctgtaggctcctcttgcttccttttcttcatgacttatctgttgaagaacttgggtgtttgacttacagagtcttaccccagtcttgacttagctcactgcatggcgatgctatagctcagtggtttcccccattcttggtgtttcctacaaattggcacttgaattcagagatgggatcagacttggatttgatgcctttgatgaagactataggaggcacataatgtctttttagctctttttaagatataagcagactttgatgcttactgcccatatctagtaatttattggattacaaaattttggtagtttaatgctaacatttttttcattagttaattggaatatatttagaaagaaacccttcttctcatttactgttttattaccactggtacaattcatatatgagaagcaagataaatgcttaattctttacctttatttactatttctgaagtaatgattggttccttatcatccctcgaagttagccaattcttttgaagaaatcactatgaagtcatactgttgaaattactgtgaagtcaagttgttcctctttggtccgtggggcttaagttgactcacgggtctttttgacttgacctcataatcttctctagcttccttactatctgatctgacaggacattccaggctcatgttttacattttctgttccaactctttatttttatttatttatttatttatttttgagacagagtctcactctgtcacccaggctggagtgcagtggcgcaatcttggctcactgcaagctctgcctcccgggttcacactgttctcctgcctcagcctcctgagtaggactgctggagcctgccaccatgcctggctaattttgtttttgtatttttagtatagatggggtttcaccatgttagctagaatggtctcgatttcctgacctcgtgatccacccgccttggcctcccaaagtgctgggattacaggcgtgagccacagtgcctggccttctgttcaactctaatcagccatcttttcaaaatgccttggcttcttctaatggtatttggagatcacagttggggtactaggcatggtcattgctactgattggtcattttaagcctttttagttgcaggctaggaaaaaaaatatacatatatattaacaggtttttaacatatacgttttatgttatatatgtatattgcttataatacaatatgttatcttaactatattatattaataaaatatataccatatggcaatatatttactatataaatatgtttaaatataatgccaaccctaacccaaaatagggtatgtatataaaacaaatttatattataataatcatactgtattaataaaatgcacataacatttttctcatatataatgtatataacaatatagaagtataattaaataaagtctacattttatgtgagacaaaacaactcctgtgttcatagcaatattttccattacaattcaaaattgcagaactttaacctctttgttgcctctgtgtatcttcattcttctggattcagaattctgactctcaaggataggggaaatgacagaattagagtatctcacaattgcttatttgtcttgtcctgtgctatacacagagcaatctcaggataacaatgttaataccactaccaatatgattactaaaaacattaaaaatgtatttgtacataatcttcctgtaatattaaaaaaaaagttgtactatatctatattgtcagaaaatgtggctgttatctataaggttttatatatatatctccttagctttcatttagttttagctctacaagtaaatcccgactctttttgttgatatctcttttgtcattttagtttcctgaagctcattctctagtacaggagtgggcaaaccttttctgtaaggagccagaggggaaatatttttggctttgtaggccctatgatctctgctagtactcattcttattcttatagtgagaaagcaatcacagacagtgtaaactatgagcatggtggctacgtttcagtttcatataatttttatgtgtaatgatacagtatttaaaaaaatttttgcctaacccccacccccaataattagtaaaatcttttcttagatcatggactgtacaaaaacaggcagtgaggctaggtgtggtggctgtcacctgtaatccctgcattttgagaggctgaggtgggcggatcatctgaagtaggagtttgagaccagcctgaccaacatggtgaaaccccgtccctactaaaaatacaaaattagctgggcgtggtggtgcatgcctgtaatcccagctacttgggaggctgaggcaggagaatcgcttgaacccgggagctggaggttgcagtgagctgagattgcaccattgcactccagcctgggcaacaagactgaaactgcgtctcaaaaaaaaaaaaaaaaaaaaaaaaaaaaaaaccaaaagcagggagtgaatgggccagatttggcctacacactagtttgcaaacctctgttgtattggacttctcagagtttatgagttcttgcatgttgttaaattttctctgcctttcatagttgcactgacttctatggatttaaaattcttagcttgactcagcctggtggctcatgcctgcaatcccaacactttgggagactgaggcaggaggatcacttgaggccaggagtttgagaccatcataggcaacatagcaagactccatctctacccaaaaaaaaaaaaaaaaaaaactgggcacagcagtacacatctgtaggcctagctacttgggaggtcaagatgggaggatcacttgagcccaggagtttgaggctgcagtgaactataatggcacccctgcactccaggctgggtaacagagcaagaccctgttccacgaaaagaacataaaattattagctcatactttctttccttgaatttcttactcaaaagagtttattattccattttcttttggtataaaatgttgctgtcaaagtctgatgattatttaaatttctcttttgtataagttacctattcctgtttttttttttttcattttcttttacttaagtaatattgctagaatttttcttggtatgttggtcatcctggaatgaatttctcctgtagtgtggtcttttaatatgtatttttagttcaagtaaattttcttgagttgtatttttaatatttgctcttttttttgctttggttctcttcaaggattcctattattcatatgttggatgttcttttttattttcaatatttctcatcttctgtattatttattcattttttatatttaaattaaatatttttattttcaatttgtctttctcataaggcattgtctgttttccttattcactcttacattctttgtagctgttttcatttctggaatgattttctttttcatttctagttgtatcctgagttctgtcatctcatttctgagcttttctaaatctgatttatactattttatgttatgtgtcacttaaaaatgtcttttaacttgttttgaaatattagatgataggccaggtgcggtggctcacgcttgtaatcccagcactttgggaggccaaggtaggcggatcacgagatcaggagttcgataccagcttggccaacataatgaaactccgtctctactaaaaatacaaaaaaaattagccgggcgtggtggtgcgcgtctgtagtcccagctacttgggaggctgaggcaggagaattgcttgaacctgggaggtggaggttgcagtgagctgaggtcgcgccactgcactccagcctgggtgacagagtgagactccgtctcaaaaaaaaaaaaaaaaagaaatgagatgatagttttgatctattgtattggtatgtttttctcctgtgctttcctgccctacatggatgttactctggtccctttttctttgccttataaaaacattgtattggggccaggcatggtggctcacgcctttaatcccagaactttgggaggccgaggcgggtggatcacttgaggtcaggatttcgagaccagctcggccaacatggtgaaaccctgtctctactaaaaatataaaaccatattagcccggcatggtggggggtgcctgtagtcccagctacttggaggctgaggcaggagaattgcttgaacccaagaggcggagattgcaatgagccaggattgcaccgctgcactccggagtgagacttcgtatcaagacaaaaaacaaaaaaaattatgttggattttaccttgatattttatttcacttagtttaatgtgtaaaattggtttttctctacatttctttttaaagagccatgtattttaaaatcagtgactcatgtccaagaagttcaaacacgagtagagatagcaggaagtggtttattctgaggtcttgaaaagaatgaattaaccctgtaatctccccagtattctttttgatgttcctattgacatcactatattcagtgggtgctcctttctatctgctacattagtttttgaaagctttctttctgactcagtttatctcatgtgctaacttcctgaaccaatcctggaactggccttttctaccagaaacactcttttcttttatcatggaatagtattaaaaaccacaatctggatcttttggacagttcagctgtttttccgtggcttttttttttttttcgagacagggtcttgctctgtcatccaggctggagtgcagcggtgcagtctcggctcactgcagcctctacccgctgggctcaagcaatcctcctacctcagcttcctgagtagctgggaccacatgggaccacaggtatacaccaccatgcctggctaatttttatattttttgtagagaaaagtttttgccatgttgctcagcctggtttcaaactcctgagctcgtgcagctcacctgcctcggcctcccaaagtgctgagattacaggcgtgacccactgtgcccagccccatggctgtctttttcttctgaccctggttttgtagttatccaagtagcaactcttggtaagcctaaaatctatacgctttaaaatctgaattcataatatagcaatttactaacttgtggtatttctaagaatgaaatatgtatcatacattttaatttttacaatgattctttctgtccttcattcctgacataaagcctatggtaaattaaatctcatttccttaacatactgctcaaacccaaccctttcccccattcttctattaaaatttgtccagaaccatagagtcacagaatttaggaaatgagtagaattttggagcagtgatttcagcttttcataatttctttctcttcttttgtcttgctgtgttgcccatgctgaagtgtagtggctagtcataggtgccatcatagcgcacaacagctttgaacagtatctgggctcaagagatactcctggctcagccttccaagtacctgggactacaggcacacttggctcataattttttttttttaaatgaatcactttaatgatgaaaaatgcccactttttgtgatcataagacatttacttgtattcagatattatatgtatcatgcaaggtaaatttaaaaggaccttaaaaagcatatttttggaaacaaatttagttgctattgcataacaaaaaacttacagtgattaagggaaactgataattagatggataacaaaaaataccgggttaacagaagagtatcgaaggttactagtggataaaatctggccttttattctaagtcacaccgctgcctggtcaagaactgaaaacatttgaaacatgctccatcacactgcagttaccatactctcttatcctgacctcatcctttttggttacagatttatgggagccaagagcctctaatgttgctttctcattttgctttaattacttttaaaggccaatctagggagcacttccaaaacacattgataaaaaggaagttaagtctttgaaacatttgtagttatccagcatactactggctatttttcttttgtattgggtgggacaaaaaatagtcactaaatacttgatataagcttttttttttttttttttgacaattttacatttttgggtgagtaattttcctcaaattagaatgcacaagaaaaatctggttaatcagtgttccaggtcgttgggctcctgttaatcagaagttttactgtataatcataatgtattttggatgttctcatttatgttatttcttcaattctttgtgtgggtactctgattgcttgattacatctgcctggcatagtcgtttttaaagcagcatttataataaaattttccatctttgcaagtaaaatgagaatatggaaagacaattgatggttgaagcatgattgtttcctcttgtctttacttagtgtttagtgggtttcaggttttggataaagagaaatgaatatgattattgtcctggtccgaaatgattcatgtatccacctggagacgtagagttgatagaggtgtaggcttacctctattatctcctcatacagagcagcgctacttcctacgtatgtgctttacatttttggggatttgcataagattttttttttccatgaaaataaggttctactaaaaccaaatacagaaacatttgatagagagatactttataagcacctcttagggctgaaagggtttcttgtctagcatcctgccacttgtaacaccagcaaattctaggcatttgggttcctataatattattttagagtcctgtggacctagctatcttattattctagtgtcctcttttttttctggagacagagtctcactctgttgcccaggctggagtgcagtggtgcaatcttggctcactgcaaactctacctcccaggttcaagcaattctcctgcctcaacctccagagtagttgggattacaggcgtgcaccaccatgcctagctgatttttgtatttttagtagaggccactatgttggtcaggctggtctcaaactcctgacctcaggtgatctgcctgccttggcctcccaaagtgctgggattacaggtgtgagccactgtgcccggccattctaatgtcttctttttatcaagacttctggagagtggacaaaaactaacagttgtggcactcaacttggtgctttatattattattgatggggtttaggacatgctactcccaaatttggcaccttggcatataagctgaaggatttggagaaaacagcagaagcacgaaggtctctgaccttccccttcctctcttccctgaagcaggtcctaagacctaggagggactttctgaccttctctgaaccagatcctaagaccttcatgtgagagatgcccttcctgtatctggaagagaggagcatcctcatccccatagagaaaaggacgcagagtaatctgagtagtttcccccagtttatgatacttacctcttgctctccgtgctatcatttctccataactcaccagtcctcatcaaccctgtataaaaacactcaagtttaactgtttctttggattttcatttccttatgcaggctccggtgtcacgtacaacttacaattaagtaaatgtgtatgcttgtttttttggtaaactatcttttgtaataggtgccctagccataaacttagaagggtagaaggaaaataatagttttcctcctgtacattattttatttaattctttaatcaaacttaaaagtcagatattatccacattgtcactcaaagaaatgggtgctttagactcagggtctaaaatttcccttttcttttgttttgcttttgggtaggagagaagcatacctcttgaatttaaagacattggcttttctactcattttctctgaatgatttcattcacaacttttatttttgtatttatttttttgagatggagtctcgctctgtcgccaggctggagtgtagtggctccatctcggctcactgcaacctctgactcctgggttcaagcagttctcccacctcagcctcccaagtagctgggattacaggcgcatgccaccacgcccagctaatttttggtagttttagtagagacgggctttcactgtgttggtcaggatggtctcgatctcctgacctcaagatctgccctcctcggcctcccaaagtgctgggagtacaggtatgagccaccacacccggactgccattcacagcttttaattccgtcctgtatttgatgcctttaaaaatctgtattttggccaggcgtggtggctcatgcctgtaatcctagcactttgggaggcggaggctggtggatcatgagattaagaggtcgagatcatcctggccaatatggtgaaaccccatctctactaaaaatacaaaaattagctgggcgtggtggcgcgctcctgtagtcccagctactcgggaggctgaggcaggagaatcgcttgaacccgggagacggaggttgcagtgagccaagattgtgccattgcactccagcctggtgacagagtgagactctgtctcaaaaaagaaaaaatctgtgtttcagcctggacttgtctaataacccctatacctctatatctgcctcctgaacatgaatacttgactattgcagaggcctgtcagctcagcgtgtgcaaagttggagtcatcatctcgcctcttaaatatttatctccttgtatattctttgtgtttattccttgttctacttctacttcctgctcggggtgggtttaatcctcttggtcatgatggccaggagagcagtccaagcaacaggctactcagctgccctggtcaccaggagaatgaaccttttttcccaagtcaagattctttgcaggcagcaacgctaacatggaatgaacaggtgatgtaaaagtgatatacaaatatgcagtttattgtttataccaactctgacaaggtcgtaggacaatcagcagttaggcgccttcctcgaggaaggcctgcatataggtctggtttttcccattttatatttaccttcagttctttatgtaatgacttcatcctttatctcagcaaatacccccattacttttctagaccatgccctgtggtggagctaatggcatcatattttgttctgtctctagatctatttaagtcactagcttttttttttaaattagagtggcataaacaagagaggtagatccattgtcaaggtattcagtgtggtttgtgcagagtggttttgattgaaactgaactctacccagttaaattcccactggatttttgactcatcttttatagtcacaggatgcaaacatgtactttcttttgtctatttctctgaggtgtcagtgatctgttcacgtttcctggaaattgttgatatcctgttgtcttcatccatgttatctcctgtgtttagctcagagcctggcacagaattggtattcaggaaatatggatatttgtgttatactaggcattatgctgcaggctattgagaacacagagatttataaggtgtttacgggtgaccttactggctagattaggtggtgtaggacgttatatacaaatacagtgtcatagagtgacttttccgaggcacactgtttacccagaaggagttcttcagtgcttttggttgttttcatttgactttgttgcatgcatctatccacacatgtactatatgcaatatagtattttaatgtgttggctcaaaaactgttgtttctgcaataaaaataattagaaaatacacatatgggcttttcttttataaaattgtgactccacatcatgctccgtaatgttcttgttataaattttgacttgtttttctccacaggcagcagaagatgtcgttttcattggacctgacacacatgctattcaagccatgggcgacaagattgaaagcaaattattagctaagaaagcagaggttaatacaatccctggctttgatggagtagtcaaggtgagaagctactttaacttttattgtatatgtcttcaagttaaacattttgtcaaaagtataagataaaatgtaactattgcttttttgggatatacacacacacacacacatatgcacgcacatacatacatgtatatatgtttaaaaaatcagtgtttttacatttatttatttatttatttgagatggagtcttgctcttgtcgcccaggctggagtgcaatgatgcaatctcggttcactgcaacctctgcctcctgggttcaagcgattctcctgcctcagcctcccgagtagctgggattgcaggtgcctgccaccatgcccagctaatttttgtatttttagtagagacagggtttcaccatgttggccaggctggtctcgaactcctgaccccaggtgatctgcctgcttcatcctcccaaggtgctgggattacaggcgtgagtcactgcatccggccagaaatcagtgtttttaactggattattttattatttttagagatggaggtctcactctgttgcccaggctggagtgcagtggtgcagtcatagctcactgtaaccttgaactcttaggctcaaatgatcctctcgccatgactcaagaatccctccttctttagcctcccaagtagctaggactgcagacacacaccaccacacctgactaattatttttattttgtagagatgagggtctcaccgtgttgcccaggctggtctcaaactcctgggctgaagtgattctcccgccttggccttcccaagtgttgggattacagatgtgaaccattgtgcctggccaacttggattgttttaaatagcataagttaaaaagagtgagaaactgtttgagcattgtatttaatgaatcagcagtgactcagactttcataggaaaaaatttggtgattaaaaaatgtactgtcagatctctggactgcatttaatagtggtatgtgtttcatgtgttaaacattaagagtttctctgtatatctttatcttgagcttctctccatgtgcataatatgtaagttaggatcatgtttctggtgaaagtggtatagctataggtaattgtatattgcaaacatttagcaagggccttctgcagctgaaggcttctgagggagaaatgcagaaattgaagtatgcaacttctccttttcccatgagaaattattctgtttttttctagttagaagagagtcctcatgtagagttttaaccttgcgatttgacttagcctgcaggaactcttcatttcagcatttcgtattgttacttttggcattctgtgttgggttgttcttcattgtgcaagatcatttcatgcattagaggacgattagaaaacttgccccctagttaataaatatcctcagcttcttgcccatatttacctgcatttacttttatctatgtgtatccatgttgtttcttcccacttgttacaaggaagaggtgttccacatcctctggaaagccagttcctcctcctacgctccaaatgtattctttatagccttcacaggctatggttttactgattatcttttctctcttctgtgtcttaaaattctcctcatcttttagctccttttgttatcattgctattaaaaatgctcagtgaacaaatgtgttggtcactcagttatgtgggaaggatgtggtgatgagatacacatgatctgcgtatcatagttctcacagtttagtgggaaagaaacaaacatttcttccattcgtaaagcaccatcacccctatcactctacagctagttgccaccttctttctctcttcccctttcagtgccaaagctcttagaattgtccttcctcactttcatttctgtatctttcacttaatcttttcttgccgtctagcttctttcctcattcctactgaatttctcttgcaaagctaccagcaacctcttccctttgttaaatcaatatgtaattttgaattctgatcttatatcaatctttgagcaacatttgagtctcttggtcagtccatacttctctcatgagatactcacttttggcacattactcagttctagtttttgtgttttttggcttttttgaatgccattcttagattccttcccgattgttcttcctatctttgttccttaaatgggggttttattctgggtcctgagtaggacatttcctctttttattgtgctaacttgccctgggcaatcttactttttttcatggcgtcaattgccaccttttcttttttcttttactattattattattttttgagacaaggtcttgttctatcacccaggctagagtgcagtggcatagtcatggctcactgcaacgtcaacctcgtgggctcaagtgctcctcccacgtcagcttcttgaataggtgagactataggtgtgtgccaccacagctgcctacttttttatattttgtagagacgggggtctcactattttgcctagactggtctcaaattcctgggctcaagcagtccttcccctcggcctcccaaagtgctgggattacaggcatgagccactacacttggcctattgccacttttctgaccaatctcaaatgtatgtatctgttctgaacttcaggattacatatccagttgcttcttatatagctctcactacttgatgcctctgaggcaccttgaaactaacaattaaaagctgaactcatctttctcctgaaactagagattggtactatagcccatgcacacctatttttataaataaaggtttattggagggcaaccatgttcatccctttacatattgtctgtggttgcttttccactacagtggtagagctgagtagtagactcaatatgtggagtagactcaactacatgggacacatagtagactatgtgactcacaaagcctaaaatatttacttcctgatccattaagaaaaagtttgcctatccctgctctaaaattcttatccttcattcttttccgcctaggaaggtggtggctagaaacatagagtaattcttaacaaatgcgactgtggagaattcactcagatagctttctaatccatttacttctttctttgcccgtactaaccaaccccagattccagctactatcatctagtctggattacttcatctgccttctaattagtctccttgtagtcattcttgcttccatccaattaattttttaaaaattcttcacctcaagtatttataatgtctttgtgttacaaacagtctaatatacttttagttatttaaaaatgtacaataaattattgttgactgtaatcactttgttgtgctgtcgaatactagatcttacccattctatctaactggacccatttttgtacccattaaccatccccacatcacccacccccactcctccccactacccttcccagcctctggcaatcatcattctactctctatcactgtgagttcaactatgttaatttttagctcccacagatgagtgagaacatgtcaaatttgtctttctatgtctgacttagttcatttaacataatgtcctccagttccatctatgttgttgcaagtgacaggacctcattctttttggtggctgaatagtactccattgtatatatgtaccacattttaaaaatccattcgtctgttgatggacatttaggttgcttccaaatgttggctattgtggatagtgttgtggtaaacatggtagtgtagatatctctttgatagactgctttcctttcttttgggtatatacctagcagtgggattgctggatcatatggcagctctatttttagtgttttgaggaacctctatactgttctccacagtggctttactaatttgcattccccccaacactatacaagagttcccttttctctatatcctcgccagcatttgttattgcctgtcttttggataaaagccaatttaactggggtgagatgatctctcattgtattgcatttctctgatgatcagtgatgttgagcacctttttatatgcctgtttaacatttgtatgtcttcttttgagaaatgtctattcagatcttttgcccatttaaaaaattggattattagattttttttcttgttgagttgtttgagctccttatatattctggttattaatctcttgtcagatggatagtttgcaaatattttgctcccattccatgagttgtctcttgactgttgatttccttggctgtgtggaagctttttaacttgatgtgaccccatttatttatttttgctttgcttgcctgggcttgtggggaattactcaagaaatttttgcccagaccagcatcttacagagtttttgcaatgttttcttttggtagtttcataatttgaggttttaggtttaaattttcaatccattttgatttgatttttgtatatggcaagagataagggtctagttttgttcttctgcatctggttatccggttctccgagcaccatttattgaagagaccgtcctttccctaaggtatattcttggcacctttgtcaagtgaattcactatagatatatggatttatttctgggttctctattctgttctattggtctatgccagtactatgctgttttgattgctatagctctgtagtataattttaagtcaagtagtgtgattcctccagttttgttcattttcctcaggatagctttgcctatcctgggtcttttgtggttctatataaattttaggatttttttttctatttctgtgaagattgtcattggtattttgataaggattatattgaatcggtagattgctttaggtagtatggacattttaacaatattgattcttccaacccatgaatgtagaatctctttgcatcttttgtgtccttttcaatttctcgcatcaacgttttatagttgtttttttgtgtgtgtgtgtgtgtgtttttttttttagatggaacctcgctctgttgccaggctggagtgcagtggtgcaatctcggctcactgcaacctctgcctcccgggttcaagcgattctcctgcctccggctccctggtatctgggactataggcatgcaccaccacgcccaactaatttttgctttgtttttagtagagacggggttttaccatgttggccatgatggtcttgatctcctgaccttgtgatccacccacctctgcctcccaaagtgctgggattacaggcatgagccactgaacctggcctatagttttcattgtagagacctttcacttctttggttaagtttattcctaggtattttattttattttattttattcatagctattgtaaatgggattattttcttgatatcgtcttcactgttggcatataggaattcccatccattaattaatgatacttcagtttgagtgaccaaaaatccagatttgatcgtatgcctatctttaataacttttgaatgactactcatataaatgttttaaatggttggattttgcttagctctccaaactgatactgtgccagtctatcctttgcattgtatgtatccgccatacttgacatcgttcagattcttgaaacttatgtgcttagtcatatctgcttctgtcttcattcctgattgtctcttagtcattgtttaggtcttggcttaaatgtaaattcctcacataggcattccttaactgtcttcattagattaggctctctgctgtatttttccttaggaccctacacttaactcatcacattttaaatcatttattcattcatctattcagtagatatttaccaagtgcacgcaatttgtctgacactgtttgaagtgctgttgatatagtagtgaacaaaagagactgaacatatttttatgccctcaaggagcttacactatagaaggaaacagatgataaataataaaacatatgttctatgttgaaacataagagaaaaagactgctggaaggtggggctatattcacaattttatatacaggcatgtcttcatatctacaagggattggttccaagacctaccccctcagataccaaaatttgttgatgctcaagtgccttatatgaaatggggtagtgtttgcatatatcctacgctcatccttctgtatactttattttattttttatttttatatatttatttttttgaggtggagtctcactttattgcccaggctagagtgcagtgtcatgatctcggctcactgtaacctccgtccaccctgggttcaagcaattctcccacctcagcctctcaagtagctgggattacaggcatgcaccaccatgcccagctgttttttgtatttttagtagagatgaagtttcaccacgttggccaggctggtcttgaactcctgacctcaagtgattcacctgccttggcctcccaagtgctgggattgcaggtgtgagccactgtgcgcagccctgccgtatactttaaatcatctctagattacttataataccctaaaacaatgtaaatgctatgtaaatagttgtcccactgtgttttaaaatatgcagtattttaattttcctccctttcccttccccttcccctccccttccccttcccctctccttcccctttcccttccccttcccttttttgggtttaatccatggatacagaacccaaggatatagagggccaagtgcatgtttagcagaccatctaaggaagtggcaggacaagtcatgttgctatcctggagaagagcaaagcatattaggcagaaagaataacaagcgcaagattgttggttgaggttgaagtgtacctgctactgaataaacaccgaggaagcatgtgattggaatcatcgagagagacaatttagagataaggtaaaaaaagataatggtgtagtagggagcttagatttttagggccttacaggccatttcagtattaggtaaatgtctccttcctacacggagcgtaagcttctgatggcagggatgctgctctctttattactgtatcacatgcacatggtgcctgacatattgtcagtgcttaagtcaatgctcagtcagtgctcactaggtatttgttgaatgaataatattctaggagataaattttatacatatactcattttatatacgttgccatttagtacatattgtttagtcacatctattagaggcaccaaaagaaaccaaaaaccaagagaaaaaattaaaagacaatagaaacatatccacatatgcttcagatattggaattggctgagataactacgatttatatgctaaagaaatccaaggaaaatatggagaaaatagataagtatataaagaatttcatccgggtatggtggctcatgcctgtaatcccagcactttgggaggccgaggtgggcggatcacctgaggtcaggagttcaagatcagcctgatcaacatggcgaaaccccgtctctactgaaaatacaaaaaatatttgagtgttgtggcaggtgcctgtaatcccagctactcgggaggctgaggcctgagaatcccttgaacctgggaggtggaggttgcagtgagccgagatcacgccattgcactccagcctgggcaacaagagcggaactctgtctaaaaaaaacaagaatttcacaagagaatttgaatctattttaaaaattaaatacaagactgggtgcagtggcttacgcctgtaatcccagcactttgggaggccgaggtgggtggatcatgaggtcaggagttcgagaccagcctggccagcatgatgaaaccccgtctctactaaaaatagaaaaattagctgggcgtggtggtgcgcacctgtaatcccagccactcgggaggctgagtaggagaatcgctggaccacaggaggtggagcttgcagtgagccgagatcatgccactgcaccccagcctgggtgacagagcgagactccatctcaaaaaaaaaaaaattaaatagaaattctgtaactgcaaatatatgaaaataaggactttagatagacttaacattggactcaaccaagcaaaatatagtatccatgttatagcatgtatcagtttttgtgtgtgtgtgtgtgtggctgagtgatattcagttgtatgaatatgcttcttaaaaaaatccacctgaggtcaggagttcaagaccagcctggccaacatggtgaaaccctgtctctactaaaaatacaaaaaaattagttgggcgtggtggcaggcacctgtaatgtcagctacttgggaggctgaggcaggagaatcgctagaaccctgggggcggaggttttttgtgtgtgtgtggctgagtgatattcaattgtatgaatataccacttaaaaaaatccatctgaggtcaggagttcaagaccagcctggccagcatggtgaaatcccgactctactaaaaatagaaaaaaataagctgggcgtggtggcaggccctgtaatgtcagctactcgggaggctgaggcaggagaatcactagaaccctgggggaggaggttgcagtgagctgagatggcaccactgcactccagcctgggcaacagagtaagactctgtctaaaaaaaaaaaaaaatccattcattagttgaaagacatttgggttacattttgaccattgcaattagtattgctacaaatatttgtatgcaagtatttgcttatatatttgtttgttttgagatggtatttcactcttgttgcccaggctggagtgcagtggcgtgatcttgactcactgcaacctctgctgagttcaagtgattctcctgcctcagtctcccaagtagctgggattacaggcacccaccaccatgtctggctatgggttgtttttttttttttttgtatttagcagagacgggttttcaccatgttagactggtcttgaactcctgacctcaggttatccacccgccttggcctcccaaagtgctgggattacaggcgcgtgccactgcgcccagccatatgtctgttttttaagttatttggggtatgtacccaagagtggaattcctgggtcatgtggtaattctttgttcagctttttgaggaactgtcaggcatccaaacctttatgtactcccttcctcttgtataatccactcctcttcaatttgggtagaacctgtgaattgcttctctaactaatagaatatggcaaaggtgatgtgatattactcccttaattaggttgcattatatggcaaaagtgatgggatgtcactgcattcaattacattatgtggcaaagtggttgggtgtcactcttgtgattatgtttcattatatagtacttgatcttaacagactagagaacaagattctttttgctggcttgataaagtaagcagccatattaaggaagcctacttggcagtgaatggtgggcagattctaaggatctatgtaaggacagtctctacccaagagctagcaaaaggctggggtccttcatcatgcagctacaaggacataattctgccaactacctgaaagagcttggcagcaaatttctccccatttgagtctccagtgacaatgcagcctggttcactccctgattgcagccttgcaaacccctgagcagtgtatgatgaaattattattattatttccttatgaggtcttgtcctctttacctttttgttttagacatttgtgtgaatttgggtaggggtttggatgtgtcattatgaaccttgatctactcagcctgaatatttctaccagtataattatatatttttttgatgaggaatgttgcctttttgatatcttcaatttggacttgatttattcccaagaatactgatgtgtcactgtccaaattatttctggcttgatgatgaatggtggagtcctcaagggttcaaggaagagaccatcaggagagtgtttgatctggaaattctgtttacacgggagatttttccttatgaaattagtgaatgtagtgtctcctaggaagggaatgtttcttggctaaaggtccaaaggtgaccgttgtgtgctgggacatgggaaatgtgacgggtattatccatatctgtcaactgagtagtttgttgattccgagggagagcttgtggaacaatggcaggaattaaggtaaatatactgccacccatatcaataaaatttttacttgtttctccgctaataattagtgaaaattcgtcttgtgagttgaagagtaaaaggagaaatgggtacttgatttgctgttagaacatttgcctactatcattttttcccaattctcttgaataaaacagaacaattatttttccattgtaatttcttcttacaatctctgcaggtttctttatcaaaagactggtgtttaatttttggagtgggagcatctagttttatcttcaagggtatcatcttattctgggtcttatactgcctttgttttcaggctcttttgaaatgtgtaatatggagttacattgtttgacaatgtggtgccttcccagccagtttttgcttgtttataacattttctttttctggcttaaggctgttcacaagaagtgaggaaggagctggggtcacaactacttgagggcttactcctgaatgctaactgaaggtagtaagagcccaccctggaagtctgcaaggggcttatccttcgtctgctagaacaactgaattagagttacctgttttcacaggaaagattttggtaatagccttcaaaagaccgtgtccaatatttacagtttcttttttttgtttttgttttttttgagacaagagtctctttctgtcacccaggctggagtgcagtggcgcaatcttggctaactgcaacctccacctcccgggttgaagcagttctcctgcctcagcctcccaagtagctgggaccacatgtctgagccaccatgcctgactaatttttttttttttttttttggtatttctagtagagactgggtttcaccatgttggccgggtcttgaactccttacttcaagtgatccacctgcctcggcctcccaaagtgttgggattacaggcatgtgccaccgcgccccgtcattcacagtttttctaaaccccactggctttctgtgcatttggggtctgaagtcactctcaggatatttgtttcccctttctaataggtcttcctatttccctctccttgctccccactttgtaactatccttggtgaaatgatgccatttataaagagaagaccatgaatttgcattacatatttaatgcatttaaagaaacagaagtctgactctgagagaccacagacttagtctgagccaaactcatgggagtctcctaatggcatattgaatatgttgtttgtgcacctcctgtcttgggctcacagcctaatggttggccatctctaactgcaaacctgacagtgccttgttggtttaagatttggagagactgtctctcctaggcccagacttccatggacaaagcaagtcaagacagaggaaaatactcaaggttcccaggtaaattgtgttctatttggatgatgatctgatgaaaccttctgaactcactggcttctagagtcagcatgaaaatgggcttatgaaacctatgcctgtcttctttcaggtgaactttgacttatggacttagaataaaaaatgttgaggacagtatattagtaatatgggaggtttcttccaatattaaacattttcaaatgtgataagaaattcagtgggtctttattcctacagttgttgaaaaggaaattggacctctacccagtgtgactcatctcaccattgtggttggggagacccctgagggggtcgctcagtgggcctcagagaagcatgcagatgccagatctaagatcttgaactgtggcttttagtgggcttcgaacatgtgtctgtgggtaatacacttggttttgcttgttcaacaggttattttggttatcttcttaggaggctgcatctgaatttgcagcctctgttctagtaaatttggaaaatatggaaaggtagacaggagaaaagaaatctcatcttttcagtttttttccttgtatgcattagatgatttgtaacatcctattacactctcaaatgattgattctcattatctgcactaacgactatttctgaatttgtgacgccacagctgaacctgcaggttatagtttccagataagcatttacaaataatttttaaggaatgtccttttgtttccctgggaaatttttttttttttttttttttgagacggagtctcaccctggagtgcagtggtgcgatctcagctcactgcaacctctgcatcccgggttcaagcaattctcctgcctcagcctcccgagtaattgggattacagacatgaaccaccatgtccagctaattttgcatttttagtagagacagggtttcgccatattggccaggctggtctcaaactcctgacctcaagtgatccacctgccttggctccccaaagtgctaggattataggtgtccaggtgtgagccactgcgcctggtggaaataattttttttgagacagagtctcactctgttgcccagactggagtacagtggcacaatctggactcactccatccccgccccctgggttcaagcgattctcctgcctcagcctccggagtagctgggattacagatatgcgccaccatgcctggctaatttttgtatttttagtaattagtaattttttagtaatttttgtatttttagtagagatgaggtttcaccatgttggccaggctggttttgaactcctgagcttgggtgatccgccctcctcagcctcccaaagtgttgggattagaggtgtgagccaccgtgcctgactggaaataatttttaatactagttttatttttagtttgtttttatttctgatacaagaggctgtacatatttttcttttaaatttggctattaatttaggtttctggtatagtgactccacattcacttggagctacaccattcacatttactagtttagatatattgagtataagattacttttgagagtatctatgcagatagaagtttgctgatggaaataaatagtaccgaattttggaatatcttgggtttttagcaacagtttttcattggcagagtgcatatgccaattacaggtaattctgtcttttaaaaaatgtttagtgttctttaaaattagtctacagtgtttttaagactaaagtcttttccttgataactatattctattttttttccccaagtagtttccaccagttatgatacaattttagtttgttacatttctccttcaaacatttgttcctttcttatttgaatatgtaggatgttacatggagacagtttacccatacccctttaaagcattgtgtgcagtacttcagtggtcttctgcaactcttctttttaatggcttattaatctgtccttgaatcatccttttccttagagagaaactaatgttttaaaatgtaattatcaagtaatcgtttggtatcaagtatttgcctttaacaaatttaattttattcaacatttcattaccttgatctcaggaactggagagcagagtgaaaggcatgcacattaagatattggagacaggaattgggatcacagcttttttttttttaaatcaatgaataacatgccacagatcctgctttcaaagagcttaaagccttctgtgtccggaattggtgggttcttggtctcactgacttcaagaatgaagccgcggaccctcgcggtgagtgttacagctcttaaggtggcgcgtctggagtttgttccttctgatgttgggatgtgttcggagtttcttccttctggtgggttcgtggtcttgctggctcaggagtgaagctgcagacctttgcagtgagcattacagctcttaaggtggcacgtctggagttgttcgttcctcccggtgggcttgtggtctcgctggcttcagcagtgaagctccagaccttcgcggtgagcgttatagctcataaaggcagagtggacccaaagagtgagcagcagcaagatttattgcaaagaactaaagaacaaagcttccacagtgtggaaggggacccgagcgtgttgccactgctggctcgggcagcctgcttttattctcttatccggccccacccacatcctgctgattggtagagcctggtggtctgttttgacagggcactgattggtgcgtttataatccctgagctagacacaaaggttctccacatccccaccagattagctagatacagagtgtcaacacaaaggttctccaagtccccaccagagtagctagatacagagtgtcgattggtgcattcacaaaccctgagctagacacagggtgctgattggtgtatttacaatccctgagctagacataaaggttctccatgtcctcaccagactcaggagcccagctggcttcacccagtggatcccgcaccggggctgcaggtggagctgcctgccagtcccgcgccgtgcgcccgcactcctcagcccttgggtggtcgatgggactgggcaccgtggagcagggggcggcgcacatcagggaggctctggccccacaggagcccagggagggggtgggaggctcaggcatggcgggctgcaggtcccgagccctgcccggcgggaaggcagctaaggctgggcgagaaatcgagcgcagtgctggtgggctggcactgctgggtaacccagtacaccctctgcagctgctggccagggtgctaagtccctcattgcccggggccggcagggccagccggctgctccgagtgcggggcctgccaagcccacgcccacccggaactccagctggcccgcaagcgcagctagcagccctggttcccgctggcgcctctccctccacacctccgtggaagctgagggagctggctctggccttggccagcccagaaaggggctcccacagtgcaggggtgggctgatcaggtccctcaagtgctgccaaagtgggagcgccaagagcgagcgagggctgtgaggactgccagcacgctgtcacctctcacttcttcaggaggactgcaagtattcaggcaattgactacattttgataatgctaagctcaaggcgcaggggcctatgcatataggatgggcatgtaacctagttttaggtatcattgcagattttccaatggaaatgatagctaagtgaaacctcaagtctgagtggtagtgagttagctgaaaagtgagattgatgatggacacagctctaatgtcagtgaaaacatcttattgcaaaagcctggaggtgagagacagtgagaactctggaaaactgcagatttgtagtatgaggggctgcagttagaaagggagctagagagaaaattaggatccagatatgtatgggctggaatgtgatgtaacttattttgaaggctattcttgtggtttggggagcctctgaataatttcatgcagaagagttaacatgacagaattgtggcattagaaaactcattttggtttgttgtgtggaaagtaaattggagcatggcaaaacttgaagttggtagacaaattaggatcctcttctaatccaggatagaaacggtagacccctaaaataaagtattgtatgcaacaaagtagatggtgttgagaaagatagtggaagtggaatccatgggattatgtgatctgttcaatgtcaggtgtgaagtggagggaaggatcattgatgattattttactgcatttggttgtaatacctattaacacaccagtttcagaagaaatttatttaatgtcctttagttctaattgttcgttaagaggaaatagtaatacccgtttacaccacagaacagagtatggccgtgtatttgaatgagttttgtaaattaggcagtgtagatttaaagtagtaattgtttttatcacctaattggccagactttaaaaactgtactcttgctttagcagaaggaggcaaataactaagaaagctagtgtgaaggaaatcatttaaaaaagaccctaaaaacaaaaaccaaaaaattggagacaagctgtgtctcagcaattagaaagtataacattaaacattagtgtatttgtccctgctaaaccaagaataatcagttttcctgatgaagcctcaaaggttttatattttggaaaaaaagactcaattatttttactatgctgtttttacaatgatagaaaagtgtactaaattttagaaagcttttttttttctttgagacgaagagtgtcgctcagtcacccaggctggagtgcagtggcgcgatcttggctcactgaaaagcaccaccttccggtttcaagtgattcttgtgcctcagcctctcaagtagctgagtttacaggtgtgggctgccacacctggctaacttttgtgtttttagtagagatagggttttgccatgttgcccaggcttgtctggaactcctggtctcaagtgatccaccttcacgacctcccaaagtgctggaattgcaggcatgagccactgtgcccggccgaaagatttggaagtatattaaaacagaaagaatcttctgcctgactttgagttaactggattatgtggaagctagaaagccattcctgagcccaggattgtttaaaagtttctgctttactttatatatgaatgcagaatagtttgaggacagcttttagggtacagatataactcttacctgtagtgtcttgaaacaaattattatttttttttaataaacagtcactgattcccttctagaaccagctgtaaactcctaagtggctttcatatgaatgggtagcaggattctcatccacagaatagaaaattaaggattggtaagtaggcagtagcaagtgagaaggatgtctgaatcatgaatggtggtcggcgttgacactaataccactatcaaaatgtatgggtgtttagcatctgggaagaatgattcgaatgtgcctgtctttgttgtagtgttttctgcgcttccttgtgttttgccctgttcaccagcaataccgagttcgtagatcgtctgatccagtgcattataagagaggaagtacatgttttttccagtattgtagcgccagggttagttctatgttatctaggttcagaagatgagtaatgacacaggatataacaagtaaggccaggcagggaaggtaccaacatggtagtttggggtggcgggctgcccattttctcataattactaaccttaattgagtacctactgtgggccaggtgctgttctaatgtgtttcagccttgactaatttcatcttcttaataaccctatgagatagatactgttattatgtccattttacagatgaggaaaccgaataccagagaggcactctagtaactcagtcacagtcacagaagcagtattggagcccaagccttctggcatagcgcctgtgttctttttttctttgagacgaagtcttgctctgtcgcccatactggagtgcagtggcactatcttggctcactgcaacctccgcctcctgagtagctgggattgcaggcatgcgccaccacgcccggctaatttttttgttttttttttggtagagacggggtttcaccatattggccaggctggtcttgaattcctgacctcaggtgatccgcctgcctctgcctcccaaagtgctgggattacaggcaggagccgttgtgcccagcccacacctgagctcttaactgcaaggcttggttaccccacaggccatgttctaggtattaacaaataaatgacatttgcagaaaaggcaccagatttttgttaactcttttcacgttttttctggttagtttttactaccatttagttagtttttgtagcatcatccaccactcccatcatattcacagttaaatagtactttttactgttactattcttgggttgggtgatagagcccacttaatgtgagttgttttgtaatagaggaataagaggaataaaagaaatgggtactggtttgcttggtttctttcccttttctccgtttcttaagctactcttttggcattgtattcttagtactttcctgtaactctttccccatcggtgctcaaaagagttaaatagcttcagaacctgagtgtgccttccctcaggacaagctgggattacagaaagaatggaccaccaggtagtttatcacttagaagaatagaataaaatgatatcattggactcttttttccctacctcctgattggaaaccatcaggaataccatcatctgagcattgttgctgacacatttttaatttttttgtgtactttttgttttctcaattgtattacttgtgatatgaaaataaaactattctaaagacttcaaatgaaaaatttttaagggaaaatgaatagcatcaaatttgttttaacaattctgctgaaatttttatatttgactttttcttttttttttccagacagggtcttgctctttcacccaggctggagtgcagtggtgccatctcggctcactgcaacttctgcctcccgggttcaatcaattcccctgcctcagcccccggagtagctgggattaaaggcgcatgccaccacgcccagctgatttttgtatttttagtaaatatgggatttcaccatgtcggccaggctggtctcgaactcctgacctcagatgatccgcctgcctcagcctcccagagtgctgggattacaggcgtgagccaccatgcctggcatatttgacttttcttccactttggggaggattattatgtaatgtgtcagaaattttcttttaataaattataggatattattgaacattatgttaacagagtttattgttctaagccctttcatattttcatgtattgtgtgtcatgtaatcatagatgtgagagctgtcttaagaatattttaaagagtgttaagaataatcagctccactttttcttcaaatattgccaagctgtatttgtgaagagataatgttgttttgtttaaaatatatttattttatataaataaagaacaaaggctgggcgcggtggctcactcctgtaatcctagcactttgggaggctgaggtgggaggatcacttgaggtcaggagttcgaaaccagcctgccaagatggtgaaaccccatctctactaaaaatacaaaaaaaattagtcatacgtggtggtgtgtgcctataatcccagctacttgggaggctgaggcaggagaatcgtttgaacctgggaggtggaggttgcaatgagcggggatcgctccattgcactccagcctgggtaacacagtgagactctttctcaaaaaaaaaaaaaaaaaagcacaaagtatatttagtaaaataaagtttaaccttttacatttttatgaaataaagtttgatatctatacattgaaatgagctgctttcttttgttttgtattataacttaaacttgtggcttttcaatttgaaaacttattgccatgtagaatttgattttttttttttcctaatgcaacactttacttaaaaattatggagtagaactatattttttagaagagcaggttttacaaaacctaaaattcaaactctggaagttgcatgatgtggtggaagaagtgctggactgagaatcccaaaaatattgggcttggttttgcccaatgccaacagtatttcactgagtgcaccttgttttaaactgaagcaaaactgaagtgtaaaaagtaaagtagaggttcctcttcaaagactttcctccccatctaattaggaataaatagtaacttctcttagaagcaaaatttattctaagacctgtgctaacattcttaaatatctgctagctgtaataaagaaatcaatgtactttatgttctcagctcccacaatttagcctaaatatttgccctggcatgcttatactggtccaagcaagcattaagtcatagcctgttcctcttccttatttgaaggtgtttttacctttctcagtattccacaagttacttcctccttcctttgttctcctctgccgttgcctcttttaaaaagttctatgttgttagccaattgggacaaatacaaaatgtgaggtcctgttccagccaatggaaaccggacacagcagtagggtgggcgcctcaggttataaatgaccctgtctcctttgttcaatgtactctcgtggcaaaactgctggcgaatgtaccctttctgcagaaagtaaacatggccttgctgaggaaattaaatttatgttccagtgctgtttctttacggcactggggaacaagcatttctaacagaagcctgtctggttctgagtccctgccctgaacccctgcctttggatgtcagttaactcacttataaaaccgctgctctggagatgaatagttctgttggcatttgtgagattgtgtcttatcctaacagactaatttttatggaagctgatgcggatagttgtttattcatggaagaaataatgtgttgattgcgttaatttgctaaactctggggatttagtagagagtaagacagctagttgttgccctcatgaaggttaagtgtgaaaagggctgcataattgcagggcgtggtgtatgtgttcatgtggcaatgatacctagccaggtgtgggaggactggaaaggcactctaaagaaagtggcaggctgggcgcggtggctcatgcctgtaatcccagcactttgggaagccgaggtgggcggatcacctgaggtcaggagttagagatcagcctggccaaaaatggtgaaaccctgtctctacttagaatacaaaaattagccgggtgtggtggtgtttgcctgtagtcccagctactcaggaggctaaggcaagagaactacttgaacccaggaggcaaaggttgcagtgagccgaggtcgtgccactgcactccagcctgagtgacagactcccatctcaaaaaaaaaaaaaaagaaagaacgtggcattagctgaaactggaagcatgccaccctggactctgggaggaaatggtcattttcctgtcacccagactactgcctcccagcctgactcttcagatccctcttgcctctcaaagtgttcatttgtttgttcattcattcatttattcttccaacaactgttggttgaataacaactgtgccaggcgtgtgctcgggatttgaaatacctaacttgaaccagctggacaagggtttctgtccttatggagcttacattttaatgggctagggaggtgcagagggtggacagtgcacatcataagtaagcagatgctatgccagaattctccagcctgcaaccagagctagcccttcatttccttgctctgaggctacagttcagtttctctcatgtggctgtgaggcccagccttcccctcgcctctctcttcaggtcccagacactgtttttcactacgcttctatttctaaggtgtcttttcagttaccacgcctgagaaagttttcaggaatctatttttggattagagatcccctgttgtcacatgccctctttaaaacttgtacataacatgcaccacataatcattccttagctgctgtgtggctgtatttaaggtttgtcttttccaccagcctgtaaattacctgttggccaagatgatgtctttcttgttccgtcccgtgtcttcagggcccagaattgggcctattgtaataaaagctggtttggtaaaaggggagagagttactggctgaggctggctgaactgagaaggctgtgcaaggctggggagcctgcctgggccttgggctgcagggtaagatgcaagatgaacaggggtggggctgagactcatgcttaggcggacaggatcaagtattgaaaccagcctagggagttcaaacttggttttgaggcaatgggatgtcatgaaaagcttaagtgattttggggactcctagtttgttttgataacatttaatattctcaaaatcattaataatttgataacttcaggcatggctgatttaatttttaaactatgaaaatatgaagtatgaaattatgattcttatggtaaaaaagttcaacgtgtacctaagagcatacaattttaatttcccttttcctacaacttttaatcctaccttttacatttatttatttatttattcttaaatatagacaaggtcttgcgatgttgcttaagtcagtacagaactcctgggctcaagtggtcttcctgcctgggcctcctgagtagctgggattataggcctgagttaccatgcccggctgtctgtcctacttttgagcagtaaattggtttctgtagctgtctaatgcttaaactttcctgtgcgttcaaatgtgtatttctgtcttaatgtaggtaaggtcatacgctatgtactccaacttgctacccccgcccccagtatatactttattttgcttatttttacagtgtaagagttactctcttaaagcttaattgtcatttgtcattgccttgtatagaaccaaggcatcttggactgtgtaccaaatcccataagatctggccagaacagggccacgccgtccatacctccttatcttgtgctttgctgccacttccttactgtgtttcagctttagctgcctgatattctttccctatgaaattgcttcctcatctaggatttttatatgtgtggttccctctgtctaatgttctttctccctgatctttccatggtagctagctgtttatgtttatgtgtgtgtgtgtatgcgtgtgtgtgtgtgtgtgtgtgtgtgtgtgtgtgtgtgtgtggttttagagacggagtctcactttatttcccaggcaggagtgcagtggcgccatcatggctcactgcagctctgacctcctgggctcatgcaatcctcctgcctcagcctcccaagtagctgggactacaggtcccaccaccacacccagtaatttttgtatttttttgtagagatagagatcttgccatgttgcccaggctagtctcaaactcctaccctcaagtgatcctcccatcttggcctcccaaagtgctgggattacaggtgtgagccactgtgcttggcctggctagatgtctttatccttaggtttaaaattttactccagaagggccctttctgagcagcctgtctgaaacaagttctccctagtattcttgcctgagtactctgtttctatgtaacatttattttagttatcaattgatttgtttattttctgtttctctcattagtttgtaataagctccatgaaggcagaagatgtatttcatgtagtgttgctgggcagatagttattgaattaatgtataagtggttgaataagaacatatagatcaactgcattctttttaaaggctaatatttcattttatggatgtaccagtcctttgttgaaggcttactaaattgtttttcagaatttttttcttattaaaacaccaccaacgaattcaaaataatgaatttctttgtatgtctctctgtgttcactcatgtgggtatatctgtaggatgacttcccaggagtaaaatttcagaacaaaagataacgtgtcctcaaacttttggtagatactgacaatttctttttaaaaagattatcccattttctatgacaccagtaatatgagaagtatttaactttgtcatcctggccattatcagattttaatttgctagaggaaaagtgagatctcattgttttaatttgtatttctgtaattaggagcaaggctgagcacagatattgtgcttctggaactgtttttctgtgagcttttaatttaatcttttgtgatgattgttggtcctttttttagttgattcagagtttgattaaagttttttaaacttatgatgttataggcaacctttacagtgtgatgtcacttagtgccattgaatttggagctatatagggctttttatctcttcaaaagtaattttgtagagcctgataataaaacttcatgttctcaaagaccatattggggctgagtgtataatatttagtagtttattattgaaacagtaatagagattttaatgtccagtgcataataggtcctcagtaaagtatttttggatgaatgagtgacaagtgaaaagttaatttttaaggcagcttgattttatttgaaagttcatttagaagaatctaattttcatagtaagaagacttagcatgctgttaagttgaaagataagcttgctttgtggcatgctatagaagtgttggatttgtggcagtggaatttttaatttgctgtgtcagatatagatatggctttatgtatccatacacacccagctataacatgtatattcaaataagtgacaaaatatgtctaatgaatttttgaattaccttttaaaacttgcctgttagttctctcaagtgatgaactttttacaatagcagtttattttctctcatcacgttggaaagaaatgttaaaagttttcttctaggtttattataatccagtcttcatcagccatcactcttcctgtattttgttcaagaggcactaattgttcgcatttggcaggtttaacacttcctgacagagaggctattaaggggaagtattctccaataactgtcactggctggaacaaagaaccttccaactcaatgtgtggaaaccactaacattcttaaatgacccttttcatggattttcatccctttaagctaaagtttggagaatgtagggtcagcgaaaacagcaacgtgtaataaagcagtaaaccttgattttggaaggcatagggtgggagatatagatttatctctgacttgaaaacaattgttatttggaaaatctcattagcagatgtgactgcttggagtaaaaaaaaaaaaaaacaacttaaaactgatgtcgctttcaggacccctttgaacttaacaagcacctatttgtggagcagactggctaatgaaaggaaattaaatttttctgacaacttcccctgccaacctccttattcaggggatgttattaggtactgaagaactttaaagaagatttttttttattagacataagtgaaccagttataaacatccccccccgcccccttctcggaggattctgacatggttgctctacattttaaacgtattagcttaaaagcttaaaaaacactgggcttcacttcagcattttagtcattttctaaaaattcagtcacacttaccagctgtggtttcaaaacaatattgtcagtctttgtggtagtttagtttgtgtcactgaattacacaaacacacacacacacacacacaccccacacatacccacacacacgaaggaggcttagatttcaacattatctttattgttatttggggaaatgattcagcagtgtcctgtgttggatgtgttaggtgagggttaatgatcagtgaaattacttagattcaagggaagtttttgtcttttcatcttcttagaggtagaagtggcattggttaatatttagcaataactaatccttaaatggataaacttttaccccttactgtttaggaaggtattttctttcttttgctttttggagttttttcctccagtagttggttcgttgaaattaaagtttttttttaatttatgtaacaagatacaattgtagagataaaatatgtacctgaaaaaaaaaaaaaagaaagaaacaatagaaaagaaaaggtaatgcagattaccaaaaggattttttggaacaattcgtaattcctgtaggtactggaaattaactttcatatttctgcaaaatcgatcaactactcccaaacaatagagaatcaactccccctgctgacagaatctaggaaaacatgacacataatattggacagaaacaagctggctgcggacaagctttaatgacctgatttatgattcagtattgattgtaaacatctaaattctgccattaaattccggcaactgcaccaaatcattggcaattctggtagtgcttcctgccagctcatttcaactgctttgagtttcttaatataataatgatgaggtagaatttacattccacttatggtattaattttacatttctctgaatgaaaagggttagaaggtagtaaaattgaacattaaatgaatcggaggagacagtagtgcaatatatgactgccctaaagacattgtgcaatgcctcatgggattaatgttgagtctcatttcctgcttttacaggatgcagaagaagctgtcagaattgcaagggaaattggtaagtccttaaattaactttggtaggatttctgtgtctttcagcagatacggttgagtcaacaggtaataagtaattcccatagagcaaataatactttaatagttttagattttgattacttgttgctctggaagaatgtatcagttgaattgccaaattctattattaaaggagactgtaaagagtaatttgaccttaactatacataactcttttgtaagatgagatcacaggctaattcaaagaaggaattgtcttaagaattctaaagattggatataagtttaatgtcaatttatatgtacatagttgaatgtggtttgttaaaattaagaacatttggattaaaatgaagataccatatgtgacatagttctttaagtttttgccttttgctaagatgttaggtatcaacttaatcttgttagatgggaaagataaaatagatgtgggaaattagaactgaatgatctaaattggaataaaaggtagactggaggagtttttaatggctgttttacatgtacttgtatttgggcagtgtttcccaactttttaatttcttttctttttcttttctttccttttttttttttaagatggagttttgctgtcattgcccaggctggagtgcaatggcacgatctccgctcactgcaacctctgccttccaggttcaagcgattctcctgcctcagcctccctagtagctgggattacaggtgcctgccatcacgcccagctaattttttgtatttttagtagagatggagtttcactatgttggccaggctggtctcgaactcctgacctcaggtgatccacccgcctcagcctcccaaagtgctgggattacaggcgtgagccaccgcccctggctcgcaactttttaattttaaaaatattcttggcggtcatgagaactatttttggtatctgctaattgagaaaatgtgtaagggcatgctattatatggattaacaatattgttaaataactttgcaggtttaataatcaaatcagtaattgtatacatttgacagaaatttgtacagatgagagaaattaggcaatgcttgtagggatcccagcgtcttctcagcattcctgtacgcctcagtccaagcatctcatcgtgccacacgaacatttctgtaggcctgttttctcactaagattatttagatctattttctgcctctagagagcatttgatttggcaaagctcatatagttgtgatatgtagaaatatcttattggtctggaagtgatcacttgtactagtaagcgtgttctttgcaaatgggacagtctaacttagcaggtctttagtgacctgaaaagcagtttggcttattgcacccttgtttgtagttggtactgtctaaattatttgggctttgcccatcattaagtgtgttttgttgtttgctttgcaaaaatctatcttattgatataggtcctggatttaagaccagaccatagaaaatcttattttatctgactacctcatctcttcattttttttttcagaatcattaacatttcaaaaagcctatcagtacttcataggaacatttgctcgactgctaaataaactggactatatagaactgattctgtggtttctttatggagaaaaatcaaaagtttctgttcatggtttgaaatcactggtattcctcattgcctaagaggcatataatatacctactggcttttgaggatagttttctaaaatagtttaattccatcctgtcagacatctttacatttaaaaagctctttttctagttctaggttagatattattatcaacctcattggatataataatactgttattattattattacagtatctacataaaggacaatatttagagaaatttagggaaataaagggattagaagaaaatttacagttacactgcagtgccacattttgaatggtgaattttggacttgcgagcattccctttgtgtaaatagcaggccgtggattgctttgcttcctttatgccttttcttccactttctttctttctttctttctttttttttttttttgagacagacttttcactcttgttgcccaggttggagtgcagtggtgcgatctctgctcactgcaacttctgcctcccgggttcaggtgattctcctgccttcacctcctgagtagctgggattgcaggcacacaccacaatgccagctaatttttttgtatttttagtagagacggggtttcaccatactggccaggctggtctcgaactcctgaccttaggtgatctgcccacctcagcctcccaaagtgccgggattacaggcataagccagtgcacctggccattttccactttcgttataacctgtcacctttaagataaccagctcatcatgatgggcctctgtctaactagttctcatcactttgctttcctccctcaatattttaatgctgtgctttacctccttttcattttttattttttcctactgaagttacctaatctaatctaagtcttttttctttgtacttgggcacatcctttatgactcctttctctttcctgtccttcttctaattcttccccaattactctctcttgcttgtgaaataaatgatagcaatcatggctattaagtataagagtactggtgttttgcttatactgaaagaaagggaaaccataaaatttgaggtaaaataaaccataaagaactagggtcatcagctcttacaaagcttttagaatttctctgaaaatctcttctgaatcacctcagaagcctcgcataaaatcttttccttgaagtgctactttctaaagtaaattaaattatgttttattaaagtctgttggctttctgtgttgtttgatatttcgtaagttttttactactgattttattgagatatatcacattttaactatgattatgattccatgtgaaaatgtgttcctagttctaaacaactgatttataatcaaacctttgaacctatccatttgtaagttgttgattgtccatgtgttatacctattcatagagttctctcttaattctttctgtgttatgtgatgaaaatgaagtttatcctgttttatgtgatttcctcctctctcatgtctttgcttttcttctggaaacattaatctatgctgccaaagtaggaaactcactgtattgagcattgatgaattaagtgccttttacataatggtaactccagtttatggagcatttcttcctaaggccaggcactttggaaatgttgtttctaatgctaattcttgggtttaatcatttttgtttacatttaaggaaactaatgattagaaatggtaagtaatttgctcaaggtcacagaactatcgagtggtggaccctggtttaaatttaggtttatttgactccaaagaccacagactttttattatactgtgtctaaaccaatgggattagaggatggcagctaaaatttgagcgactactttgtgtaaaatactgtaaggtactcaaatgtgttatacatggaattaaagaagcagacagtctcctatccttgatgaggtgagagacagttaagacttaatatgttacttgtatgtatttgttttttggactacctagtttctctcattcttgttcctgattttttactttgacctatctaagttgagagatacagagctattgatcctcagtttgtctttaacctcaatgatagacaacagtaatcagtgagcttgatttccattgaagtttgatctttttactgggccaaaggtccttaatacaatcaagtcaaaattgattcttgaaaggaaaataaattgtgaatctaaaacctgtcctttaacaacttccagattattcagattcttttcctttgcttgtctttctcacaatcacaaatcatgcccaatttaaataaaaacttttttttttgatcctcaggtctaccatactacaaacctacttctcccagaatttccaaatctcaataaatgtcacccctttcagtcaggccaaaactgagtctctcctggatgcctcttttcctcatcatcctgttgtaaatacatcaataggcattgtcagttcatcttatatacactgtcttcattactaccactctcctccaaactacttttgtcttttgcagggactgtggcaatagtttctttacttcatttcttaaacatttcacatagctgacagtgagatatttaaaatctttaaagaacaaggatatatttcatctcatcccagcccatttctgctttaaattctgtaatgactccattgaacttagataaaaatcacaattctttactctgactactatccctatgtaatttgacacctgcttttctctccagtcttattgtatactactcccttctctgcctcccatacttcagtcacattagcttacttgaacacagcaaatttcagggccttaggataagtttttttttttttttaatcttttgcggggtgaagggggatggcaggacctagcagactcttgctgatatcttcacaaaaatagctccttgcagtctttcatatcttagcctaagtatcatgtcttcaagagaagattctctaatactgccacccagtcattctctgtcttataactattttctaaatttctgcatagtattcatgatttgcagattttttttattcataaacttttctccaagtattttattttgaaaaatttcaatcatacggcattttgaaataattgttacggtttatactcgtatacccaacactaagatcccactattaacctttttctagatttgctttaccacttatctgttcatatactaatccattttatttttgttgcatttcagagtaaattgcacaaccagtatatgtcccattaaatacttcaacatgtgttattaattgaattcagtatttgtatacagttttgttattttgatgccaaatttgcacacaatataatgtgaacaaatcttaagtgtgtatttgtggattttgacatatgcatatatatatataacttagaatcccaccaaggtgctgaacatactatttccctggagatttccctcatgatccttccaagtcagttctcgcctaccccctggcctgcaggtaacttgttcagatttttatactaaagattagatttttaaaaattaagataaatttttaatactatacaattcagcctttcaaagtgcacaattcggtgattttttgtgtatttacaaggttgtgtaactgtaatcactatctaatttcagaagatcttcattactccccaaagaaactctgtactcattagtatgtacttcttattttctttccatctagtccctgacaaccattaatttactttgtgtcttgtggatttacttattctggggatatttcatataaataaatggaatcacaacatatgaacttttgtgtctggtttctttcacacagaatagtgtttttaaggttcatccatgttctaccgtttatccctttttacggttggataattttctattgtatgtacatgccacattttgtctgttttttatttttttgagatagggtctcgctcttttacccaggatagagtgcagtggtgtgatcccagctcactgcagctttaatctcctgggctctactaatcctcctgccttaccctcctgagtagctaggactacaggtgtgtgccactatgcctaatttttgtatttttttgtagtgggttttcaccatgttgcctcagttgatcttgaattcctgggctcaagtgatccacccacattggcctcccagagtgctgggattatagacatgagccactgcacctggccttatctatttattcatctattgatggacatttgggttgtttttacctcttggctattgtaaatggtactgctatgaacatttatgtccatgtatttgtttgtatacctgttttcaattattttgggtatattcttcgaagtgaaattgctgggttatatggtaattctatgtgtaacttttggagatactagcaaattattttccatggtggctgtcccattttacatttctaccaagaatatataagggtttcaatctcttcatatccttgccaacccttgttattttctttcttttataaggaaaactattgccatcctagtgtgtgtgtagaataatatcttattgtagcagagggaagaatagattaaaaaaagtgactcaactatatgctgtctataagaaactcactttagatgcagagacacaaataggttgaaagtgaaaggaaggaaaaagatatcccatgtaaatagtaaccaaaagagagctggggtggcatactaatgtcagacaagataaactttaagtccaaaactattctaagagacaaagaagggcattttatattgattaacaattacaaatgtatatgcaccaggaaacatggccctaaaatatttgagataaacattgacggaattgaagggagaaacagactaattctacaatagtagttggagactttaatagcacactataagtaatggatgcaacatctagagagatcagtaagggagggaatagaggacttgaacagcactatatactaattagaccttatggatatataatgaccattctacccaataacaatataaggcacatttttctcaagtaactattaaaagaggaaaggagtgatgattgagttaaaataattgttaaagaaaaagaaaatataataacaaacaggagcaatatctcataaagtgttgcccatgactcgcaatgttcccaagacttagtttgatatagaaatatttttccccgcatgtactgatttatattgatggattgctcttttcttaaaatagtataggattctctgcaatatataaattttatttttctttgcaaatgattgctttatattaatttgattactattttatagtaaaatttttgttgtggtggtggttgttttttgagacagagtctcattctgttgcccaggctggagggcagtggtgtgatctcagctcactgcaacctctgcctcctgggttcaagcgattcatctgccttagcccccacttagctgggactacaggcatgcaccaccacgcctggctaatttttgtatttttaatagatacaaggtttcaccatgttggccagactagtctgaaactcctgacctcaagtgctccccctgccttggcctcccaaagtgctgggattacaagtgtaagccaccacatctggctggttactattttgtagtaaaattgaccatgagttagttttctttgtatttctaatacttaatgcttgttacagagtatatattcagcaagtggttatttggtgaataaatcaaaatgaaatatgtatatatatgtatagaaatgaattaagcaatcacatatttaaagttcttttgtaatatttatagaccagaatttgactataattttctcccttttcccccttaatcttcaattttataatagagatacctggggaaaaaaaggaatattaagcaaaacatgataaactttcagcaaatagataattgaaacaaaatgatctaggattattcaaataaattcagtatatacttgttagtgactactagtcatcaattcttgtaggctgtccttgtgttcattaggctggactaatagaaatttataggaatctaagattcaaatgtatgaaagtcttttactgaaccttattgcctttacaccagcctgttcccatgacatcttatgttctttgaaagtctggctctcccatttgacttattttactattagtcttctgatgtagtgtgtctgccctgtctctgcgtagtgtgtgggggctatatggtagtcctttcttttctgccctggctgtttgcctttgcctattcttctcatcttccttttggcataatacaacatttttttaaaaagttacttttgttgcttatatacaaccaataattcatacttaagagggataaaaatatgtggctaagtcaggaatctttttattttgtctatttcatgcagcttagaaaaattttcacatgttatatatgactctggggttaaggttatatggaagaaacctttgcaaaaacattacaatttataccttcttcacaatcttacatcttgttaatttatttgccaatttcgtcttcaggagaagacatttaatatttaaggagattgaataacgcctaaggaaaagttatgttaaagaaaatggcattaaaataatctatgtgaaatccattaaataatgagatgtatattttgctgttttcctattattgaagtgatgtggtcatttgagattagaatgatattccctgggagacaggaacttgtgttctgtggctttttttcttctttcttttccaatgggtgcttatattttcttttattattccaacatgcacatttgggtttaagcataatttcacaagttctttttctgtcttttactgttaaatttgctgtttctgtctccctttatttctctcagtccttcatcttctttctcttgttttattgttagtcattcgtgaataccatttttttcctttttctattactctgttggaaaaggctgtgcataacattcaggcaggaatgtggaaacacattgtaatgtgaaaaaaacattgctttttttgtttggaaacttcctgtgtgtgaagcgttttgctctaatctgggcactgaaatgcactgatttccgatccctggagcagagttagggatctagtatttttatttgcctaagtagagagaaataggcaggcaaaatcagtttttcctttctctgccaaagaaatagtgtcataaaatagtgtcatgtattggtttgtttagtgtataatacatctggattatatttttgtaggtactgaatattgattcttatttaaatatgtttatatagttatttgtatatatgtgtatgacagactgaggaaaggctgtgtgtgtgtgtgtgtgtgtgtgtgtgtgtgtgtgcgcagtagtagagatgtggataaatcatagactccaacatatatatgtttactagttactggataattacagaccccaaatagtattgatgcaaatgtgcatcacctcagtctgaggtctgccaactcgaatgatactccaaaactaaactgataatgatgaaactaaatataactattttgtgatttaaagagagcaataaaatcagtggaaaattatgatcaaataaaaaatgagtaatgcattgatagtagagtgtatttccccaatttgtttgaatttaaactgtttccttgtttgtatctacagcaggaatttttcagtgttagtcacatggtgcatggcagccaaatttcccagtagattctgaactagattccttggaaaactctagtaatatgctaaatttaattggagtttgtggagttgtcattagttcaccagacctcgactataccacatttttacagcccctctcctgtcactttaaacaacacagatttagtttttcttcattctgtgtgttcaattctcattcgtcaggttgtagggtgagaaggaggcattttgttctatgctatccttattcagtggctaaggctgatggagtttccaccatctgcaatgtcatagattacagaggcaggacacagaaaagcctcagttttggtaatcatcaataagacattcttcatgacaaggtgtttactattatatctcattgtgtggctttgaaatttgcagattgtcaccaccatctcctaaatatttcttgaatttatctacttctctgcatttctgttgctattctctttgtttaaggtagtgtcatcccttgcctacatcactgtaacagcttttgaaatgtactcctcttatcatagcttgtaatcccttggaggtagactctggaagcttattgggggaaataattttgggaccaatacctgagggggaatgaaggaaactgagccaagggaaaagttgaattgattctctctcaacaaagccatcagctaataatttagagagctgtgaatatttgttggtcttttttagttgttccaagttcgggcaagaggattcagcctttatacacctgtatcaactatctagggggtgtgggctgcccctaggaaggggcatgaccttaggcagaaagccgaggacaagtcagcttttggttgacaatacttacaacagttggggcaatgtcctgaactagggatctgggcagaaaactgtacttaataactttgagatatatttttcatgattgttcatttctaagtaatttcagatttctgctatgattttgactcatatgttatttggtgatgtattttaattctttaattttttgagatagagtcttgctctgtcattgaggctggagtgcagtggtgtgatcacggctcactgtagcctcaacctcctaggctcaagcgatcctcccacctcagccactggagtagctgggactacaggcacatgccaccacttttggctaatttttgttgttgttgttgtttttgtattttttgtagagacagggttttgccatgttgcccaggctggtctcaaattcctgggctctactgatcctcctgctttggcctcccaaagtgctagaattacaagtgtgagccaccatgccaagcctagtgatatatttctaaataactgaaaaaaaaatagttttttattattattgatttctaacttaattgctttgtggtcagagagtatcatgtttttcatttaaaaatctttcagatttgatgaaaattgctttatggctaaggaataagtcactctgatacatattctgtatgttcctgaaaagagtgtatattctcaaattattatatgcaatgtcttatagaaaactcaagaggtcaaacctacctattgggatattcaaaacttctagtgagtttttttttttttttttaattaagacaatggagtctcactctgtcacccaggctagagtgcaatggtgcgatcttggctcaatgcaacctccgcctcccgggttcaagtgattctcctgtctcagcctcctgagtagctgggattacaggcacccaccaccatgcccgaccaagttttatagtttagtagagatggggtttcaccatgttggccaggctggtctcgaactcctgacctcgggtcatccgcccaccttggcctcccaaagtgctgagattacaggcataagccactgcgcccagcctgtgtgggttttttttttttttttttttgagacagagtctcactctgtcgcccagacgggagtacagtggcatgatctcggctcactgcaagctcccctcccaggttcacaccgttctcttgcctcagcctcccaagtagttgggactacaggtgcctgcctccacgcccggctaattttttgtattttcagtagagacgaggtttcaccatattagccaggatggtcttgatctcctgagctcatgatctgcccgcctctgcctcccaaagtgctgggattacaggtgtgagccaccgtgcccggccttttttttttttttttgagacaaagtctcgctctgtcacctaggctggagtgcattggcacaatctgggctcactgcaacctctgcctcccgggttcaagcaattctcctgcctcagcctcccgagtagctgtgactacaggtgcctgccaccacacctggctaatttttttgtatttttagtagagatgaggtttcaccatgttggccaggctggtctcggactcctaaccttaagtaatccgcccacctcggcctcccaaagtgctgggattataggcatgagtcaccacatccagcctttttgtgatgtttttggatatctgatggacctatatttgaaaaagtgattttccaatttttccttgctcgttaggttttgtccctgtttagataataggtgtattacagtgtatcgtgtttccttggctatcaaaacataatgaccaatttttgttttcaagtctaattatgatattaatattcctaaacaagcttatttttgttttatccttgtatcattctttatctttttcatctgccagtgaactgttgttttaggtgtgtctcttgtaagtgcacatctaaatttggactggatttttattttattgtttttctattcagcctgctggagcttgtcttttagctggagagtttagtccatttatatttattgtatttaaaattatattttgatttatttatataatctactttttgggggttttgtttgttccattctttggattctgttttctttcttggcttctttttgatgacgactttaaaaaaaatgtctcttgttcttattttatgtccccttcccattcctccctccactatgttggaaattttatactctatttctattgtttcagtgcttgctatagaaatttcaacttggagacattccttcaggtgtccttcatctttggcaacatttagtgttgtcagtgttttggattttagccattctaataggcacatagtagtatctcatagtttcagtttgcagttccctcatgacatataatattgagcatcttttcatgctattatttgctatctgtgtttcttttttattgagatgtctcttcaaatcttttgttaatttttcaattgggtggtttgtttcctggttgagttttaagagctctgtgtattttggatacaagttctttcttaggtatgggttttgtaaatattttctcccagtctagaacttatgtctttattctttttttttgagatggagtctcactcttgttgcccaggctggagtgcagtggcgcgagcttggctcactgcaacctccgcctcccgggttcaagtgatcctcctgcctcagcctcctgagtagctgggattatgggcacccgccaccacgcctggctaattttttttttttgtacttgtagtagagatggggttttgccatgttggccaggctggtctcgaacccctgacctcaggtgatctgcccacctcggcctcccaaagtgctgggattacaggcatcagccaccatgcccggctgtgtctttattcttttaagaatgttatttgggctgcagaaatttttattttaatgaagttaaatgtgccaatttttaatggtttgtgcttttggtgttatatgtaaaaactcattgctaaaccaaagtcacctagatgttcttctattttttctctagaaattttatagttctgcaatgtatatttaggtctgagatccattttgagttaatttttgtgaaaggtataaggattgtggcaagattaattttcttgcataatgaatatccagttattccagtaccctttgtttggaaagactatctgcatttaattgccattgcttctttgtcatagttcagttgactgtatttgtgtgggtctacttctgggctcttgagtaatttgtctgtcttagacaataccatactgtcttgatgtctgtagctttatagtaagtcttgaagttgggtattgttagtcttttgaatttgttctttttcttcaatattgtgatgcctattctgggtcttttcctttccatataaactttagaatcagtttgtggatatctacaaaataaattgctaggactttgattttaattgtgttcaacctatagatcacgttgaggaggattgatatcttaacaatattgaatcttcctatccatgtacattgattatctctacatttagattttcatccatttctttcgtcagagttttgtagttttcctcatagatacactgtatgtattttaagattcatgcctattttatttctttagtgctaatgtaaatgtcactattttaatttcaaattccagttgttcactgctggtatataggaatgtgataatcttttgtatattaatttgtattctgtaaccttactataattgcttatcagttccaagaattttgttgttattgctgatttttttggaattccttcatagacagtcatcttatccactagtgaagacagttctatttattcctttccagtctgtttactctttatttccttttcttaacatacttcataagctggaatctgcagtcagatgttgaataagagttgtaagaggggacattcttgtatttttcctgatttttgggagaaggcatccagtttcttgtcattaagtgtaatgttaactgtaggctttttgtgtatattctttatcaagtacaagaaatttctctttattcctagtttgctaaactcagtgattgttgatttttgttaaatgctttttctgcatctatttatatgatcataggatttttcttctttagcctgttaatgtgatggattacattaattgatttttggatgttgaatcagctttgcataccaggattaaatcccatttggtcatggtatataattctttttatatattattggattttttagtcattttaatatctaaaaacttaattttaaaatgtttgcttttttcttatttatctcatcatgtttatttttttctccaaatcattttacctgtttgtaatagctgtaacttataatagtatttgtaacaactgttttaagagtcttcatttctgggtttctttctgtcagctattttccttctgatatgaatcacattttgcatctttacctatctcttaattgttgattggattctagacattgtaaatgttacattgtgtgtttggattttgttacctttatttaaaaggtatagatgtttagtctggcaggtacattaattttgtttaggttaaggccttttaggctttaaaaaagttttcttagggcaagtctagcatagtcctttctcgtgttctgattaaacaagcttgtattatgctgtctctctacccgtcacacttcctgtcctttggttcataatttctatttcattatacgtctatggttttttcgtagtataatgtaaacccatgaaagatgtaggcaggagagagatataatagtatatataccttaagaaaatttcactgaccactatgtggcttggatgggggcaactgtagtagtggggagttctgctagtaggccagtacaagagtcctggactgctggtagtttgtgtaagtattatgattaagtattatgataactgagataaagaaaagtgaatagatttgatctttttaaataaagaatttataagagtttcatactatccagcagttgtgctcttacacatagatccaggaagctcatatacaaagttccagacaacaagtacaaaaatattcaaaggaccattgttatataaatagaacaggttacagtctgaatgttcattcacagtggaatggataatgctgcagtatgtttgtaggtgacatagattacagcagtaaaaataatgacttacagctgctcagattaactaatagatttacttagtaactcttactttgcatgttattctttaggcagtttcagccactgcagaaacaacaaagaagacaggcaaagatctttgtctttatgtttttttaatcattgtgcagtgaacaatgtagatattgactaaagcaagaatcattaaagttcatttttaataatgggtgaaaattgtttggatataggatcatcacagtttcaaagtatcaatctacagattatttgctaagaaaaaatggcatactttctgtgaggaaatttaatggatgccatcttaagtaatcaagctttatcagtttgggataaattgactttttattttacttttgatgcgatggaagaactcgaggatacaatatcaactatgttgtatttaagatttgttaaacatcttgaatttaatgagtgaataatcaggtatattcaaattgtggaatattctatcaaacaaccaccctgggttcttcagaaatatcatggtcatgaagaactccccccgccatcagcacaaaacaacaaacacaaacccacactttcccttctggggaggctgagggggttcaaaaggcaagtgaactactttacattagaggagcacaaagaaacgaaacaaagcaatgcgtactatctatgtaattctcatgagcaactttcatctggggatttccttcctttctgtcctagttctttctcggagtggggtgtcttttctcttctgaggtcctattacccatatcagggcctattctatccatctagaggactgttcaacttcctgaaatatcttttgttttctttttaccttggacctttccttgaggaaacaaaggccttgtagttaattataggtgttttgcaattggttatttaaagaagatccccattccccatcacatctccttgattcatgagagatttctgattagtaccgctggattaggaataagacattttctaagaaatacttttcttttcccttctttttatttttcctttcccattagtatattctatgaaattttaattcaagaaattgtaggtgagaaaaccacataagattctttattatacagcgtaccactgttgcatcaatagggtgtcattttatcagcttttaagttaccaggttgtgctaccatgtgtggcttgggttttgcttgaaaagtaaggttatttattgtgtcttgagtaggtaaatgtgacattatcagttggtcaaaaaagataattctttttaacttggaatccataactaaatggaaaatctcctaagctcctagaatcttccttcattcatccccttatcttccacatccaaactgtcgctaactctagtctttgtctttctctctatctctgttgctagctggactgctgcaaaggcttcctcatcagctccttgtttctacctttgccctttcaccattcattcattgcacagcagccaaagtgatcttttaaaatgctgtattaggtacttccctttcctgtatcacaccttccaacttgttccttctgtctggactcatcccccctcactgattttcagagtgctcgctctatcttgtcattaggttctcagtttaaatactagttttctcagagaagcattttcaaggagcagtaaccctgtcactctcagttacatttattccctccgtgttatagcagtcatcactatcttacattgtgtataagacatacatgcacttatttatttatattaatatgtgtatatacataaagaaatactgcagccttgacctcctgggcccaagctgtccccccagctcagcctcccaagtagccgggattagaggtgtgagccactccacccgactcagacatatatttagatgcatgtatgtttgtatatcattgtctgctagatagcagggagttttctgaatcgttggcctttgtagcctgcagagagccagataaggcttatagtgtatattcagtaaacattttttaaactgatgaatacaaatttgatagtagagttagaaagaaggctgcttgctttgtggtagaaagtaagacgcactggtagctgggaggtgagggacccagagaagatgtcctgtcctgcacttaaacctgcccttgaaaactgagtccagaaaagtagcaatggaaactttgtagtactttgctaacctaagtttctgtattttcttcgtatattttgtcatatagtattagtagatttcttttcggaagcattagtgcctcttttattgtgcagaagagaataaggagtggagactgtctctgtgttggaggttcagtgtcagtaggggagtcacttctgtgtctggggtgaggtaaggtagtagcagtaagcatcccatgagaggacctggaaggtgaggaaaaacttgggaagggcactagagcctgatttttttttttttttttttaaagcagtctcttctactaggactttcacctccttttacgagtagaatttgtattttgttatgctctgtgtattagtccattctcacactgctaataaatacatacctgagactgggtagtgtataaagaaaaagaggtttaatgggctcacagttacacatggctggggaggcctcacgatcatggtggacggtgaattaagagcaaagtcatgtcttaacatggcaccaggcaagaagagaatgagtgccagcaggggaaataccagacacttacgaaaccatcagatctcatgagaactcactcactatcacgaggacagtgtggggaaaaccgccctcatgattcagtcacctcccgccaggtccctcccacagcacatggggattattacatttcaagatgagatttgggtggggacacagagccaacgcttatcattctgtttcaaacatatgtcagctgaagaatacaaaattaaacaaatacagtatagacaagagtcaagcacagaagtaagtgctccagtggatgagaaaatgtgagagaacattagtggaaatttcatgtccagatgaggtgaggggtaacaagtaccatcaacttgatcatttctgatttttccaggaatgccaacttttgactaaatatttttttccttccacttcccatttacttatcttaattagagtggcagggacacaagaaagtagggatgagggactgaactgttggatattatttaacattatctgtgtggattattcttttccctcctcttcagatttctaagtattgtttctccatggtgtggtgacagcatatgtactgcctgaaatcgatttggcataagaagttgagtagaaaaccttactgttacattatttcagaatatagctcaatggttaaattaagagttagtatcagccaggttcagtggcttatgcctgtaatcccagcactttgggaggccaaagcgggaggattgcttaaggccaggagttccagaccaatgtgggcaatataatgagacccccatctttaaaaaaaaaaaaaagaaaattagctgggtgtgttggggtgcacctgttgtcccagttactgaggaggctgaggtgggagggttgcttgagtctaagaggtcaaggctgcagtgagccaagatcacactctgcactctagcctgggtgacagagcgagaccaaaaacaaaaaagctagtctaacttgcatcagtttcttccttcctcccaacatttttctgtttggcttgtgagattttggtcagggaatcttgccttcctgggttacatgtattcacaggtctaatgctgtgatgccagcagcactgggagaccacaatgccttattatatattgtcctattctctaatgacttcccaccttttctgagcatctgataattttttgttgataaattgttttatgtatcttgtttccccagcttgttccttgtgagcaagaatgatttccatgtcatattttgaaattcacaaatcactgtatagtccagggtccttagtaaatgactaaaatgcgattagtactggaaccagaaaaactgcaaatttcctaatcgtcagagggaactgaatgtagtggagatgtgggctgtctctcagctcttgtggcttcctgttacatggataaatggtttgtgatgatgcattgataaaatatttttttgagaggatgggggtaaggatctattaagttgttgtaaacagggttttgcaggtataccagtttcaaatttttagattgcgctttttcactcccgtaaaacaggctaattcttctctactgatttcattctgattattttatgcttgttattgtgaatgagacaaataccattcttgccattctcatgcaggattaaaactcgtgcataatctcttgcagaatcaagaatcaaagcatgcacaatcttctatgctttgtccccatctatgttttctattgtgttttcccctaccatcctgcagataactctgtacttcaactgaattgtttcagtcattccttaaacttgtcctataatctccacctctgttttccccactattcctgcctgaaatgttcaagtcctgctcattcttcatagcatcatttaaatagccctttcttttttttcttctttggaaacggagtcttgcgctggagtgcagtggcgtaatcttggctcactgcaatctccgcctcccaggttcaagcgattctcttgcctcagcctctgagtagctgggactacagacgcacaccaccacacccagctaagttttgtatttttagtagagacggagtttcaccatgttggccaggatggtcttaatctcctgacctcgtaattcgcccacctcagcctcccaaagtgctgggattacagacatgagccactgtgcccagcctaaatggcccttctgataatacacttttcttaattatttttctctctacctccctgtgatcctttctgttttgaattgccagtgatagaactatttgggtcctttgcttttctcttcttggatttgaaggctcccagtgtaagagcatgttctttatctgtcttctcagtgcactgagcattgtttcaaaaataccagcccatataaacatcatgaacagaaaaaaattttaattgaattaattataaaacgcttaggaagcaggtgccattttaactaagttgaagttaaagagtgatgttttgtggtttggggttcaaaaggtctatgacatttggccttctcttcccttttcctctaaggatcctatagcttgagttgagtgccagtagagcattacaggccaggaaggatcctgtaagggctcactgagctcttttttcttcagaaaagatcataaacaaatggtcccaaacataggagtatctctaccttgtttttagaaaacatctaaagaaggagacttgtacacttttcttgataaatcgttgtaaatgactcttgctgtcagaagttttactgtataataactaaatacttaatcatgtaactgatgacaattttatgagtttaaaactttagctggaagtgtgctttgttttgaccttactttgtattttcataacaccctgttaatgtacggaacagtggaatagcttctccattgataccagtgagccctggagcttctgctccagcccatagcatcgtagccaggtttggattttccccaataccatcatgtcacttcttgctaataaaagctgtaggggttgtctgtgactcttcagatgaaaataccttaagtacctgaaaatcaccatttttgaaaaaagggaatttgttatgcatgcaaacctcagttttggagatgtttcctggtgctattataagttgtttcttatatctttgattacttaatactgtacttctgtttttggaatccactgttaatttatgtgtgttttcttagcttttattactggggaaagtgttatgtttattggtacaagtacccttttttcttttaaaatggtcacactctcattttttaaatacatcattacactggtgttactttcctggtgttattttcctgactctaaagaaaggaacttttaaataaattaattattgttttctgcgttattgaacatgtggtcaattgtcatgttcatacatcccaatgatcaaagtctgaacttctgtctaattcttccctgctgttaggctaccctgtcatgatcaaggcctcagcaggtggtggtgggaaaggcatgcgcattgcttgggatgatgaagagaccaggtgagaggctgtccaaaatatacttttgatgaaaattgcagttaccagagttttattaaactgacaggtaaacagataccaaaagcataatggagtaattacagtaaccatctaatttttacacttttgaatgggaaaaagattgaaattatgtggaaaccttccttatttatattttgatgatgattatcttattatagaaagggttttactgttttaaacattaacaaaggattttctttttgtttttaccgtatatttttaaaaattacagtcaggattctattttctgggcataaattactaacatttggctatataattctaaatgtcatctaaagatttaaatcaactatatttaaaagcagttataatttcattgagacttaatgtattacctcaatatgtagttgctttcctttgctagtgcataaaagtagtgaattactttgataattttagagtgtgaaatatattctttttccttgagtttgaaattactgtgtcctttatatggaatgcgctcttattataatttagaatactttttatggcccaatctcagaagttacacaggtttccctccagtgaacacagcttctgctcaaattcaaggggaggggactgagtcttcacttcttcatgagagcgtgggcaagattcttagaagagcacgtggaatgggagatactgttgtggccatctttggaaaagacaatctgccacagcccgttttgtgggaaagaatggtatcataaagaagtcgaatacaacttaatggttttgcaagagatgtgtattttgtggacttcaatttttttctcattgtttttctgttttgcacagtacttacatagcaatttcactgaacgcttagcgcttatttttcattattcatcttaggatctcaggtttcttatcagtcatttctccagggctactgttagtaacttactcttttatggtgcggattactctttatagtttcttggaagtgaggtttgctgtgctgctgttgatttataaattttaatttacagcttaatattttgagaaatcactatatccattcatatattaggcatcattttgtaaataatttagccctttcttgccaagtaaatagcacattgattcaaaatatgtttataaaattaataaaaatacatgaataattttctacttaaaatattactctcttcagcttgataaataaaccatctcagaaaacttgttgagatcaacacaggcgtgcctattagatttaataatacaagctcctcattttaagaagttgctctatgtcccttatttatttgggaaagtcaaaactacctaaaaagggaaagaacagtactgcaaacatgcctatgcttgtcttttggagccactaaccgtgaacaccataccacaacttatccaccccttcttttcctctctccctctcgaggaagtaattggtttttacataatccacaaagatttcatttttcaggtacaaaggaaaatttggtagcttaattactttattcctttatcctaaggggtgtctttttcttgtaacatctttcctatgttttttggggggaagtagcatctatgacttgtcttggaatctgtaggacatctgaaagattttttttaaaaatgtaatggtttttttttttttttttttttttgagacagagtctctctctgtcgcccaggctggagtgaagtagcacgatcttggctcactgcaatatccgcctcctgggttcaagtgattctcctgcctcagcctcccgagtagctgggactacagctgcacgccaccacacccagctaatttttgtatttttagtagagacggggtttcaccatgttggccaggatggtctcgatctcttgacatcatgatctgcctgcctcggcctcccaaagtgctgggattacaggcgtgcaccactgcgcccaacctttattatatagtaaatttgggtgagaattatgaagattgttgaaggttcacttagatattttcatagtaatctctggctttcttttccctattcaagtttaaatgaagcgtatggcatgattgggaaactgattgtgtctatatttttgaatatccccactaagacttttggcattgtgagtgcaatttctgttttatttttgtattcctagcatctaaaatatatccaggcacaaagttcagtaaatacttattgaatgaatgtataattgaatgtcaccagtgatattcataatagagtttcccatgagttctaaaataggttgttggcgatgctttcaaacttgctgcttattttattttggtgactttgactttttacttgtggtgttctgggtttaaatgcaaaatgaaagatctcaatcattatagtggaggcaaactgtaaagtgctatattttttctttctgttattatatccaatctaataaaaagttgattatatggtatcgaaaactaattcattttgcttccagtttctttgaagtttgcagcctcctaagattcccctaaatcaacaatgtaatggaggactttattcccctaaatcaacaatgtgatggaggactgagaaaacctaataccttttctctgagacctctgagaaatgagttttttgcaatgttttgaaatttgtcttctagtcagttttacctgcagtgttgtacaaaaacaagcaaattagttgtgtgtgtgtgtgtgtgtttttttttttttttttgagatggagtctcgctctgttgtccaggctggagtgcagtggtgcgatctcggctcactgcaacctctgccttttgggttcaagcgattctcctgcctcagcctcccaagtagctgggactacaggcgcacactgccacgcctggctaattttttgtattttagtagagacagggtttcaccgtgttgcccaggctggtctctaactcctgagctcaggcaatccacccgcctcagcctcccaaagtgcttggattacaggtgtgagccactgcacttggccacaaattagttgtttccaatattactaggtggactgtaggattaaatgatattattttaaagttgtaataattaaaacgcatcttaagtgtaccaacctggattactatatgacaaggattatcattaaatttttctattagtagtctgtcatcgccaaaactagaagcagcttttgagatgaaaaaccatcctttaaaaaaaaaaaaaaggaagaacggtcagactaacaaaacaaatagagcaatagggctgacatcattaaagaaaacacaaaacaagcaaatcagatagttgttttttatattactagatggaccatttgcaacttaaaggactggaagaatttggtttcagtattgtacattaaatacagacatttagtcttcagattaagaaactttattaaatataaaaggaattaaagcacaaaaataagcaaattggatagttatttctaatattagtagatggaccatttgcctcttaaaggatcggaagaattggctttaatgttgtacattaaatacaggtatttaatcttcagattaagaaactttattaaatgtaaaggaattaaattttatatgctgattatatcaatggatagaaggcaatatatgctcaattacttttaggcaagcaagtttgggttttttttttaattgttttttcttttcttttttttttgagatggagtctcactgtcacccaggctgtagtgcagtgacataatttctgcccaccgtagcctctgcttcccaggttcaagcggttctcctgcttcagtctcctgagtagctgggactacaggcatgggccaccacaaccagctaatttttgtatttttagtactgatgggatttcatcatgttggccaggctggtctcgaacttctgacctcagggaagccactgtgcccacccaagtttgcgttttgaaaagattggtcaaatgagccctaaatatttgaataataggcatattttaatagtaatgatttaaattagtttgtaaacaaaatatataaagcaataattaggtccatatttttattttaaaaaactatacttttataattactatttttgatcaattttatagaagataaaattgtaatgatctgtgtgggtgtatgtgggaggcaactgcatttcaagatgtggatttaaaatattaagcagtgttcttaagaatcttcctgttggatgttcaatctcaatgagtgtatttgctgtagttccactccagtcatgcaggtgactagaccctttacatttttctttgcatcttctgacttctgaatcaaacagatgtttttttatatttttgctagtggaattaaggtatattatggttgaagaaatggaattaattttacttgctctgtatggtttattaaaatatcatatttaggctgggcactgtggctcacacctgtaatcccagcactttgggaggctgaggcaggtggatcaccttaggtcaggagttcaagaccatcctggccaacgtgttgaaaccctgtctctaccaaaaatataaaaattagccgggcgtggtggcacacacctgtattcccagctactcgggaggctgaggtggaagattcacttgaaacccggcaggcagaggttgcagtgagctgagatcctgccactgcactccagcctgggcgacagagtgagactctgtctcaaaaaaaaaaaaagtgatacttagcagttggtaaagtatcggcattcctgtttcaatggaaaatctaggatctgagaagttaaataactcatccatggtcacagagttagtgagtggaaaagtcacaggtcaaccaaaattaacttagttatttgtatattgagtaaaggtttttgcttttttcagaataagccaaaataaatatttaatcgattgtgttttcttttataatgatagctctatttgttttgttagtctgactcttcttctccttcttccccttccccttcccctccctctccccccctcctccttcttccttctttttttcacagggatggttttagattgtcatctcaagaagctgcttctagttttggcgatgatagactactaatagaaaaatttattgataatcctcgtcatatagaaatccaggttggtacatttaagatgctttttcattattattttaaaataatatcatttaatcctattggaattatcttttcttccatttagaatgattgtgagttgtgcctttagaatctgttgtactttccgttaaagtgctaggatgttggttgggattgggaatgatacaaaaatctacctccaaaaaatgcattcctaagatagccgaccaggctaatctccttccaagactggaccattatagggcattttttaaaaaagaaaagtgcctgacctggactcctgtgctacttcagtttaccaaatgtccgtgtagcttgctgtgacaggtgttctgctaggagcttgttgtatagagatctgtaaatcatttcttctattcagtttaagatattcatccttaaagtggttacgtaggggcatagattttggcaaaacaaaatgggttttctaaaataaaacggggaagaagacaagtctgttgaagttttcatttgcctgttgaaaatgccttcatgctaattttatacattatgactatgaattgatatgtaatagctaaaattgataaaaacaaatgtcaaattagaaataatgaattttaagtatttttttaaatcttaatttggtgtggagagggaaccagataaataaaaggttatttgctgaccttatattttctgacaggggcatgatacaaaaagtcctagattctgtcagtttattccttaagtttaatggtcactttcatagatattatttatgggtggaaaatcatcatttcaatcctcaaattttctaaagtgagaaaaaatatccaaacttatataatcagttggatgttttacaacattgaacacagtttctttctgaggctagcaggctttgttttttgcctttttaaaaagattttctaaattgatatatcacatataatatctgtatatcatatatacggtatctgtatatcatatatacagtatctgtatatcatatatatggtatctgtatatcgtatatatatatatggtatctgtatatcgtatatatatggtatctgtatgtcatagatacagtatctgtatgtcatagatacggtatctgtatgtcatatatacggtatctgtatgtcatatatacggtatctgtatgtcatatatacggtatctgtatatcgtatatatacggtatctgtatatcgtatatatacggtatctgtatatcgtatatatacggtatctgtatatcgtatatatacggtatctgtatatcgtatatatacggtatctgtatatcgtatatatatggtatctgtatatcgtatatatatggtatctgtatatcgtatatatgtgatatctgtatatcatatatgtgatatctgtatctcatatatatgtgatatctgtatatcatatatatgtgatatctgtatctcatatatatgtatatatatatacagtgaaatccataaatcttaagtgtgcaattgaagacaatttctatacacacacatctaattgtgtaacaaccatccaggtctagatagagaatgtcccatcacaccacttcctagtcagtccctacctgtggccgccaaaagtaactgctgttcctatctgatgtcagagattagttcttaaattgcataaatgaaatccagtgatatagtctgtcacgtcttctttttcacacatcatcatatctttgagattcttccctgaggctctgttgtcctttgcttctaagaattgctctgtgatctcccattatttgactcacctgcagtttatccatattgttgttgatggatctttgggtttttagtttctttatattagaaataaattgctgtgtctttttatgaacatatatacatctctaggatagactgaggagaggtattgttggattacatagtaaggttatttttagttttagtgggtactctggttgtgctaatgtatactcccaccagaaatacatgagagtttccattgatgccacccctgccaacgtgtgatattttcaatttttgaaaacatttaaccatattagtggacttacgatggtatgtctgtttaatttgcatttcctggatgagtaatgatgttaagcatctgtttataagtttattgaccatttgaatggcttattttgtgaagtgacttctcaaactttcatccttgccttcctttttcaaattagatttttaaaaattactggagtgtccgagttctgtatcaattttgtttatgagtcctttgtcagatgtatgtatagtgtatccttctcccttcatgcggcttgcctgttcactttgataataatgtctttcaaagaacagaagttctgaattatagtgaagtcaagtttaagtctactttgtgtaccctagttaggagtttttttgttttaggtatgatatttaagtctgttactctcctttacttattattattttgtttgtttgatgtgaggcagggtcagagtaatttttaaaattctgatatccactttttccagcatcatttattgcagtgaccttttgttgcatattaagtgagacttcgtcattgtcttaactattttgcttttataataaatctagaaacctgattctgtaagtgatctaaatgtattgtttttctgcagatagttttcattctctttaggttctttgaatttccgtgaaaagtttagacttcacctgtcaacctgttccccctacggacacctacgcctacacccacccactcccacctctacctccactcccacacaccccatctgatgggagatttgtatttgggtcgtattgaatctagagattattctggggagaattgacatcttaacaatgttgaattttctttcttccctctctccctccctccttcgctccctccctccttctttctgacagaattttactctctctcccaggctagaattctggatattttgtgaaggtagaccagattttctaatagatggatgttatgtacaagaaaaaaaaataaggtgattttagggttttggcctaagaaatgagaagaatggagtgggcttttactgagataggaaagactgtgagatgtgcttgtttttgagggaggaaatcaggttataaagttggataaatcaaggttgaaatgcccattagatatctaagtgtagatgttgagtagacagttggctatttaaatctgtaatttaagggagatatttagattgtccttcttgtaagatcgtaggggcagaattaattttgtccttcactgtattccccatctagcacttgttcacactactggaagaccacttaggtaggctgttttatctttaactagttgaatttcgtaacaggccatgaggtccttaagggtagagagtaggtcttactcatttgctgtccccagcaaccagaccattgtctttgacattactaatactcaataaatgtttgttattttgtgttaaataattacatacctagatcagctttttagtttattttatttagccatggcatacagcctgggtgatatttttaaacataagtgaaaatgcctcccagttaataggccacacagatgttctcatatctcatctatacttagaagggtttttaatttacttttctttagttttcacttatttatattaagtaatttatgcacatgataaagggtaattaataaaaagtaagcatcccttttactctattctaagtcctctagtttctgtccctaaatgcaggcaccgttactgtttcttggctattcctccatacatagtctaagaagtatatgtgtgtatgtcacctattatttttcacatgagccattatatactatgtcctttccacaatgaaactgcactggtagtgtgaatggcacctctctttgtggcataaaccagtatttctcaaccagggcactactggcatttcctgggttgggtctagggataccaacaggcttgcattatgtgacattgtctattataataaagctttttcaggaagcagtatagcttagagatttttctacattcagtacgtgtaaacctataaaatttttaaaaaactcatgatgcatttaaggattaacttcccttaaaagcagtatttatttataatgttttctgattacatggcttcctcatttatttaatggaataaataatcagcaaatcatttttgttgaatgcctagtaagtgcacagaatttttaaaaaatgaactgggagactatacagaatttagagaagaacaaactcttgattctgtatatgaatctgatattttatagttggaaatatttctgagaattcttggttattttggctttatttcttggagactgtctacttttactttcttgtcaactagaatttaaaaagaggttgagagttattttaatgatttcaaatatttttagatttacttcatgcagccacctttgagtcttagaaaattccagcttattggcattttattgctgttatgttttccttcattgcttggaatcattcttgagtttcagaaagggtttgttcctaaaaattaactttacagtcatatattaactatttattttacattttaccaattatagccatgatctttatttgatttttttcagaagccatatcaaatattaagattgatattatctgctatttataatgcacaaagaaacagaatgacttgttcagagaagttgcatagctgtttggaactaaaattagtgcctggtctttgggcttctaaaacagatcttacctctgtaaacctaatatatgtattcagaaatataaatcaacaccttaaatctgaaaatagattggtccgtttctgaaaatcagatgttctaggcaaaaactttaatgaagagctgcttttgagtttccagatttagctgaaaaagatacatgttaaatttgaatttcagattaacaatgattttttaaaatcactgttccatgtagtacttgggacatagctagaaaaaaattattcattgtttatctgaaatttaaatgtagctggatatcttgtattttatctggcaatctcagcttattttccattacaggttgaatgtatctcttaactgaaatgcttgggaccagaagtgtttcagatttcagatttttttgggttttggaatatttgcatttatacctgctggttgggtatccctaatctgaaaattcgaaatgctccagtgactgtttcctttgagcgtgatgtcaaaaaatttcagcttttggagcattttggatttcagattttctggttagagatgttcaatgggaaaaactattatgtttgtatattaactccagacctttagcagtttcctagaacaaaaataaaccacagtacagacatccatagatagataacagattacatattgggtggaaatgcatacaatgtcatttcccaatcaacagacatttaataatgttaacatcaagcagatgtttgtaataaagctgcggtggcactcctcagcaacattgacatccagtgtttatccccttcactaacactcagtgtccttcacaaaatttgtacaactgattctgatgttttactcgttgtatttgaaaggtgatatgaacactttttcctcaaatctttttgataaaaatgttttattgagctttggagtaataaatatagttttcctttgttaacatgaatcaaaataatgttttgagaggtatgtatatactatgaagtttgaatattaaaaaccaagagatgttgcatgcggaaaatattaaccatcatctactttgtgggtgtggttatatggtttttcaaatggtattgctctttcaggttctaggtgataaacatgggaatgctttatggcttaatgaaagagagtgctcaattcagagaagaaatcagaaggtggtggaggaagcaccaaggtaagtctcctaagaaacatttataaagcggctgcttttatgcatttcattcattcattcattcattcatcattcactgacgcatgcattcagagacagggtctcactctgttgcccaggcagtggtgcaatcacggctcactgcagcctccacctcccaggctcaagtgatcctcccaactcagcctcccacgtagccgggactacaggtgtgtgccaccatgcccagctaatttttgtgttttgtagagatggggttttgtcatgttgctcaggctggccttgaactcctggcatcaaaagattagcccacctcagcctcccgaagtgctgggattataggtgtgggccactgctcccagccacatttctttttttatttgtttgctttatcagctacaattgcactaatgttcatgtagactctgttactgcatatttttataattaagaatttgttacttgatttcctcagtgctttaatgtgtaaaagggagagaatacttgaaaaagaagtgggtttttattagaggagaaagttgggtagacagccaactgtgacttctgcaggcttctaggaagtatggaacctgatggtacttcacgggatttctgagatatatgccttctagactttcatgttggtgaagggttcataaagttggtcctgaatttatcctaccatgaaaggcttctggagtgtggttcttggaaattccttgaattatcagagccactttgggtacttctccagggcatctttcatgagtttggtgtatggggcctcatttctcatttgatgctaggttgctatttgtatatactctggtattctctttgttcttaaaaatcctcaggtgagtgttcctagtaatttttaattaccagacggtaagaagtatagcttattgtagctttaatcagcagagctagcatatcttgatataatgcctatatagtttctgaaaatagtaagtgagaatgtgagtatatttttaatcccggagtaatggtaaaaattcaactctattttagttacattggtttttaaaaatatggcatggtgttattagttttaaaacatggaccccaaatcctttgccatttttctctttgagcagtgaggggaaggatcattgttcccttttcttgattctgtgctctgtgaaggcttgacccgtagactacttagaagtgatgctgtgccagtttccagcccaggccttgggaaactgccagcttccgcttcctgttctcatgggatgcttgtgcttacacaccagccagtatgctgtgaagaactgtgtagcttacataagatgtggccatctagttctcaaggcccaggaacaggatgtaagaagggaggaagaagaaaagccaaagggaatcctcttcctgtgtctttaggaagatcctggaaggtgctgaagctaattacttggtgttgatctgaagttagacacttagctagggagacttgttagtatctttttcttaagaaaccatgtgctgagctagaactagtactgtagtactgtagtatggaggaaggggaaaaaggatacctgtggaacagtaagagtcttcaacacacatgtcttgcaattttctgtttccttgactgattatcaattccaattcaattaacactctgtttttagtaaaaacctactcaagtgttacctgggatagaaatctttcccagactgggaaccttgaatcataaaatgtgtttgttttttctctttgtctagaaatacaaacttttcataatgaataccttatctacttatttagagaaaaaaaggaaaatatacagcagtaggaatcaaaatgaaaaagctagaactcatcattaatactgacctgatatgtatttgtacactgtgaaatgttaaaataaatggaatgtgtagttttcagttcctggagtaagaatcggctgggcatggtggctcacacctgtaatcttagcactttgggaggctgaggtgggaggattgcttgagcctaagagtttgagaccagcctggacaacgtagtgggacctcatcttcacaaaaaagtaaaaaatcagctgactgtggtggcatatgcctatagttccagctacttgggaggctgaagtgggaggattgcttaaccccagaggtcgaggttgcagtgagccgacatcatgccaccagattccagcctgggtgacagagcaagaccctgttctcccccaccccccgaaaaataaaaataaaaaaaagaatctactaatgtgctttgagggcaatgctagctagggtcactcatatctctggatatctagcagggcttttgaaaagggcaagggcaagatcaaataggagaaagatagtttcacagagctgcactgagattctccagatgttatgctattaattgttagttggggttttttttagttgcattaattttgtcagccagttattgttgaaatgtcatctatgtctatacattaggttaatgcaaactatattatagataattcataacacttgaacccattgatttattgtaacttcaccaaaagggagacagtaggaagtacacttcccacctgtgaactcttccccctcccccaccccaatccaacttgaatatattcaaggctctgagtctaactagcaatctatatgaaatagaaatgtaatatgaatgttaaaagacaccgtggggttgcatgcagttgaaccaagaatgtgagaaataagacagtaaaatgaccagatccttggccagaaaatggggaaggggcattacagattaaaagagtcttaagatacaaaagccaatcaaatgcagttttggaccttatttggatcctgattcaaagaaatcagctgtataaagatatttatgagatagagaaatttgaataccaagtggatattaaatgcttttaaggagttcttgttttttgtgtagttgtgttacaaaagggtactttatctcatagaaacagacatgtatgtttttaaaagtgaaatgatacctaatttgggatttactttaaaaacaataaagggtgggcctggtagagaagtgggcaagtagcatagataaagccagagtggctatgtattaataattgctatatattggaggcagcttcatgcaagttttttatactattccataataaagcttttatagcatgtcatctcaatcctgctcatttgagaataattttaatccacaagtagaaaagtagttaatgttttgtttctcagagcctttctttcatagaagcaaaatctgtgaaaatgcaaagtggtttgatgatatttttttcagggtttgttgaagtcattttagcttaacttgcctgcttgaaggtgggtttggtatcttgaagccaaacgtgcaggatttagtggatgtattgctgattcttgttatttgtggcagttatgttctctaaagtcaccttgattactgaattagtgaacactgaataatttcccctaggggaaatacagggttaggttcctgcgagcctttgcttataacattttcctcagtggattaatacataattttgttttttgtgtatttctcatttaatatctgtggttgattcattaacagtgaactcacaatcctggccaacaagactataacacgtgcctgagtaaagcttatcccacacacattttctccagacagtacttcatggccttcttgcacatgggaaccccagacagcacctaaggacaatgcttgatgggccatttcacaccatgaaatgacacacacacacacacaaatgcaaaaaaagtgacactaaacagaccttgaaaaggatgcttgttatagtatgagcattgaaacgagaagggagagcatcaccttgttcagccttagcatactggagtctcaaatttttcacctctctgcacttgttcacaaaggaccatgaaagcgccttaagtattgattttggggttacaaataaatttcagcaagtaggcagatttgtaaatatggactacatgagcaatgaggattgattgtgtatgttagatactaataagttatttttctcccagtttttggctcgaagcaattctgaatatatatgttaaatattagaagttgaagagtagttatatattttgtgaatggattgaagttgcagagtaatgtgaaaagttcaaatgttttatacaaatctaaagttgacttatttgagcatgttatgcttaataatatagtcaacatatattataaaacatatataaagcacaatattttgaattcttaaattggtatagatgatctatatctgagtaaactttaagaaaatgtttatgtaatgcacacaaaagataacttgatttttgtccgaaatgtagacaaacatttttttgtatatgtagcatttttttggatgcggagactcgaagagcgatgggagaacaagctgtagctcttgccagagcagtaaaatattcctctgctgggaccgtggagttccttgtggactctaagaagaatttttatttcttggaaatgaatacaagactccaggtaacaacaactgttatttattcctctccatgcctctgtactttacccttccttctccacccttttttgttttataaatgttaaaaaattaactccataaagtgttaaataaagatttagtttttatgcttgtgctaagacatctgttaggaatgacggatagtatccctctaaagttcaatgtctagacctctgctttgtcactgttaatactttatgttggaaataccactttgtttttttcttgaacctttctagatgaactgtatttgtcagtgtgtatgtgctgttaagaaaaattactctagatattacaaataggaagtgatacagtgattgcaaaatctttggaaggatggaggaaggaagggtacccagagtgaacttcggtggtgactcccactgctgtaccactcagccaggctcccagaggaaccggcacctctgccacagtgaggacgttgagaatcaagtggctgcccttggaactgttggctttgggggacataacttccttagttctaaccaaatctcaggaagcgactggcgttgtaaccggtggctttatttccttccttcttcccttttttctttcatttaaattgtgaactatacagaaacatacatagaacacaggtgaataattgaatgtattattataaagcaaaaatcaatgtaaacatcaactgggcctagaagtatttacaaaacagccagctctttttacactagcctcattttcttctccttctcaatgattctgattccccctccatcttccctagagctgtctcctatctgactgacttctcagaaccttcagttttcatatcattcttcctttgaattacgcatacctaagcagcattattacttttgtttgttttttaaaactatattaatgggatcgtatagtattcgttcttttgtgcctggcttcttttttcagcatggcatttgtgagatttgtgctatttcatggaactcctgtatgatacattttctaagaaaatgccactatttctttatctgttagatttctgtagatagtttatttccagttttatggaatttgtgttagtttgctaggactaccataacaaatgatcattaactatagcttaacacaacagaaatttgttctcgtacacttcaggaggccagagtctatcatgcaggttccagccgagtgggttccttcctggggggttggagggagaatccactccatgcctctctcctggttctggtgttgccgacagtccttggtgttccttggctttggcagcataactctaatccctgcctcagttgtcatattgccttctctctgtgcatctctgtgcccagggttcccgttttctgtagggacactagtcacattggattcaggacccttcccatttagtacggcctcatcatacgtgatttcctctgccaagatcctgttttcaagtaaggtcacagtcacaggttgtgagtggatgtgaattttgacacgacactcttcagtccaattcaccattcaaaaaacacatatggcctacagagataaatagattagtacttgcctaggactggggtgggtgagtggggggattatgggctgatggctaaggggtggaataggacaggagagactgaggaaggcatacttatgcctgaaaacagtgtcaactcttcttccgttaggcccttgggggagggggtggggggggagggggtgttgagtcactgcaggcatgagctgggtcgagcttaagccttcctgcagtggttttctcacgtgcaccaaggggccgcttgtgggatttctgcatgcctgcttcatcctgagcttgagggcttgcctctgaccctgtgcttcatgggagccgtgtcttcatgcctgtgcctctttcccagagggagactcctgtgggccctggttagccctaccatgggtgcaggagggctgttttctgttcgctgtgccgtggcggtagaccgtccttgtgtccttgaactttgaggtgagttcagtagtggccctgctgctccccagccgtggggaagctgatgttctgggctccaggtggatttctgcctctttcctgatggttatcttttgcgtgctatggctttcttcatgcttttactctcgacctacctgtttgaagacagttcacgtgtgcctctgtaagcagtgtataatttttcagcccagtttgatatgtttgtcttgtatcttgaccatttgctccttagaaagttgacagaaatgctggtatttttgagtttaaatttctaatttttaaaaatgttttcttcttgtccaatctctggcctttttcctttttttttctttcttttgcagtatttatcatttaattttttcctgtacaagtttgggggttataaatactgctgatcttttggtagaacctctacattacaacacacatccttaatttatcaaaaactgataacagtgtcttttcacctgagctgccagactgacaagggagcttagaacatttaaagtccgtttactgtctcctgacttgggtacaattatcccccgaggccatttctcttattattttagtcatcattcattccattcctcccacatatttacctttctttgtctttgtttctggtagtttcttttagaggtttacttgggacaatctctttttgttgacagccaatgactttatgttgccttgttcatgaaatgcgtttttactcttcttagacgtcttggctgtgggccgtggctcacccctgtaatcccagtgctttgggaggctgaggtgggaggatcccttgagcccaggagttcaagatcagtctgggtaacatagtgagaacttgtctgtaccaaaaaaaaaaaaaaaaaaaaaaaaaaaaaaattagaaatcttagtttggccagtatttttttcaatttattgaaaatattatttcactgtttctggtgagacttccccactcattctgcattctgcttatttggacataattgatttttccttttggtagcatttattaatttctgtttttgttagatttcctttaactttttgctgattcgtgtacatgtatacatggaattcattgaatattttgtctgtagattaatgtcttttaattttttttggaaattctccaccattattacttctggaacaatctcacatacacagatgaataaacctataactttcattttagacctccttaatatatctcttatgtttcttatgctctctttgatatttttcatcttttttggataatttcttctgtctttcttaccttcccttatgctgtatttaattaattaatcacccattgagttcctgatttcaattgtttatatttcagttctgaaatttctatttggttcttttaaaagtatgattcattggtttttatcttttcttgtctcctatttgaattttcaattttgacttttattttttgaacataattaacttatttgttttgtagtacatgtctgataatgttgacatgtgaagtcttatgactacttgtattaactgctttttatgctgtttcttggttctgctgttgagttcctgttgggccttgttattatactgtcatatacagttattttaaaaattgttattaatcaaaacctaagatgatggattctttcttatagagatttttcaaatttttttctgccacatgcctatggacagtagtatttgtgactacggcaatctaagctcaaagtgtaaggctccttgaactcctgaggggatacacagcccggttgcagttctagagaatggttggttttattccagttcagtcttatcttgaggttgcattcctttatggtgcccactaaaagtgggggtagtttatcaaggttctttgataaactgatactttggtggcctcttatcttcgtggttatgcttttgatttgttgatgccaccaaaagtatagcttatattcatagtccttttttcctggaatggcaaatgacgttagggcaaaaatggtgttgagtgttgggtttgcaaatctgtgttttcatcttggttttggctgatcccttcctatattcttaccctgtgatgtttttaagaagacctcccccatctcccattccccaccagttgttttctagtccccaataagcccaagttccaagctgagtggctttagaggtacattatgcctatagattaaataagtttgtgtcctgactctcaacaccccccaaaagcagtgagcgggcagtggaatgacagtctgtgcctcactgctatctcacttttcctttccaaatctcatgcatttgcacatccagaacctcatgcagtcacatggaaacctcagctgtaagggagtctgggaataggctttttaaccatctgtattctgcagtgtaagagtataccctagaaggagtttggagggaaagttcagtgccagcccaccattttcacatgaatataatcaccaaaattttaatctgtaagttatatgtaaaaagttaaaaacattgctgtattttcattgtaaagtataactgtcaaataatgtggctgattttccttaagtatggcaaaagtgatctatctagatgcattttgagactagtattgtaaatacttgtagcattttataggtagtagctcagtagttgttgcttaaaactcatacttcctttgaaatcacctttgtagcctatattttattttgtgactatctttagaagtgacagaattttgccttttgaaggttaatttgattttgattaaaatgtatctttataactaagtatgtctaattagattattagctgggaaatcatgtttttggttaaagtgaagactttattttgtcataatgagaaaaatagcttgtaatttgattctgaagacaatttgagacgactgcaaaatatttgtattctattctagaccaaagagatctgagattttttaattgaggtacttatcagtatttatggaattgacaaatgggcagtttgttattctgttcttgtgttatctttttttccatttgtttctggctcatttatctcaggttataagtttgttcaagtttgtaccatggttgtttctggtataaaacccgatagttgattttttttttttttttaaacagagtctcactctgtcaccaggctggggtgcagtggcgtgatctcggcctgcaaacctccgcctcccgggttcaggcaattctcctgccttagcctccagagtagttgggactataggtgcgtgccactacgcccagctaatttttgtatttttagtagagacagggtttcaccacgttgaccaggatggtctcagtttcttgaccttgtgatccacctgcctgggcctaccaaagtgctggtattacaggcgtgagcctccgtgcccatcctgtagttgatatttttatcgaataattctatgcagttggtcaagactatctaagtacctatgttttgtgtattggatagcttgctaggaaattatgttctataccctcaaaaaattataaaaatatttcaagaaaaaaaatcaaattcacaaagattttgtcatattaccagatctaatatgacaaaaattgtgaatcattaactcataatgatatgaatcagtgctatagaatgtcatgtccatgttcggcctgaaattgccccacttctcaccggtggtctgggccccacactgtgagaaaatatttcactaatacctgcgcttagcaaacgtcccaaggtctctgactgattagagctcttgttcacgaacagagctctgatagtacctaatgctgttaagcgtgctattttaatagcattctatgatatttaacatcatactttgagacatttgtctcccatgtagtgtttaatcatatttttctctcttgtggtttacttccagtgactgtgatcctgtcagttaccagaataagttaattttaattttttagaatgtatctgtgtgatagggggtatttgatgtggaggatataattaaatgggagcatgaacaaagaattttggacttcatatgtgttcagaaaactattcttacatattccaaagatttctttctgatattgtttaaacaatccaatttgtttttttttgagacggagtcttgctctgtcaccaggctggagtgtagtggcacgatcttggctcactgcagcctccacctcccagattcaaacaattctcctgcctcagcctccggagtagctgggactacaggcgcataccaccacgcctagctaatttttgtttttttagtagagatggggttttaccatgttggccaggatggtctcgatctcttgacctcatgatccacctgcatcgacctcccaaagtgctgggattacaggcatgagccaccgcgcctggcccaagtgttcttttaatagtagacattctctttcaaatttctttactaaccttaaattataatacttaaggcacattcaccaaattctttatctcccaagatatatgttatctctaattagtgtttcagtttgaactagagggctataattttctttgttctttttttattttctttgaaatttcctgattgaactttcactttttccagcttcagaactgtgttttgtttttgtttttgttttttttttttttggtaacagaaatgcatcttcactttctacattttcttaagagtgaaatttgaaataacaatacagtttctccataaagagatgcaacactaagaaagtcaccgcgtttggtgcattaatagttggttccgttgactggttttgttctcaatctggtcacagtttatgtaactgaattacctttgctatcttcacatatttttgctttattttttttaagtcactggttttctgttgcttaaagataaaatttaaatgcttttgcatcacaacacaagcttttttttttgtagccctgatttttcccccagagtcctgtttcttgccagtgccgatctctgtgtatgaattgcaagagactcctttctttttcctgaaggtgcctttcagtttgacttctttgtgccttgtatcatgccactcccattgcttggaatgttctctgttcacctctcacagtgaacactgagctatgtatctacctgcacacccacaccacacacacctgtctcccctctctgaccatacttctccctcatctcacctctctccacatttgaaagatggacagctagatggagaactactctacggacactaggattttgttaaaatgctattttattgaagtgtattctagtagtcccccttatccatagttttcctttccaaagtttcagctacacacagggtctacttcatttcaaatatattaaatggaaaactttagaaataaacaattcataagtgttagattgtgcactatcctgagtagtgtgatgaaatctcacaccatcctgctccatcctgcctggtacgtggatcctctctttgtctggcatctccatgctgtagacactccctctccatgagtcacttagaagctacctcactgcaatgagacatgatggtgccactgcactccagcctggacagagcgagaccctgtctctgaaaaacaaacaaacaaacaacaacaacaagaaaaaacagaaggaaaaaaaaatccgcctcggtgatcacatcgactgtatgatacctcagtgcttatgttcaagtcacctctactttatttcataatggccccagcatacaagagtagtgttgctggcaattcacatatgccagagagaagccataaagtgcttcctttaagtgaaaaggtgaaagttctagacttaataaggaaagaaaagagtcatgtgctgaggttgctaagctctgcggtaaggatgaatcttccgtcggtggcattgtgaagaaggaaaagaaatttgtgctacttttgctgtcaaaagtcaaacttcaaaagttatggccacagtgcatgataagtgcttaagatggaaaagacattaaatgtgtgtgtataagacatgaatagaaaagtgttctaattgacagcaatcatgttctatactatccacagtttcaggcatttgctggggacctaggaacatgtcccccaaggataaggggggactactatatatgcaatttgctgggataattttagtttcttattttgttgaatggtaatactcagaatttataatactttgtttaaaaaaatctagtggttcataagagtctacaatggaaaagttactctccataccacacttttatcacagccatttatttttcctctgttgaagcaacctttgttttttttaacatactaatttgggagtattccatgcctaatttaaagcattatctttttcattttaatgacttctaataacctgtcatagggatgtaacagtcatataatttcaccagatctctatcgataatttttccagtattttgctatcccaaataatgcaattatgagtgaccctttatatccactttgcacgtgcagaagtagaattgctgggaatatatgtgcttttataaattagttaagtattatcagtttacctcttaaatgagagcttgtttcttctctccctggccaaaagtgttttttgccttttgatctttgtgtgatagtgaaaaatggtatattgttttcattgtttatcatgaatttttctttatagattcatttatatttctgtgaattgactattagatcctttgccctttgggttttcttattgatgtgtaggtatttgcttattgttgggggaaattagccctttgtgatattgtcagaaaggaggggctttgtgaatattttcatagggctacagggcaggtgctttctgagcaaagaccctggcagttgtgagaggtgacagcgtgctggcagtcctcagagccctcgctcgctctcggcgcctcctctgcctgggctccaactttggcggcacttgaggagccttcagcccaccgctgcactgtgggagcccctttctgggctggccaaggccagagccggctctctcagcttgcagggaggtgtggagggagaggcgcaagctggaactggggctgcgctcggcacttgcgggccagctggagttccaggtgggcgtgggcttggcgggccccacactcagagcagccgggcaatgaggggcttagcacccgggccagcggctgtggaggttgtactgggtcccccagcagtgccagcccaccgtgctgcactatggcttggccccaatattttctctctgatggggaaaaatggccacctgagggaagtacaaattacaatactatcctgcagcttgaccttttctgtaagagggaaggcaaatggagtggaataccttatgtccaagctttcttttcattgagggagaatacacagctatgcaaagcttgcaatttacatcccacaggaggacctctcagctcacccccatatcctagcctccctatagctccccttcctatgaatgataatcctcctctaatctccccccgcccagaaggaaataagcaaagaaatctccaaaggaccacaaaaccctcctggctattggttatgtccccttcaagctgtagggggaggggaatttggcccaacccgggtacatgtccccttctccctctctgatttaaagcagatcaaggcagacctggggaagttttcagatgatcctgataggtacatagatgtcctacaaggtctagggcaaaccttcgacctcgcttggagagacgtcatgctactgtgagatcaaaccttggcctttaatgtaaagaatgcggctttagctgcagcccaagagtttggagatacctggtatcttagtcaagtaaatgatagaatgacagccgaagaaagggacaaattccctaccggtcagcaacccatccccagtatggatccccactgggaccttgactcagatcatggggactggagtcataaacatctgttgacctgtattctagaaggactaaggagaattagaaaaaaacccatgaattattcaatgatgtccgccataactcagggaaaggaagaaaatccttctgccttcctcgagcggctacgggaggccttaagaaaatatactcccctgtcacccgaatcacttgagggtcaattgattctaaaagataagtttattacccagtcagccacagatatcaggagaaagctcgaaaagcaatccagggccctgaacaaaatctagaggcattattaaacctggcaacctcggtgttctataatagggaccaagaggaacaggcccaaaaggaaaagcgagatcagagaaaggccgcagccttagtcatggccctcagacaaacaaaccttggtggttcagagaggacagaaaatggagcaggccaatcacctggtagggcttgttatcagtgtggtttactaggacacttttaaaaagattgtccaatgagaaacaggctgccgcctcgtccatgtccactatgccgaggcaatcactggaaggtgcactgccccagaggacgaagattccctgggtcagaagcccccaaccagatgatccaacaacaggactgagggtgcccggggcaagcgccagctcatgtcatcaccctcactgagcccccggtatgtttaactattgagggccaggaaattgacttcctcctggacactggcacggccttctcagtgttaatctcctgtcctggatgactgtcctcaaggtcccttaccatccgaggaatcctgggacagcctgtaaccaggtatttctcccacctcctcagttgtaattggaagactttgctcttttcacatgcctttcttgttgtgcctgaaagtcccacacctttattagggagggatatattagccaaggctggagctattatctacatgaatatgagaaacaagttacccatttgttgtcccctacttgaggagggaatcaaccctgaagtctgggcattggaaggacaatttggaagggcaaaaaatgcctgcccagtccaaatcaggttaaaagatcccaccacttttccttatcaaaggcaatatcccttaaggcctgaagctcataaaggattacagaatattgttaaacatttgaaagctcaaggcttagtgaggaaatgcagcagtccctgcaacaccccaattctaggagtacaaaaactgaacggtcagtggagactagtggaagatcttagactcatcaatgaggcagtaattccactatatccagttgtacccaacccctataccctgctctctcaagtaccagaggaagcagaatggttcacggttctggacctcaaggatgtcttcttctatatttccctgcactctgattcccagttcctctttgcctttgaggatcccacagaccacacatcccaacttaggtggacggtcttgcccaagggtttagggatagccctcatcggtttggtcaggccctagcccaagatctaggccacttctcaagtccaggcactctggtccttcaatatgtggatgatttacttttggctaccagttcagaagcctcgtgccagcaggctactctagatctcttgaactttctagctgatcaagggtacaaggtgtctaggtcgaaggccccagctttgcctacagcaggttaaatatctaggcctaatcttagccaaagggaccagggccctcatcaaggaacgaatacagcctatactggcttatccttgccctcagacattaaaacagttgtgggggttccttggaattactggctttggccgactatggatccccggatacagcgagatagccaggccactctgtacgctaatcaaggacacccagagggcaaatactctggtgggaatcagaggcagaaacagccttcaaaaccttaaagcaggccctagtacaagctccagctttaagccttcccacagtacaaagcttctctttatacgtcacagagagagccgggatagctcttggagtccttactcagactcgtgggacaaccccaccaccagtggcatacctaagtaaggaaattgatgtagtagcaaaaggctggcctcactgtttaagtgtagttgcagcagtggccgtcttagtgtcagagactatcaaaataatacaaggaaaggatctcactgtctggactactcatgatgtaaatggcatactaggtgccaaaggaagtttatggctatcagacagccacctacttagataccaggtgctcctccttgaaggacccatgtttcaaatacgcacgtgtgtggccctcaaccctgccacttttctcccagaggatggggaaccaattgaccatgactgccaacaaattatagtccagacttatgctgcccgagatgatctcgtagaagtccccttaactaatcctgaccttaacctatatactgatggaagttcatttgtggagaatgggatacgaagggcaggttacgccatagttagtgatgtaaccatacttgaaagcaagcctcttaccccagagaccagtgcccagttagtggaactagtgcatcaccctctcaccctccctctccccaccaccaaaagttgagaaggggcagatatgccagcaactcttctacaagctctaattttaatagtctgagctttcctttccagatgtgcatacccctctgcatgtgtgtgggggggaagcaggccattaactacgctgcctcatggggaagtggggtatgaggaacgggactaagatgttctgtgagtaaacaattgcactgatctatgattcagaaacctttttatttttaataaaattttctttttaattgtcagcaaggcaagttatttctatagaagggtgtgcccttacagatggagcaatggtgagcacacactcggacaagggaggggaaggggttcttatccctcacgcacgtggcccctgctgctgtgttgttcccctgttggctagggttagaccgcagaggctaaactaaatccaattggctaatttaaagagaatgacggggtgagtgctttggcgggagtcagggcagagcaggtagcaggtgatcggaatgagttagggtggagtaggtaactgaaaaaggttgctttacgaggaacttaagtttaaaagtagaaggcaacgaattgaacatattgacatattaattctttgaaacgaaatttagaactcatatctaacaacccctccccttgtatttccttacagctttcttttcaaacttttttttaatgtgtcttggcttagttgttttgcttgattttccaaaagaagaagcttctctggataaggtggaggatagttaagggaggagaaaccttttttttttttttaatgtcttggcaggattaacaaatactcgtatgaaaacataacagatatgatttgtaggtatttttccttatctattgcctttttaactttgtatgtgttttttcttcttgtatagaaagtttttatttgtatgcagtttaatttttaaatcttctctttgtgatttcaggagtgacatacttaggctttctgtgctctatgagcaatcaaactgttttctttcatgttttcatcaaatatttcatctttaatggtgaaatcttcacttcatttggaattcattttattttattttccaatggctacctgattgttccaacaattattgaataatcagtcttttctgtaataattcgaagtgctatctacattacatactgaaattgcagatgtatgcagacctattacttcactcttctttttttaatttttctgcttattcatctcctagcaccacactggtttaggtattatagctatatattatagtacagtatctagtagaactattcctttctcattacttttatttttcatatgaaaaattagcctatagattagcttattgtatttatatttaacagaagaaaaagaaattaaaatgacagaatctctggactattagataaatgtttataactttccacagatatattaattcctaaaatatgttctttttttcccttccagtgacatggaactaaaatatgttcttaataagaaaaatggttatgaaaaacatttatatttttgtcatcattttccttcatatttcaatctgaaagagtatattgtttctcttttacaaaagtaatggaaattggcatacttatatttaatcccgctgtctttacttcctaactcttcatgtttgctagttttattattagttctatgtgattgtagcatttcctttcttttctgtaggcatggctctcctggaggtttcatcttacttgtgtattttatcactttatggtcactgtcagcatcttaccatagcttcatgattagtgagttctttattttgatttgttttatataaagttagggggtttttttaatcaagaatttattttttagagatacctgtgggtagtgtatttgaattcttagatggattaaataaggttacccttatatttgaaattttaactcagatgcaaaccgtttgataccttcacaattgtaggactttaaacatctttctgtggtagaccttcagaattttatgagggagtatcaaaatttaagattatcgattgttttattcaattcctctatatatcttttctttttccctttaaaaattgaatctgtttgattaagaaagagatagacggagtttttatcataattttaaaaacgaactttatttgttagagcagttttgggtttatagaaaatctaagtacacagaattcccatatgcccctccctcatgccacaccatttctctacttaacatctcatattagtttggtgcatttgttacaactgatgagccgttatcgatgcattgtgggttttttgtttgtttgtttatttttagagagaggggtcttactccaccacccaggctggagtgcagtggtgagatcctagctcattgcagccttgaactcctgggctcaggcaatcctgccaccccagccgcccaggtagctgggactacaggcatgcatcaccacgcctggctaatttttgtattttttgtagagacgaggtttcaccatgttgcccaggctagtctctaactcttggggcctctgtctcctaaagtgctgggattatagccccgtgccagggcacccggcgatacattgtttttaactaaagtctgtagtttacactagggttgctctttgtgttacacattctatgagtttggacaagtgtatctaccattatggtatcataagaataggttcattgcctcagaaatctttgtatccaagacacctttgcatttctttccttctttccttgtttggttctttctgtctctcttctttcctttcctttttcccttcttttctttcccttcctccttccttcttttcctttttccctctgtgtgtctgtctcactttcttttcctcattgtaattttcacacatacagaagtacttcagaatagcaacagtagtagagtagagccctaggaatctgcaaccagcttcttatttacttcccagtgttgtttcacgtatgccttcttttcctcagttgttcctctcttggctggagtatcagacattatataaattcacatcatactgaagtatatgtctttaagttttccctacattcctaataatgcatatttttaaatatttatatacagtataatttgatgtatgtgggtttatgactcttgtacatgagttatgtggctattttcttgcctgaatgtttatcttgtttaaatgtttaatctgaaatcctactttgactcatgtcatactgtatctcctcctgttttgtctggtcctttattttaaagccttctttattagttgttttgtttttttagtttagaaaaaattatgtgtgtatgtgtatttgtatagatggggtctcaacatattgcccaggcttgtctagaactcttgggctcaagggatcctcctctcttggcctctgaaagtgctgggattataggagtaagctgctggcgcctagcctgaaaaaattttctaagaacctaatccaacattttcttttagtgtgaaaatttaattcttcccattttaaatacttgattttatttattttatcttatatttaaaaattttttttcttgttttccattttgtttttccttttctgtttgttgcttgaaataatggttaattatcccttttgtttcccattgataatttggaaatcctattgtcctttaaaattttatttatgtttatttttctattcagacagacgttttctctgtcatttgtaaagatgatgtaactagtttccttgactttccaacactgaagatttgctaagataatttaatacttctaagctatttttagtttatctcttcttttttagcttttttttagctcccatgtatacagcccagacacatctttcattatttgctatatcttcagctttcttttttgagatttctgccctagttcacttatttgtgtagcacattttttcatgaaatttcttcagtagaatgtgtggaatatatgctctgaaatgtcacatcctcaactatgtttctttagccctgaacgggggatactgttttgattgaatacaggattcttgattaggattgggtttcggttcttgtctttcaggagcatatgaatttcagctgtgttctagcttctagtattatgtctggtgtcattctgatttctttcccattgtagataatgtagtcttgctgtctgaaagtttgcccaattttttttatttctctctctctctttttttttcttgagacagggcctcatcctgtcacccaggctggagtgcagtggcatgaacctggttcactgcagccttgacctcctgtgctcaagcagtcctcctgcctcggcctcctgagtagctgggaccataggtgcatgctgccacgcctggctaatttttaaatttttttgtagagacgagatctcactttgttgcccagcctggtctcaaactccaggtcttaagtgatcctccagcttggcctcccaaagtgctgggattacaggcatgagccgttgtgtctggctctaattttcttttgatcattggaattcagggacttttttttccaaccaggatatgccttggtttgtgtttgtatacattaaccctgccttttagtccatgccctttttcagtgttcaggtttaagtattgcttcatttcagaggaagtttcttctgttatttaactatttccttccatcagcaattttctcctccttgtggaacttctagtttttgcaatttaggtctactggatatgtttctcttatgataactgtcattttatatttatgctgtgtctcttgacattatttctttattgatcttccaggttactaattcaggttgcaacagtggttatcctctcctataagtaactgactaaattgtgcaattgggaaatcacattattttagctcagaaattctaattgtgcgttacagttagccctccttacctactagttctgcatctgtggattcaattaactgtggcttaaaaatttaaaaataaaatgaaaatatcaattcaacaattaaaaaataccaataaaagcacaatatagtataacaacagtttacatagcatttacattgtattactataagtaatctagagatgatttaaagtatacggaaagggctgggtgttgtggctcatgcctgtaatcccagcacttttggaggctgaggcaggaggactgtttgagcccaggagatcagtgctgtgatgaaccatgatcatgccactgcactgaagctgggatgacagagcaagacccatttcttaaaaaaaagaaaagtgtacgggatgatatgcataggttacatgcaaataccatgttactttatatcggggacctgagcatctgtagagtttagtattcacaggggtcctgggaccaatcccctggggagatggaaggaggactcaggggatgtgtgtgcacatgcacatatgtgcattgctacttcttaagtttttaagtgcctttactgctttttgggcaaagttgtatttttctcctgtccttcagcagctctgtttcacttggtctgtgtaatcattattctgaatgttttttctttcttgtgctagtaatccccctgctgtggttttttgggggttatcagtactaagttctgcttcttgaaatattctaagtgacagcagcccttcagatggttgaagacatgaccatatctactccagaggcctggaagagcatatgtctcctagcattctcatctcaaggacagaattgagctaatttttattgactacttggattcctgggcaaagagaccacggacccatctggagcctttattgacttttcccctgaggtccatggctctttgcaagccagtctgtctccatgatgtgttcctttcacattcttccctagagttctctgaagctagtctccagttttcgttcagccacagagggagaagagcctgttcccagtttttggctctcatcttctccctagatcttggtgcttcccatgtcctcagctgcttagtaactctgggggagatagacagcatggagtttggagtggagaggtgggagccaggctggttccaggctgtttttgacagcttctcagagcaggaatagctaacctgggttatctggatctctcatgagctttagggaagtctgtgaaccctctgaagtcagatatatagttttttagtgagaaattcagtgagattcaaaattgtaaaatgtttcagaacaactgcagctgactaatggaggactcatttaatcattgtttttgttaattgcaaacatctactgttttcactcagagcaagtaaattctagttctcttccttcttagctgtgtgaccataagcaagttccttaacttctgtatgttttgatttcctcattagtaaaatgacattaattatagcatttgctgtataggattgtcagcattaaatgagtttatatagtttacaaattcaaaatagtacctggtttatactgagcacacattctttctgctaactgtgagtatcttatccataacatttgcatgctgtttattatatattggttgacatttttactcttactgttgtcattattattaacattattgctattactattgtcattaatataaagcctgtctgacatctgaaaagatggcaagccacatattaaataataactttctctcattcttttgtcagttaactgcaaaattattgttacatgtgaacaaacatatttgaaatattaaccacttttaaagagatctcctttctgttataagggtgtttgtgtaagaagagtctgggaggaaaaatggaaactgaaatcttccaaaaatgaagctgatagagaaaagtatttactacatggcttaggcctttgtgttaagattaatattaggaccctgaatacacctttccaaattcgtgtgtgtgtgtgtgtgtgtgtgtgtctgtttgtgtgtgtgtaattaataatttccagatgctaggtttttttttagatttaagtgttttggaaaagcatcctctgtatagtctacaaagtctataggagttagaaaattcccaaatagagaggaataaaatcttaataagtaagtaattaaaaccccaaacatggtcagtcagctgtccatatctttgagaacagacaggtaaactgtcccacttttgttagacttagtcagttgcttatgttgattggtacagtgcaggaggaatctacttttaccatggaaggaaaggtacagtacaattgttgaaattctgtgaaggctatacactctaatctcatcagggggaattctgcatcacagggaacctttatattccagaaagattttagaaatttttttgtaacttgattttgccctttgccatttgtttaaaaattaagaattattgcaacctaaattctggtttataacaattaactataattgaacaaataccatattctaatttcagactagttttggattaaaaaaaaatttctagacctgccagatgaaaatattttggtcttttatggaattggagtgtttgatagaaagaatgaggagaaattattgggaaaaggatttctaactaattgtaaaatttcattcttgtcagaaggggcattttggatgtgagcaaatgttgacctttttgattgtatttaaaatgatagaggccagggctctcaggctgtttagagtgagccagaattgggatgttttggcatgttttgttctgggaaactgaggatagaaggtaggatgtgttataccctcccttattatttactgaaccttagtagaaaatgaaggaaagaagtttttggtatacagatatgtatagataagcttttcaggcacttagatttggggttttgttttaaagcatattgtaaatgatattgctgtctgagttctggactctttttatctatgtttaactttttaaaactggtctttgtattagtttgctagggctgccataacaaagtatcatacactggggtggctgaaacaacaaaaatgtgttttctcaaagttctggaggctggaagtccaaaatccaggggccaacagggtcagtttcttttggaggcctttctcgttgcttgtgggtggccatccactccctgtgtcttcctgtggcctctcctctgtgccttgtgttgtctgggtcctgatcttctcttatgaggataccagtcatgctggattagggcccactctgatgatctcattttaacctgagcacttctttaaagaccatgtctccaaatacagtcacattctgaggtggtggggctaggacttcaacatacgaattttggggggtacacaattcagcccataatggtttccttatcatttcttcatgtgattattattcttggggtcaccaggggaaccctataatagaatctgttccgttttcgtggtcactcttttttttttccatgtatacatagcatataaaaattttaaacaacttactagaatatgactggttctaaaaatcctatctcccatccccccaaaatgaagacttgacaccggttagtctattctaaacattctgatttcagctccaaagtgaatttttaaggacaagttccagaaatgaattggcagtggtgatattaaatgcatatttagttttccaagatgagctggaaaactaaatttttagtttttagtgctgttggactatttaggaatagccagtactcactttgatgtatagttctgatgttattggcaaaaataaacaaatcaaaagcacaaaacaggcaactgacaatgtcatgtctctgaagagcacatctgtatataatcctacacaggtatacgcaccttcatccatctattctaagcacgaagaatgtatcagagaaaaggggagaaaaattggtttctaagccctgcagtccaactcttttttttgtttttttctgaggtagagtctcactctgtcacccaggctgtcactcttgaatataaccattgtttccaaggtgagtttataggagtgatgtgttggggcttatttcccaacatgcttttcatccttgagtgctgtggatcaaaatctaataaccttagatctttattttgaaatcctgtattctcaggaggtagagcttcagaattttagtaggtacatgctagattctgttccgtgaacagaaagagcagaatctttctgaacagacagagcagaaccaaaaataatggcattgaccatcctttcaggctggaatagcaacaaactacaaagacagaggcctattatgccaaacacttatgaaactgaattttatgtaatgggacagtttcctcatatttcagtgggtaatcatactaaactactttgctaagttgaatccaacaagttctgcttacaaaagatagctttcgaaaaaacaagtctttgtaatacctgtcagtttagacaggatatattgaataaaaatgtcacttaaaattttgttaatttaaaagaacattattttgataacaaaaaatttcagcattctctcaccacaccatatcttgagagcaatctcctatgccttctctattaaatgacagtgatgtattgaagaagtttgtgcatgtgtggaaggattttgtaaatttcaaagtgccacactgatgttggttatacttaggtatggtgggccttacacttttaggggcagtttctgctttgactaagcaactgggccactacttaccagctgccaaataattagagctgcagatatagcactgttgaaggaattttaatacttctcatcagcctcctcctcataatggccaagttaacacacactgcgtctttctgacttctttttacatgttgtgacttttccccttttcccttaaaactgattttcctcagttttaattttcatttcaagtcaactcaggtatataattaaaatttccttgaatcttgctcaccttcaggatgacttgcctgttattcagttactgatcctgaaagttttagaaattattaggtaaatatcacagtaaaatatttaaaagtttaggtcagaggaaacatatcgcacaaactatctgctattgtataactatttttatttaacatagtgggaggattctgacaagaatgttggtcaagtcagatgtctttatttttaataatgttttataatatgaaaaacaagtctttctagggacactatttttatttttattaacttttttattttttatttttttgaggcagggtctcactcccatttcccagactggagtgcagtggctccatcttgcctcactgcagcctcgacttcctgggttcaggtgattctcccacctcagcctcccaattagcgggactacaggcatgcgtcaccatgcctggctgatttttttgtattttttttttttttaaatagagacaaagttttgccatgttgtccagtctgctctcaaactcctgggctcaagatatccacctgggtttttctcccagagttctgggattataggggtgagccaccgtaccctgacgtatttttcttaactttaaattttgaaatgatttcagactcacagaaaagttgtaaaaatattacaggtaatttctgaatacacttcactcatatttaccacatttactttatctttctatctatatctgtatttactggaagcatttcagagtaagttgcaggcctagtggccctttactcctaaatatgtctgtacttcctaaaaacaagtaaattttcttatgtaactatagcaccataatcaaaatcaggatttggacattaacatattactgtcttccaatttagggactatattcaaatttccccagttgcctcattaatgccttttgtggtaaaagaaaaaaaaatctggttcagcatcctgcattgcatttagttgttgtatctctttattctctctcaatctggaataatccttagttttttggtcagttgtgatcttaacattttttaagagcataaaccatttattttataaaatgtcactcattttaggtttgcctcttttctcatgtactagattcagtctttgcattctgggcaggaatagaaatgacactgtccatctatgagcaccatgttggtagcacgaagtgcctctttatcccattattggtggtgttggctttgttaaggaggtatctctggcgtttctacactgtagactttctattttccttttgtccttaataaagtatcttatagggagatactttgagactctataaatagccagcatactttcactcactagctttagcatacttcctagtttgtatttagtgaggaataggctgaagatgacaatggcagtgtcagagtttattattataatttttagaatcatgaggtaggtaacaacacagtgccaaggagatttagttttccctaagcttattctgctaccgaaatgagatacattaagcactcagagatgaagcacaacctaatttacctcacagttgcatttgacaagcttggttatattttgggaaataaatttgaagcaacagatgagtaagagggagtggtaagaggtattagacacgatgctaatagtgacagcttggtggtgattaagaatacaaaactaaaaatagcaagtagatctataaaaagctagccgattgttaccatctagcgtaggtgtatggagctaaacatatttattctagtccatgagggtgattatggcatgagatgttataaggcacgattatgtcctataatatggcatttgataattttttgtacctgtttgaacaaaagattcatggtgagctagggatataaccaatacaaataaatttatcaacaactgttagactctgcagtgtggcactcccttgagaaatttgtctttgaggattcaggtattataacttggtagggcttactccttttttgtgagtgtgaatttttttttttttttttgggttcgggcttactcttgctcactaaatcccaagatttatatattcacatgctaatacgttaacaatgcaaaacagtgctgtctggtggatccctgatttgtgtgctttttagaaagagcacattgctgttgggtaggaaaaacatatgaagccaggttctcaaatatttgtgtggtaaggatggagtaacaataagggaattccattttgtattttgaatgtttttgaggcattgtttccaaaagtgtgttccatggacttggcaactcataaaggtactttgcaaaaggaggaggaagtgctgcgcaaggcccttctctaggagagtcacaggacatatgggcatcctaatgacaagagtctttcctaaacaatctgttgaactgagattaacccggtgtttcccaaatagaagtgacacagaaaccttttccccccacataatagccctcaaaacagatgcatattagcatcagacttctgtagttacatttttcttctaagtgggacaagatgaacttgttggtttaccagacaccaatttttgacttttttgtttttttatttttataaccttttgatcaagttaaccatcttttccctccctccctccctcccctccctccctccctccctcccctccctccctccctccctccctccctccctccctccctccctccttccttccttccttccttccttccttccttccttccttccttccttccttccttccttccttccttccgtccttccttccgtccttttgttcctttatataaccctgttctatcacttaagtattgagcttaacttgcagagagaaaccattgctaagcacttgggaatagggggatatttgtgattatttaagcaatgttgtgcttataagatttctggtaataacacagtctaaaggaaatgcttcatatcctgtggagtagctttggaatcctatgtatttagaaggatttctttcaaaaatgtttaaaattataagttttactttaaagaagttaatttcttttacctggaaaattgaagcaagttagactattttgtggacttatgcagtacttgtcaaaaggtaaatgttttttaaaatttctgttagtaaggattttacctttagcagcttgttattttagttatctgcttagttgcttctaatttgaattacttgtagctccctaatttagattgtaaaatgttatggctctgttatatgacttaagtttagaacacagtgggtccacttttggatcccattcaaagtggatctgatgtacttattttcctacacagttaaagatccctcttcaaaggtgaagcagagacacaataaatttggatcttgaaaccttcatagtaatatgctttttaaaagacatgtatacataattgtatagccattgcatatacttttatacatacatttctttcatatacattactgtcaggaagatcaggaagataatgtcatctctttagtgagataaattccaactccatcgtgaccacttaccatagatgtgactctgtatttgctgttcattcattcaatatgtatttatttgccttgtatatagtatgtacttatatgggcactggtcatagaaagaggaaactgaatggttcacttaacttttgaaattgtcttttcacctatcagggatgtgtgaatagtattgatgtaaagcacttggcacgtggtaggttcacctcttttttttttcctgagatggaatatcgctctgttgcccagactggagtacagtggtgcaatctcggctcactacagccttctcctgggttccagcaattctcatgcctcagcctcctgagtagctgggactacaggcatgtgccaccacacccggctaattgtttttatttttagtagagacagggtttcatcatgttgaccaggctggtctcaaactcctgacctgaagtgatttgcccgtcttggcctcccagagtgctgggattacaggcgtgaagcgccacacccatccaggttcacctcttgagtagagtgctgagatgctttctcacatgagattggtttctagtaataatagagggtttttttgctagttactttcttattgtatttatcttatagagtcttggttcttacaaaatcataatttgctttcaaaaatacatattttaaactacctaataagatctttatttagtgtcacatttacgaagggttgatgcttattttagtgatgatttgtcattaaaattatgtcaaaatgtcttaaaatgttgttgaaactgtaagcaaactcaacacgcacaaagctaattatgggtgccatctgtttatttttacaaagctttttttttaagactatggcattgtctgcttatgataagcttcaagattattataatgactaagtcctgtccttcaattagtgtagttgaagatgggaagataattcgtttgttcactgaccttttcctgtgtcagagtgtatgaaatatgacatgtcatgataaagaaactattgtgaagtgcatttagaagatacttaatttttatgagaaaaaaatgacatcaaagcagcagatgtggccaaagttttgtttaaattcttagaacttattcaaggttttagatgaacggtagacttttccagtgacttaagtggcttcattttaactcaaggttaagaatttctaagtgatcgaccaagtttatgttgacatgtatccctgtttgtgtacctatatgtcagcacatgtttttgtacatacatatctcatgtgttagtgcagaaggccaggtacatgcatgacagcatcagcccaagtagttatcagcaatctgctgagagagcagagcgatcgcactggctctgttttgcaattgtgcatgctaagcattacccaagtcagtgtggagggaaagcaacctgaaggatccatctgctcccttctgctacactgcctcgatgcaagattacactaatctggctgcttgtcaggacaggttagtgaaagcatgcaagtgggtgagacttagggtggactagtgctttggaaaatcataagctgcccctgtagatgccacgttaagtgcagcagaataggttgattatcggccacattgaagattgccgtgaaataaatatatagctttttggttaagaattagtttcaaaattaaaattcttaaatattgttggaccacagataaatcaaaattgagaaaaataatacagatagtttacaaatacttttaggccttagtttttcttatgatttgtgtattgtgtttattctttcattttattcccctagctcaagagttttttagtcaaatatgttcaaatgttacattcgattaacttcattttacccaaaaacttttgtgatttttcttgtttgtttctatttatttacccttttctacacctactgactggcagaccttggccttgcaggttgagcatcctgtcacagaatgcattactggcctggacctagtccaggaaatgatccgtgttgctaagggctaccctctcaggcacaaacaagctgatattcgcatcaacggctgggcagttgaatgtcgggtttatgctgaggtaaaatgaatggtgttgggaggaaggatggtggttatgtccagagtcatgagacctggtatagccaaacaatgaggtaaagttagggttttataatgttgccaactattggattacgtaatccataattaaatcagaaaaaaattagataattttgacctaattccagatagttttaaagaattgggcttagttaattgtcatgtatttgtagatggggaaatagctaccaatcctttaagaggcaacagagcattggttaaatactcttgagcttgaatggaccatggtttttgttttgtttgcattttctttgtttattttcaaacaacactaacaagaagtagcatttatttccatgggttttttaaaaaaatgcccaccttgggtacacattagttgttgatcagatatttacttaaaatttttcccaaccttttttttgtataattttctcctttattattacataaaaataacaatcaaaatttaaattgtaaagcttttagtaaaacatgtactcttaatttataattttaattttgggttttactcataaactctcagttcagtacttctaaatgctttttttcaaatgactaaaacaagaatgcaaggtaacatttgtactatttttacttttcgacatcaaaaatgtctgtcaagattaaaaataaatcagtgtctgtgtttaagaatactgagagctggtttgaaatatttttcaaggagttcaaaaatatgttttggcgtgactgtattgctcttgcttttttcatattttaagtagtattactttcattcttatgacactgaacctgtttattctgatgatctaagatatttacaaatgaagtgcatatctagtagcgtgcaaagttttttttttcaggtctttatttgaagaacccaaattctcaagttttaccatatgtgaactgttttgagaagtaagaaaaacaaatatctttagtataccacatttgttgttctaaacttgagtatgttttgatgtagggcctaggttattttattttttgcccaaggcattctaagaagttttataaaatgttggaattttaccaatttcaataaagtatgaacaaggtcaggctaaattctgcttacagttctgtttgatttttaagtacattctaagttgtctagcgtaaaagacaataatattctgaaatctgtgatttggtaaataccatatgttgaaaatagacctataaatggttcttcattgtgtaaatatttaaccttacttgtgctgatttatatttcaaagactgtgcttcctttcctttgaactttcaggacccctacaagtcttttggtttaccatctattgggagattgtctcagtaccaagaaccgttacatctacctggtgtaagtcattaagctgtaataccagctgaagggttaaaatcgtgatttatgtcatacttttatgttaaagcatgtcaacaccaaagggtgtaaattgaaggacaagtgaaattcatgggaatcatggtttttgtgttgaaaacaaatttttttcagtattttgtggtgttcaagaaagtcaggattcactggacaggggaagcctggggacatctgatgatataaatgatagcttacagtgttcccaattctttcgaaaattataataaaaaaggctgtgaatcctaagaatgagaaatgatgttttgtgttacaatttaatcttttcaataaatcgagtccaaccctgctatatagtcacttgtcaagaaattcaagcacaaaatcagctccttaattgaaatttaaggagattgaattaaggcaaacaaagtgtgcctcagtctattaaacctcatggactttaaagagtaataatatttatatcagttaaataaaagtgaccactgtccattttattccatagctcttctgtatttaatagctattttgaaaatagtttttgttgcagaaaaagagcaaggacataccctttttcttaatcaaggtaataagtgcatatatatatatatatatgacattatgttagctagtagatgacaaggctgtaccatctgtgaatattcaaattattcattttgattactggcatgaagatggtgaaagattacaggaagaattctaaatctgaagatattattggatatatgatttatttcactttttaaattgtttttgcccatgtgctttctaaagggacttgaccctttctgtgcttggagactccatgctgtgttcaaagccagaaggcagaaaaaaaattgtgaagatttaacaggcattatgtgacgttaaatagcacatgagaaaacaagtatcatagggacatatctaaacacttttttaatcaaacaaaagaagtattaaataagaattcataatgattactctagttgttagaagttttcaccatgttgtaatagctaacaggatgtcaaacattttgccctcgcaagtttttgcaatttgcaattttcaaacgtgagacctgttgaaagtacaagtgataatggacaaactataccccctacagtcttcatcccaccaaatctttcttcaattaatgctgcagcaggagttttatgtaataacatttgcagttgtgagccatccatagaaagaaaaaacaattaaaatgccttaaatgttctgcttactgctgttatttgcttgtgtgaatgttgcatgtcagctaaatggaccaaggagtagataaagtgattgggtgcaggagagtgcacactaagctttgtctatcattattgctgggagcaatcaaattgatgtcagcaggacagtagatgcgttgacagctgtaattatgtatctccatggtgatcacttttggcctgtcatggaggcccatgagtcccctcccttggaagcatttaatcagattgggctgtcacttgtcaggtagacatggcgggctgggagttgtgcttagggggagaggtgaattgagaatgaagggtgggagatgtctgatagtttcacagagtccactgtggtactgaagacagaaattttaattatgctagaggtttctgagcagtggtttgagaatctcgtacagaggtgcttgggtgttttgttgtggttgttattgtttgtttttcttccttgtcttattaaaactagagcagtcagtttaccttagaaaacaatttttggctcttaccttttttggtcacaagaatgcatacttaagagttaacttatggtttgtacttttcacatgcttcattaagcctgagatttattaatatggcagaggtgaagatttccttttttatttttgatcatcatgttttgtaaatttgttattttcagaccacagttttgttctgctcagaaatttggttctgatttcatttgaattttttcttaaagtttttagtgcaaatttgtatagcctttcattgaaggaatggagacttgatctgacttcagattggttgttaagaaataaaaatatagctgattattacttggaaaaagcagcataaatagtaaattataaagcagagttttcatactgtggtacagtttttaattgggaatactgatttgcttatacaaagatacgtgtttatatatatcttgattttatcgtatgtattttaaagttaagatgacataacttctgtgatcataatattagtaaataacaaagacagttatatttaattaagatctgtaggtaacaccttataggatgatattattcaaggcaactgaagttttaagtaaggaactgtagaagaacataataaatattctttattgtctatgttattttatttgtgggttgaacatctaagttcttcctagctttgtagcagtttatgtagcaaatgataggatgtagttaaagtcagaagttttagaacttgtatcagtctcgtttgtaaacacagcattagcaagcatgctgtggttttaaagatgacatagtggtcaaattagctctttcactttttagtactaaaattaagaaaatgaaaactcacagatatattttctgttatgtaacccgtttactagttgccattttggggctctttaatgtggggaaaaggtagattgtgattttattgcttttaaagctgctccattaatttttttctagtttttgtcaacactgtgaatttcatagaacatcagtttatgtcctgaaatatgttttcagaaaatagaaagccaagtatatttcgtaagtgtgctgaatgatttttgtttataattaagatttttgtatatgaatgtgaatacgaatacagatatctatatttttgtttgtgcttgcaaatacagaaataaaagcccttcaggtatgttatagtgttccttttacaaccttacaaagagaataatagtagtgtgaattttaagaaaatgaaactatcgcttgtcttctgatgtcaccgtataataaagccatcattataccctcatgtggatatcctagacaagaggttctacatgtggtcccttgataattgcctaaattaaaatattaaaggcctaacagccgctgtgttgacctttttctgccttgctgcagacagatgagctgctgtttattaggaaggcttcttcccacaggtggaaggctacgtgagcttccgctcttctcttcccacccctttacaatgttgggcatcaaagtcctgctgttccagcagctttgattcagttcctccatcctcaagacccctaggatgtgcctgacagtctgaagtattttgattagcttttaaatacttcagattccaaaacttctttctaataatttaataaatgttctgtcctcagtaactgctcatttttaaagttttgcatggctaacctccgtgccttgctgctggtatcaaactgggaaatgaaaacaagaatcagtgatgtactaactcactcgttggctggttaacagcaatcagcctcttcaaaagaatattttgaacttgtgctatccccctaccccccaccccaagaaaatcacaaaatcagaactctaattggggctttacaaagcaaagccataggaaaagctgtgtaaacatgaaagcctcaggggagcaacagtaacagaaaaatagtgttttacagttgagagggtgaggcagaaaaggaaagtgttacagacatgaaaggcccaggcccacattcctatggagctgaggaccaggcttgacgaggggcctcactggtgggctcagaagggtctggcagggagtgcagttagcaagggcatcgtccatgccatgcttcagctggaagacaccatcagagagccacagcatcctggcatagtgatgtaggaagtcttcattttttattttttatttttgctgttttttagtttcgtcattcagtggcagaacaaaaaatgtgttgcattacatattaacggatcaagattttagattgttttcctattttccagaagttgaaatgttatttgagattgaaattctctatccattttctccatggaaatgaaattggtggttacaaaaaaatatctacacaatatgaattacttttctttttttctttttttctcccaggtccgagtggacagtggcatccaaccaggaagtgatattagcatttattatgatcctatgatttcaaaagttagtttaatttctcaatggattatttgatttcttcgaaaaatcaatgatatttaaagagtctgaaactgggcctttatctgaatcataagctataattaaacaactaattatgcactgatgtaaatgtgaaagcagagcaggttttttctcttgagagaaaattcagcgttatgttagtttgtagtactcctcctccccaactaaatcatgccacaccatcacacacatgcatgaacaataataataataaacatctaaccagtggtgccagcctaactcattgccatgagaaggaattaaggttttttttggccattggcagaaattacctgagatggaagtatgaatgaatggcaagagttgggctgataggcagtgtttgttagagtactttttgatcttttctcttcagtttttacaaattaccaattatttaagtagatgtgatgtaagagtataagatttgttttgcccacctgtctttttgaagtttgactttccagaataaatgaattgaatttttggatctttaaacccttaaaaccgtataaagtgtaaaatgctgtaataattaagattgtggattttatttttattttattattatttttttgagatggagtctcgctctgtccgccagcctggagtgcagtggcacgatcttggctcactgcaacctccgcctcccaggttcaagcgattctcctgcctcagcctcctgagtagctgggtggctcgtgccaccaagcccagctaattttttttgtttttagtagagatggggtttcaccttgttagccaggatggtctccatctcctgacctcgtgatccgcccgcctcggcctcccaaagttctgggattacaggcgtgagccacaatggccggccagattgtggattttattttgaaaattctgtgttctctgaaatgatacatctgtattgaggaatgatttgtttttcaagccttgtttctcaagatggcttttccccaagtgtcctttttaatgttatagttgcagtaaacaaacacttttttatctgtctttcttcagttagggttttagtgcttttttttgggatagggtctccctttttcacccaggctggagtgcagtatcatgatcttggctcagtgcagccttgacctcccaggctcaagcgatccacctgccttagccacccaagtagctgggactacaggtgtgtactaccatgcagggctatttttttatatcttttgtagaaatggggcttcctcatgttacccaggctgatctcgaatacctgagctcaagcaatccacccgcctcggcctctcaaagtgctgggattacaaacgtgagccaccgtggttggcctaagttattagtagtattaaaataaaatttaggtcttttgtttattagagaaccaccatttaatttaaaaataaaactatgtaaaaatattatacgttgatttttaaatattccatttttagatgaatgtttttctcttcagaaaaatggcctacaaattaattttcaaatttgcttgatattgaagagctagtaaaacctactaaaataatcacaatctatagattggctaatataactgccagaaaaatctttaatgaatagttaaggtcttatttcattgccaaattatagagatacatataagtaggcactaaatcatgtagaatagtaagacttttctgtttttttgatttctgaaaaagtaccatttgcttctgtgtatattatatgtaaaactgcaaatgatttctaagatagtcgtcttctttctttatacttttatttttgaaactttactttttttgttagttatgaaagtgttaagggctggacgcagtggctcatatctgtaatcccagcactttgggaggctgaggtaggtggatcacctaaggtcaggagtgtgagaccagccaggccaacatggcaaaaccctgtctctactaaaaatacaaaaaaattagctgggcgtggtgacacacgcctgaaatcccagcttctcgagaggctgaggcgagaggatcgcttgaacctgtgaggcggaggttgcagtgagctgagattgcgccactgccctccagcctgggcaatagagcgagactccatctcaaaaataaaaaataaaaagaaaggaaagtgttagctattcagggtatcaaacttggaaaccacagaaaaatagggaaaaaatgtcttatctaatcctcaccactacccttggtgttcaaatcctatctcatatattcacgtttagctgtatctccttttaaattttttctgtacttacttttgttacgtttttgtttttgtaaaatcactctttactatgataatgaaatgtaggagaagagtctgaaatagcttgattctaatatttatatacttaaaaaatcataattgacatgtattgaaaactgaactatcataaaatttcgagatatatttagaaatctgttatgaaatattttaatttttactaaaatgaatcatttaacatagttctaaatatatatatatattgggttttttgtttgcttgtttttagctaatcacatatggctctgatagaactgaggcactgaagagaatggcagatgcactggataactatgttattcgaggtaaaaacaaagatttgcactcgttggttattgtatatggtgtccagttccagagaacagcctgggggtttaccaatgagaatatggcacagcacatttgctcactatgtgcttaaagagaaataagaaaaactcaaatccatcaaaccaccataccaagtatagccgtttccactgttttaagcaaatgcatattttctctatatgcctaacatatatattactctatataaccagtacacattggttacacaggccttcaggagggcgtcttttttcttacagaagtaatattgctgtggagaggtctttagtgcgtatttgggacacacgttcagtttatgtgagtttatctatgtttatctatatatgcgagtttagatagacataaataagttacttgggaagattattcctggaagacattaaagtatttgtaagcacattctatggggattttctccctttttatctctgcatttttattgtggtaattgaaatactagattttggttaatttaatttttactctaatgtgcttgagcagtaaatccatgaatttgagagtctgaataagaatattttgtcaaaactcatttctgttaaactgtgatataatacgacataggggcatggcatctgggcagtttgtcaaaatattagattagttttggtcccaactagaagttatttatctactccatctggcttctgaaaggagtactcttttgtatttacatgaataccatttcatgttttatacttaaatgaacattttcccactaatttgcttactctatatatgtatatataggttcaccagttactacagtttttaagtgactaaaatacaaagtaggcttgccattattctcctaactttatatgtgtcacatataaaaaataaattttgttgtataggtagatttttccaggcttagtctgaaattttgcctttgaattactgtgatgtagtagacagaaaccagacaaagctaggttcatagcccctgtcctgacgccatttaataattatgtgatttttggccaagcacggtggctcacacccgtaatcctagcactttgggaggctgaggcgggtggattgtgaggtcaggagttcaagaccagctgggcaaagatggtgaaacccagtctctactaaaaatacaaaaattagtcaggcgtggtggtgggcgtctgtaatccccgctacttgggaggctgaggcagaaaattgcttgaacccgggaggcttagtttgcagtgagccgagatcacgccactgcatgccagcctaggtgacagagtgagagtccgtctcaatgaaaaaaaaaatttttttttaaataaataattacgtgatttttgtcaaatgactttgtctctctgaatctcatactccacatttgaaaaatggagtgatagtctctgccttataaattactggtgaggattaactgaggttaagtatataaagggcttggcaccacactggcttatgttgttcaataactttagttgtcatcctttcttcctctttcctcacacttaataaaaccatatatttaagaatcaaggccaggcgtggtggctcacgcctgtaatcccagcactttgggaggctgaggagggcagatcacttgaggtcaggagctcaagaccagcctggccaacttggcagaaccccgtctctagtaaaaatacaaaaattagccaggcgtggtggtgggtgcccatagtcccagctactcaggaggctgaggcaggagaatcgcttgaacccaggaggtggaggttgcagtgagatgagatcgcgccatcacactccagcctgggtgacagtgtaagactctgtctccaaaaaaataaaaataaaagccatgtgttataaatcacattatcaatccattagtcatatgaaatttactaaatcatagataaacaatattgaaagaccgttttatgtaatttctaatactgtgtgcggaggttatatgctttcattgcaccctgttcaaatacttctccagagaatttaccgtcactgtaaaattaaagtattaattgtgtaattaactgtgaaatgttgggttatcctataagattattaggcacatgaggacactgatgatctttatcttgtttgtatgcatattgctggtgcttagcagtgtctgacacatgctagatgattaataaatgtttgttggatgaatgaatgagtgagcaagtgatactatccctgatttcaaggagttactaatatacttggtgtgaaaacatatgaaaagataagtataatattaatatagctttgtaggtgccccaataggggattgaaaaagggtagtgggagtttaaggaagaggctagcatatctttcttttctcgcctctcttggtcctttgaaagtaactagtactgctttaggactcatagtgtctctgtgtctctgtcgagagtacctcactttgttctgctttcaaatgatcctcagagtggcaggatttttaaaaagactggtaatgtcctgtgtaggtgaaataaaggggatgggcacgctcaagcgtctttgcagtatcacttgttatagtattttgggaaaataatctggtgttagatgttaaaataaaagtgcataccctctgacccagctattcatcttttgtgaatctttcctatagagttaaaaaactgaattatgagcatgttcaccatgacatttacaacaacattgtttgtagtagccaaaatgctgaccaaccacagtgtccgctaaatggatgaatgactgaataaattacaatgcattattactataaaatactatgcagctgtgacttaaagacctgtttgtatgaatcgttaaagtagaaaagcaatttgtagtcatgtgtagtacattctcatatcacttgaaccatcttctcatcctaaaatattttaaattgtgttggatgagcacagagaaaggtgtggacatctacatatcacaataatttttttaagctcaaaggatttatgagagaggggtttttcttgacacatttctcttagactttttaattttaggtattttcaaatctatagaaaagatgaatgaatagtactgtgcatgcctgtgtactcttcacctagattattatttaataaacttttttttgatatttgctttctctatttctccctttctttgccttttcctcttcctttctcacccttcctctttcctttcctccctccattctcttctctgtttttctcctgatccatttgaaagaaggttgcaaacatcatggcgcatcactcctgaatactttaccaggcttcttaaggggaagaccatgttcctgtaactggatttttcttgcctgctgcacagatagagtctatttattgagacagcgttattgcaatagagaaagagtttaataaacacagggctggctaaatgggagactgaagttttattactcaaataaatttctcccaaaatttggaggctagggtttttaaagaataatttggtgggcagggggccagggagtgaggaatgctgactggttggtttggggatgaaattataggtgcttgaggcagggtcttcttgctaccttcagttactgggtaagatcacagaactagttgagccagtttgctggtctggctgcatgactcctgagccttaatttctaatgttagttttacaaatgcagtctgttccccagacaaggagggggtttgttttgggaaggggctgttttcattgttttacagttaaagtataaattaaattcctcttatagttagcatggcctacacccaggaatgaacaggggcagcttggaggttaaaagcaagataaagttggttaggtcggatttttctcagtgtcataatttttgcagtggccatttcattcctgcaaaaaagcacaataccatcattacacccaaggaaaattgacagcaacctaacagtttcatctcatgtattgtccatatttaagcttgtccctcggagtctttttttattgttttttaatcccatctgtggcccaaagttacacagtgtctttgattatgtctctttattatcttgccgtctttcatatttcatttcattaattttcaggagagtccacggtagttgatttgtagaatgtggcacattctagatagaaagtgttaacgttggttcactaaaggcacttgtgaagtgattccaagaatgagggttgtaggtgataatttgcactatcactcacagaactcgcagaaactctttgcttactattatcagtttattataaagggtacagcttgagagtaacccagtggaggagatgcacagggcaaggtgttaggaaggggtgcagagcatccatgccctctccaggtgcaccaccctccatcacttccgtgtgttcagcaacccacaagtcctctgatccttgtccttgggtttttatgaaggcctgactaggtaggcatgattgatcctatcaatctgccattagtgattaagtcattcttcagtccctctcccctttggagggtgggggtggggctgaaagttccaaccccttaatcacatggttggatcctctggccacctgctcccatcctctaagagtcatctcattagcataaactcaggtatgattgaaaggagcttgttatgaataacagaagacattcctctctcaacagtcatttctatgatattcttgccaaaaatgtacaacctgagtataatcatgaggaaacatcagacaaaccaaattgaaagacagtctacaaaataaatggcttcttctcttcaaacatgtcaaggtcaggaaacacaaagaagagttgagcaacttatgtagatcaaaggaaactaaagacacatgacaactaaatgcaatgtgtgatcctggtttagatcctggaccagaagaaaaatgtttttcttttgtagtaagggtcataagtgggacaattggtgagatttgaataaggtctggagatgaggtgatagcaatgttagcagtgttaggcttgtctgattttgatccttgtactgtgattatagaagagatataccttgcttttaggagatgtacactgacatatttagaagtaaaatgacatcttgtctgcaacttaccttcatatgtttaagaaggaaaattatgtatctgtgtataaatagaaaaaattagtgacaaagcaaataaatgtgataagatgttatcatttgtagaacctccatatatagtaattctgcttactatttttttgaaatttttttaaattttgaattttgaaattatttcaaaataattttgaatttttttattttgaaataatttcaaaatttaaaaaatttaaaatttaatttcaaaataaaaagttaaaaaaatagggaagagcaagaacccccactctccactaatatttaaagaataaaagcagagatgcatttgggattttgaacttacatattactcatctggctaattctgaaggataggcaggtttaaaaacttgctttatgaaaggcagaaaagggaagacaatctactgtcttgtttggtaactgcttaattattcaaatatgaatatttttttcctgtgctgattgtgaacttttgttaagatagagaaactttgaagcaaaaatgtaattcggttaaaatgaatttcaaaatcctcatgaaataagagtgcttttggcctctgtttgatcctggcagcatgtctagctgatgtctgggcagtgttttggaaccagcaggcagtcaggggaaggccactcctaggggcctcttctctgtggcctggtggtgatttcccatacagatgggacctggtgaactctgccagaggtcatccttgactcccagtccacacctcccagtcataatttttatgagtatgtgattaataatatccttgaagttgtaaactaactctcaaagaatacctctactgtccccataccatttaaacaaggatctgttcaaatagtgttgtctttcctgggatgtgaaaagaaagaaactaaatgcaaaatggtaactttcaaatctgtatgatactgtttagtgcttcagtgattcttcccatctagctgatcttttgagctcttaggtataaaatacttttctgattattaccctcttttggctttaggattaattaatggacagtagtttcgggaacagttagtcgaggcatagatgtttgttgtctgccatgagccattatctcaccatattggccttaggaaagaaaaagagataacgatttagttttgcatagtcatatataatattttatttagaaaacattaaagagaaaatggttttgtgttttaattttgtttttaaaatatcatttagtgagataaaagtctgtgtttttatgctgtatttactattcaagtagaaagatttttaaaattccatgcttcatttacgtgcttgatggctctgttctttgatatccaaaatgtaaattaatatttgctttcaattcctttgagttagatttttctaaaattaacacctatttttcagctttggatatagaggacaaatacaacatatgatttatcctgtgaaactgcaagcatgttaactttctgaatattatcagtcacaaattttgggcatcagaaaataatctctttttttgttcaaattgtcattaactatttctgaaaactatattgtattttactgatgacagagtttggttccacctattttaacattggccacacagggagctaaaaaatttataccagcagtaggctataaacatgaaagccagtaaagttaaatatgaaatattaaatatatatgttaatagtattctttttttttttggagatggagtctcactctgtcacccaggctggagtgtagtggcatgatctcggctcattgcagcctctgcctcccaggttcaagcaattctcctgcctcagcctcctgagtagctgggactacaggggtgcgccaccacacctagctaatttttgtatttttagtagagacggggtttcaccatgttggtcaggctggtctcaactcctgacctcaggtgacccgcctgcctcggcctcccaaaatgaacaatactatttctgtttaaccagggcagggaagttcaaaaatcctgagactgcctgctaacttacttactgttttgcaaaaacacttgtaaattgaaatattctgaattatttatttgtacataagatcaatatttttggtaaaataaattgttgatgtaccttggtctaatacctttcatcccttccagtccctcccttagagtcttattttttccagaactttatttatttattgtaatatatgagcgatttgcatattgctggttttatttcacgtttctctgtctcaccctgttttggattccttcacatatgggagatgttcccccataagtaggaacgtctgttttctgatgtataccatcgaatctgcctgcttttctgaaccttaatcattcagacatcatctcacaggcatctcaaatttaacttgtccatgaatctgctattttcctctcaacctgtttcttctctgcaaatggcaacttctctcatgttgcagagccagaactttgggtgttgtgctcatctccccattctttgtaattgtggttgttgttttgagacagggtctcactctgtcacttaggctggagtgcagtgatgggcccagggctcattgcagtcttaacctccagggttcagctgatcctcccacctcaacctccctggtagctgggactacaggcacaagccagcacacccagctaattttttgtatttattgtagagatgggattttgccatgttgcctagactggtcttgaactcctgacctcaagtgacccacccacctcggtttcccaaaatgttgcaataacaggcatgagccactgcacctggccctcatctccccattcttgccatcagtccctgcctgcctcctgaatatccgtcaagtccagctgcttctcccatctgtattgtcagtgtcctagctgtggaccccagccttgccatttttcagcatatctccgcaattgtcccctaaggaatttttccatcttccctcttgcccttcctcagtcccttttccgtatagcagcctaagtgattctggattgcataaatctagtcatacctgccctgcttcccattctagttgctctcatgggaatgtggaatctgtgcatggcctatcacacgctgaatgcctattggccttttcactgcacccagcaccgttctctcctttgctcatactcagaccatggtgttttcctttcattcctctccataggaatacctggtggtaatcatttgctttttgcaacagtgaaatctctctctgtctctgtctctctctctcttttaattatactttaagttctaacaacgtgcaggtttgttacgtaggtattcatgtgccatgttggtgtgctgcacccattaactcgtcatttacattaggtatatctcctaatgctatccctcccccctccccccaccccatgacaggccctggtgtgtgatgttccccttcctgtgtccaagtgttctcattgttcagttcccacctatgagtgagaacatgcggtgtttggttttttgtccttgggatagtttactgagaatgatggtttccagcttcatccatgtccctacaaaggacatgaactcatcattttttacggctgcatagtattccatggtgtatatgtgccacattttcttaatccagtctatcattgatggacatttgggttggttccaagtctttgctattgtgaatagtgctgcaataaacataacgtgtgcatgtgtctttatagcagcatgatttataatcctttgggtatatatacccagtaatgagatggctgagtcaaatggtatttctagttctagatccttgaagaattgccacactgacttccacaatggttgaactagtttacagtcccaccaacagtgtaaaagtgttcctatttctccacatcctctccagcacctgttgtttcctgactttttaatgattgccattctaactggtgtgagatggtatctcattgtggttttggtttgcatttctctgatggccagtgatgatgagcattttttcatttgtctgttggctgcataaatgtcttcttttgagaagtgtctgttcatgtccttcgcccactttttgatggggttgtttgtttttttcttgtaaatttgtttgagttctttgtagattctggatattagccctttgtcaggtgagtagattgcaaaaattttctcccattctgtaggttgcctgttcactctgatggtagtttcttttgctgtgcagaagctctttagtttaattagatcccatttgtcaattttggcttttgttgccattgcttttggtgttttagacatgaagtccttgcccatgtctatgtcctgaatggtattgcctaggttttcttctagggtttttatggttttaggcctaacatataagtctttaatccatcttgaatgaatttttgtataaggtgtaaggaagggatccagtttcagctttctgcatatggctagccagttttcccagcaccatttattaaatagggaatcctttccccatttcttgtttttgtcaggtttgtcaaagatcagatagttgtagatgtgtggtgttatttctgagggctctgttctgttccattggtccatatgtctgttttggtaccagtaccatgctgctttggttactgtagccttgtagtatagtttgaagtcaggtagcatgatgcctccaggtttgttcttttggcttaggattgtcttggcaatgtgggctcttttttggttccatatgaactttaaagatccaattctgtgaagaaagtcattggtagcttgatggggatggcattgaatctataaattaccttgggcagtatggccattttcacgatattagttcttcctatccatgagcatggaatgttcttccatttgtttgtgtcttttattttgttgagcagtgttttgtagttctgtttgaagagatccttcacatcccttgtaagttggattcctaggtattttattctctttgaagcaattgtgaatgggagttgactcatgatttggctctctgtttgtctgttattggtgtataagaatgcttgtgatttttgcacattgattttgtatcctgagactgctgaaattgcttatcagcttaaggagattttgggctgagatgatagggttttctagatatacaatcatgtcatctgcaaacagggacaatttgacttcctcttttcctaattgaataccctttatttctttctcctgcctgattgccctggccagaacttccaacactatgttgaataggagtggtgagagaggccatccctgtcttgtgccagttttcaaagggaatgcttccagtttttgcccattcagtatgatattggctgtgggtttgtcataaatagctcttattattttgagatacgtcccatcaataccaaatttattgagagtttttagcctgaagggctgttgaattttgtcaaaggccttttctgcatctattgagataatcatgtggtttttgtctttggttctgtttatatgctggattacatttattgatttgcatatgttgaaccagccttgcatcccagggatgaagcccacttgatcatggtggataagctttttgatgtgctgctggatttggtttgccagtattttattgaggatttttgcatcgatgttcatgaggaatattttagggcctctctgtattgcctaggctggagtgcagtggcacaattatagctcactgcagccttgaattcctggattcaagtgatctccctgcctctgactcctgagtagctgggactacagatgtgccaccctacgcggctaatttttaaattttttgtagagatagggtctttgttgtccaggctggtcacaaactcctggcctcaagcagtcctcctccctcagcctcccaaagggctgggattacaggtgtgagctaaattcctccctaatgttaccatagccttagctacttatctttgggtccttctcatctttctgttttccttcccagccaggaaaatctgtgtaagtctcaaatactttcctcttcccggaacaccaaagctgtcatttcctatgcaggtgaacctttctggcaagtgatacctcttttctttttcaaaagcactctagtttgtctctttgtgaaacatgatcaagggattaatttcccatgttttatttagcctgatctctttcaaggagctttttacatttttgcctacctaattgatctttctaagcatcctagcatattgccttcagttgcttttcactttcatctaaacaaaagcaacgccacattttttcaatgatttcttaggtatattgatgtcattagaaatttcatctgccttctactatgtttctcattaaaaaaacttattaaagccctctgaaacatagttattatgtatgggccaagtaaatcattacccacagaacaagcatgaaatagctgtgtagatctcatgggcatgcgctatagaagatctgtgtgtgtgtgtgtgtgtgtgtgtgtgtgtgtgtgtgtgtgtgtacataaagcaatctataatatatatatatgtatatagtgaagaatatgatcgattctgatatatataactttttccatggaatttttgtgtagctaaaggaatagcattaatttgaatttgtgaatgttttctaaacgtcttgaggcagttttgataaattgagaattggcctttataaaatttagatacatagcatctcttgagtcaggaacagaaatgctcaggattttccatatggttgtggatatggtctagtataaaaggatgcataggaaaatgcctgggagggtatacatgttaagctgttatcattggctagcttagagatggaaagtcatattgaaaaggtgtgccctgctcgctcaaacacatgcactagggtacagggtaacctgctgtaacaaagatttctaaatacagtgggataaataagagagacgtttatttacctctcatgtaactgtctggtccatgctgctaggaggcaagtcagcctcatgaggtcattcaaagatacacacacccatcctgatgtgccactccgtttgaattgccaaagctgagtttctgccatgtcaggaaacccacagtaagacgagaagaaaggaagctcaagcaagcaatgagagagtcggaagttgcgtacatcactttagcttaccttcctttgtctaggaattagtttgtcatgcctacctacaagctagatgggaaagtggagtctgtgtctgggtgtcttttgctcagctaaaattctattactatggaaaaatgaaaagcaggttttaggagaaactagcagtctgtcacaataaactgtgtcttaaaaattgtttatatataattatatatatgtaactattgtgatatataatgtgctaatcattaggtaaactattcagtctctctggattgcaattttcttttttttaattttttttttttcttttagagatagggtctctctctgtcacccagatttgggtacagtgatgcagccgtagctcactacaacttcgaactcctgggctcaagtgatcttcctgcctcagcctcccaagtacctgggactataggcacatgccaccattcccagctaattttctgtttttattttttgtagagacagggtcttgctacattgcccaggctgatcttgaactcctggtctcaagtcatctcccaccttgacttcccaaagtgctggaattaaaggtgtgagccactgcacccagcacaattttctcatttgtaaggtcccatttttctctgtagtttacttattctataactagttgcgcagtttcccaagagcaggtaccatattgtgtgctctcattttccttcccatgatatctaatggctgcatgagtaatagtgtagaatacatgttgatgcatatagataggtttgctcagattaaagggctagatagtaaatgttttagactttgtgggacacaaggtttctgttacaactgcttgactctgctgttacaacatgaaaacagtcatatgtaagcaaaccaggctggctgtgttctaataaaactttttttacaaaaataggtaggaggctagatttggccttcaggccatattttgccaaccattgtcttgtaggaaagttacactttccaaatagatacaggtgtaaactcagatttcaggagctccattctttttttttttgttgtttttttgagacagagtctcactctgtcacccaggctggagtacaatggtgcggtctcggctcactacaaccttcacctcccggcttcaagcgggaggcctcagcctcaagagtagctgggattacaggcgcctgccaccacgcctggctaattattgtatttttagtagagacggggtttcaccatgttggccaggctggtctcgaattgctgaccttgtgatcctcctgcctcggcctcccaaagtgctgggattacaggtgtgagccactgtgcctggccaggagctccattcttaacagaaaacagaactagaagttaggtaggtcagtgctgaagcttaggatgcaggaaaacttctgtctgatgttttattaattacattttgtctcatgctctttgtatattcccatataacaggatagtaatgttcttttttgagagcccagcattgcattaagcattatatcatttatacctgataacaatcatgcataataggttctattattgttaatttacaaatgaggaaactaaagctttgagaggttaactaacttacctaaggtaagggatagacctggtatttgaacttgactatctgattctttgcttactttatggttattgttgcaaaagtggggattctgtgagacttgaatagtaaaatcagaatcatacttcgtaggtttcttatgcagcatgatggtacagattagaaccatacaagagtggactaaagtaataggaaggaatgaacaaacctctgtttactttgacttcagctgtcatgctgcagtcacctgctcttcttgtggaagcctgatgtaatttctgccttccctggatgtaacatgcttcctcccacttgctttcattcctgtgtaacatctttgtaatctggatgaccaagattagatacttcattcttcacaaaaccttcctgcatcctagaactctcccaatactattagtatcctcttgtggcagttacctattttgatattacagttgacctttgaacaacactggtttgaactgtgcaggtccatttatcttggattttttttcaataaatatatcctaaaattatttgaagatttgtgacaatttgaaaaagctttcagacaaactctatagcctcgaagtaccaaagaaagaaaaaggtatgtcatgaatacataaaatatatagagatactagtctgtttcatcatttgctattataaaatttacacaaatctattataaaagttaacatttatcaaaacttacacaaacagagaccatacctggtgccattcaaagcagagagaaatgtacacaaacagtaaagacgcagcatgaaatcataaccacattaagattcactgtagtacatactgtactactgtatagtttcatagccacctactgttgctattgcagtgagttcaagtgttgcgagtatctgcttaaaacaccatgtgatgctgatcaccgctgtgtgatcagttctctctccagtaaattgcatatggcagtaaaaagtcattgcttatggttctggaatatttttcatcatgtttagtgcaaaccataaactttgaataacaggacagaatccatacaaagtgctactagtaatgctggaggtcctcccaagaagcagagaaaagtcatgacattacgagaaaaagttgaattacttgataatatatggtagattgaggtctgcagatgtagtttcctgtcatttcaagataaatgaatcccatgtaaggaccattgtaaaaaaaaataaaatgaaatttatgaagcatttgctgcagctacaccagcaggtgtgaaaatcttgcacttttttgtgaaacacctttcatttcatattgaagatgcagcttttatgtgggtacaggattactataagaaaggcattcccatagactcgaatatgactgtctatgggaaaagtgaagttgttatatgacaacttaaagcaaaaggaaggtggaaggatataaagctggagaatgtattgccaaccaaggatggtttgataattttagaaagagatttggctttaaaatgtgaagacaaaatgtgaaggggaagctgtttctgccaactaagaggcagcattaagacaccattaagaaaatcattgaagagaaaggatatctgctgaacaggtttttaatgcagacgcaagtgccttattctgagggggaaaaaaaagccacaaggaacatttcttagtagggaaaagaagcaagcatgaggagttaagacagggaggaataggctaactctgtctgttgttctgtgcaaatgcaatcaggtttatgatctgcacttatctgtgaagctgctcatctcctagccttgaaggaaaatgataagcaccggctgccagtcttctggttgtacaacaagaaggcttggacaatgagaaccctttttctggattgactccattgatgctttgtccctaaagtctggaagtactttgccagtaaggggctgtcttctaaagttcttttgatatggacagagccccagccacccagaacacatgtgtttaacatcgaaggtgtcgaagtggcctgcttctccccaaacccaacaagtctaattcagtctctagctcagagtactgtaaggtcctttcaggctcattatacacagagctgtatggaaacgatcgttgacactgtggaagagaaaaagtctggaaagattacaccactgaagatgcattgttgtcatataaaaagctgtgaaagccatcaagcccaaaatttgtgctggagaaaactttgtctggatgttgtgcatgacttcacaggatttatgaaagaggcaaccaaggaaatcatgaaagagattgtggatttgacataaaaggtggagtgggggttgaagggttttaaggtacggatcttagaggaatccaagagcggatagacaccacacccgaggaattaacagaggatgacttgatgtagataaatgcttctgaattggtgccagaggatgaagaagaagacatagaagaagcagtgccagaaaacaggatcacatcagacaatgcggcagaaggattctgattattcaagactgctattgacttattttacgacatggacccttctgtgatactggcagtaaaactaaaacagtggaagaaggattgaaatcatatagaaacatttttagagaaatgaaaaagcaaaaaaggcagacaaaaattacaaagtatattcataaagttatacagagtgtgccgcctctcctgcctccccttccacctcctccacctctcctgcctctgcaacccctgagacagcaagaccagcccctcctcttcctccttctcctcagtctactcaacctgaagaggaggaggaagactgttatgatgatccacttccacttgatgaatagtaaatgtattttctcttatgatttgcttcataacattttctttagctttattgcaagactgcagtatttaatatatataatatataaaacttgtaattgactatgttttcagcaagggtttcagtcaacagtatgttattagtatttacttttttgtagcatcaaaagttatatatggatttctgtctgtgcaggaggcacccctaatcctcatgttattcagtcatcacctgtgctttgaaattgtcattgtgtactaggctcaatttttttctactagattacatgcatctttaaaaaaatgacttattgaggtatacttgacataataaatttctgatatttaaagtattcaatttcatgagttttgacatacgtatacacctgtgaaaccattaccacagccatggtgttgaacacttctttcacctctggaagtttccttatggtctttgacatttaccctccctctacccctttcccagtgtaaccacatgatctgctttctgtcactgtaggctcgtttgcatgtcctaaaattttatattaatggaattatacattattatgcattatttttggtcttgcttttttaactcagcataattatttttaggtttatccttgttatttaatgtgttattgactctgtgtgtgtatgtggaatagaattccattgtatggacaagcccagttttgttaattcatttgcctcttaatggagatttaaattgtttccaggttttgattatagtaaataaagctgctattaacctttgtatgtaagtctttgtatagacatatgtttttatttaacttgacttaatacgtaggagtgagttgtctgaatcagtgaatatatgtttaacttttccagaaactgccaaactgttccaaagtgtgtgtatcattttatattgccaccacagtgtgacaattcttgttccatatcctgactagcacttgctattatctgtcttttcactttggccatgtaaatcggtatattgacggcatctcattgtgtttctttaacaataatgatgttgaacaatttttcctatgcttagtggacattttgactgtgtttttttacttggtgtgttttttgtcttataattgtgttgtaagtgttctttatatgttggtagatacaactcccttgttcaatatatgtattgtgggccagacacggtggcttatgcctataatcctagtactttgggaggccaaggtgggtggatcacttgagcccaggagttcgagaccagcctgggcaacagcaaaaacgtgtctctacaaaaaatataaaaattagctgggtggccgggtgcagtggctcacgcctgtaatcctagcacttcgggaggccgaggcgggcagatcacgaggtcaggagatcgagaccaacctggccaacatgatgaaaccccgtctctagtaaaaatacaaaaattagctgggtgtggtggcgtgttcctgtaatcccagctacttaggagactgaggcaggagaatcgcttgaacctaggagacagaggttgcagtgagccgaggttgcaccactgcactctgacctgggcgatagagtgagaccctgtctcaaaaaatatataataataataataataataataataataataatgatgataataataatatattttatgtgaatatcttctctcaggctgtagtttgttattttattttcttagttgcctcttttgaggagcagacttaaattttgatgaagtacagtttgtcaatatttttatagttcatggtttctatgtactaagaatccgttgcctaccttaaggtaacagattttttcctccatattttctactgtagttatgaaaataggtttgtgattcatttggagttaattttttgtctatgttgttaggtgttagcgttgaggttaattttttttttttttttttttttgagatgttgtctagctccgtcgctgaggtgggagtgcagtggtgtgatcttggctcactgcaacctccacctcccaggttcaagcgattctcctgcctcagcctcccaagtagcggggattacaggtgcctgccaccacgcccagctaatttttgtatttttagtagagatggggtttcactgtgttggccaggctggtctcgaactccttacctcatgatctgcctgcctcggcctcccaaagtgctggaattacaagtgtgagccaccgcgcctggacttttttttttttttttttggtccaaatggttagctgtttgttctagtaccatttattgaaacgacatttattaggttggtgtaaacataattgcggtttttgcattgctgaaatttgctgtttgatattggaatacattcttaaataaatatggttatgttatacatcattttaatgtacatttctcgctttgtttttttgctaatgacttactactggctgtttaatttatatttagagtatggaaatgatgttagacaaaaagcaaatctgagcaattttcttatttgagtttaaaatgggatgtaaagcagcagagacaacttgcaacatcagcagcgcgtttggcccaggaactgctaatgaacgtaccgtgcagtgatggttcaagaagttttgcaaaggagatgagaaccttgaggatgaggagcttagtggccggccttcagaagttgataacaaccaattgagagcagtcatcgaagctgatccttttaaagctacatgagaagttgctgaagaactcagcgtcaaccattctacagtcgtttggcatttgaagcaaattggaaggatgaaaaagctccatgagtgggtgcctcatgagctgactgaaaataaaaaatattatcattttgaagtgttgtcttttcctgttctacaagacaatgaaccatttcttggattgtgatgtgtgatgaaaagtggattttatatgacaaccagcgatgatcagctcaatggctggaccaagaagaagctccaaagcacttcccaaagccaaacttgcaccaaaaaaaggtcatggtcactgtttagtggtctgttgctggtctgatccactacaggtttctgaatcctggtgaaaccattacatctgagaagtatgctcagcaaatcgatgggatacaccaaaaactgcaatgcttgcagctggcgttggtcaacgagaaatgtccaatttttctccataacaacacccaactgcacgtcacataaccaatgcttaaaatttgaatgagttgggctatgaagttttgcctcatccggcatattcacctgacctctcgccaaccaaccaccacttcaagcatctcaacaactttttgcggggaaaacacttccacaaccagcaggatgcaaaaaatgctctccaagagttcgtcaaatcccgaagcatggatttttatgctacaggaataaacaaacttatttctcattgagaaaaaggagctgatgtaatggtccctattttgattaataaagatgtgtttgagcctagttttaatgatttaaaattcacggcccaaaaccacaattacttttgcaccaccctaatacagcccgttgacttgacttggcaataccaagcttcttaaatttatatttagtgttttattgataccacaagttcagatattttttgttgttaatagaattcaaggaaataagtaatcttgaatggtttctgctaggtcatagaacagtgatgataaatttctccagattatcagaattcaatttttcactgattcattgttcttcaatttgatatcattttacttttaggtgttacacataatattgcattacttcgagaggtgataatcaactcacgctttgtaaaaggagacatcagcactaaatttctctccgatgtgtatcctgatggcttcaaaggtttgtatgcattaaaatattttagtgttttaaagttgttatttttatactttattgtaatacataatttcactctattttgaaattaaggccttttggcttatattatacttcatttttagaacatgcaagactgtttacattcatgattttgagtatttatggatgactcatgagtgtgataatctgcagtcttgtggagtgcagaattcaaccatgtgaattgttctatgagtccagtgttttggagcaaaacatgtagatagatcattagcctacctgacttcctggtttctgaaaatcaaatcagatttgtattttctactgaggtgagtatataaggaactcttctaaagtgatttttaagagatatattaatgaaaatagcactgaaaatttcagaaaaccagattctggtcctattaatgaaaatctaggaagatgatgattttattctgaaaaatgaagttttcaataaagtaatgagtggaatgtgaaatttaacacagcaaagttatcagcaagcatttccaggtagtagaaaaattgctcatcaaatgggagatagagaaaaccctttagtgagcattcaaaacatagttaacataagatattgagagataaacaagatttagactgagacttaatagaaatgttactcaggtgaaagcctctacctacatttttaatgagctagtgaggtatgaaggttagatagtctgtcccatatttcaagtgttctttgtatccattaaagtgttttaatgtaaaatgactcacattcatattaggagctatatatagattcaggtcaagttgatgtcgttgagttgttgggtgcatttataaagcagttttcagttcagaatttacaatacagagttttcataagactcaacagagataactgatttgaatattgttttaaaactttagtgttatagagttttatcattagtattaaggcaaatgaagaatggctctaagttgggatcttaaaacaaaaactaatgatttattaggttgtttttcataaacttttgaatttttaaaaatacaaaataaaatacaactaggatagtagttttatacttttgtgactattcttttaatatttgttggtttaatgaggctaagaaccccttacgtcattgcttttcattttatccctagcacaaaacatagtaggtactaagtatttgttgaattaatgaaaaaaaaaaaatcttagccataatattgatgagaaaggattactttggatttttttttttttttttttttttgagacagagttttgctcttttgcccaggctggagtgtagtggcacagtcttggcttactgcaactctgccttccggtttcaagcgattctcctgccgcagcgtcccaagtagttgggattacaggcatgtgccactacccccagctaatttttatatttttagtagaaacggggtttcaccatgttggccaggcttgaactcgaactcttgacctcgtgatctgcccgcctcggcctcccaaagcgctgggattacaggcgtgagctaccgtacctggccgctactttggatatttttaatcatttatacatgtatccagataaccagttcattctattttgatcctaacatttagtttcttgtccttcctaaaattttaattaaaagttgtagtacgttttgaagtggacttaggacttccatgtttttatgtctgcctggcaattcagtgatggtgataagataggaaacagtgggcagaaggagaaaacagggaaaaactacagagaacctttagaacaaacattatatgcatgtatgggtatttatatatatatacacacacacaaatacacatttatatataagtttgtctatatgtatgtatggtgaagtatcccagagaagaagaaaatggggcatttaaattttctaatcagagttgattagtatgtgctggacgtttagcaacaatagagaatatcccaaattctgtagagaagggatccccttcaaactcagaaatgtacttaaacctagatattgcagttttctgtgatgcatataatatattacatttctttttttgtaaggaattaacagcttggacaccacaattttgttttttatgcttagaccaatttttaaaattggcatacattgcttttagcaattatttagttgcagccttcattttacatgtgaggaaactagagctcagagatatcagtaaagctaaatgaccagtaagataataatgccaggaattgaacctaggcttattcaactcctatttgagtagtctttgagttatgctggggttcaaattcataaatcacaaatgttttcaatcagggtatgctacatgttgttatattgcctctaaatactttagaaacacactcctatatttgccattcttaatgtctccctcttgttttattttcttattttcatatcagttcattcttctttgagtggttactgtctgtcattcttcttcagattgctgtattttccccctaaatcaggtcttagatattttaaactgtatcgtcttttgactgtttgatatatgtgcccaagagactgaaggaagtggtaactacagttaatccaggatcctctccatatgtttggggccaggtcattttgcccctttggggtttcccatctgcttcccatctgttcagctatcctaggcactattcacaggcaagcacctatttttatgactgcattaaaattttctattgtatatgtttattatcccacatttatttgtatgtagactaagccagttttactagagattcttagagttaaactttgaaatgattgcttctaaaattaaaaaataggatacatgagaaattattcttgtcatctctttagatgtggatgttgaaaagcggtttcccttgattctgaaaaataaatggaacatgaggaagaagatattttaagaactataatttcatttggcctataatgaacattttgggcttatttctctgataccttcctatacttcaaccccaagccccatcgaaagaaattgtcagaattatctcattcttttaagaagttacagatcttctggtaaaaatttcactcaacacaaaaagtatataattaattatacttctcttttttccactgaatttagtcaagtatatctacactttaaaaaatactactatgatatttggactgaattcaatcattaaagtcattcaacaaataattgatataggctctagaagaaaatcaaagatgggtatattttacctgctcttagtgagctgacatcatgagagaaataataatgtaaagtacccactatactacaggacaggataaagtaagtgcctggtaaagatgtaagcaaagtatcttgacagaagagaaacaaaacaaaacaacaacaacaacaaaacaccggaaacccagttccatttgagggaataaagaaaggctttaaggatgaggtagcatttagactattggaatacctctccggggactctctccatgggagctgggctgcacttgtgagagccatgtgtgcacatctttataagccatcctctttgaagttggtagtttgtaatcagccatgaagaaagtatttactgtaaagaaattggttgtaccctgcggcttttctccttcccccacaccccagttgtttgttaagcatttaccagcaaaccactgcctaactctttggcctgcatattgagcagagtccctgatgtaaaaaggaaaagaattactcatctagggaggaagacctagaagactcactaaggacaggtggtgctcagttttagagctgctgttgtaggaggcagatgactgtgcttactgaaaaatgggaagaacacttaaaaatactgaattagaggagaaagacttaatgaactaaaaaactgtgatttttctaaataaaacaattcagcagtcaatgtggaaggtaggatggtcactactaagatccaaattagtgactcaaaggaataaatggaagtatctcaaaatatgcagcaaaaaggtaaagagaatgaaatcatgtggaaaatgatgagagatatggagggaagatccaaaagattttacacataagtgcatactaggagtttcatgaaaagaaaaatggaaatgaaggataactttgaaagaaataatagagatttttttctcactgttcttaagaaagccttaggtattcttggaaagactcactgagattcagactggattaatttaaaaagtaactccactaggcatataaaaaacaaatacttttttaaatcttctaaaagaaaagaaagaagatgcaaggaatgtacagtgagattatgttcatactctataaactggaagttagaaatcttagaatagtgtctgctacataggaaagaatttgactcaagagtactatacccagctaagatatcgtcatcaatataaacaaatttgttttcagttaaataaggattcagaactattttaccatatatactccttttgaggaaattgctaaagaaagtactttaaccagtttttaggtaagatgatagcttaaaaatatacatatttttccccctacccccaaatccactaacttgagttttttaaagacacaagcccactaggaagaagaaaggaaatagcatttggtaaaatgaacagctgaaagatgattcttaactgacttagtaacctaagaaagttgaatcctaagctgacaatgagagaaactgagaagtagctcattaccactgcagaacccttcagaagtctcaataattattagctccagataccctgggaaattcctaaaggtagcactactgacctaaaatatctgtaaaattttctccatatcacttccctcactcttcagagtaaggcgactctctttccctcatcctggtgtaagctttcagattcttctctgcagaggataaaaaccaggggacaccaggcacagttggacaaaggatcgagggaacatggacataataaatgtggtgacactctctgccccagctttgttcctcagttggttcccaggggactggcaggcagactggtactcacagacatgaaagtagacgatccttgaaaaatctaaccccctggtgagatgacctaaagattccccaacaaaacagtccagccagattaccctacagacaaagctgccagtggtcaacaaagccatagcccacgaagagagaacgggcctggattagaatcaggacctctatctgcattatttaatacaacactgtggccgggcacggtggctcatgcctgtaatcccagcactctgggaggccgagtggggcggatcgcctgaagtcaggagtttgagaccagcctgactaatgtggagaaaccccgtctctactaaaaatacaaaattagccgggcatggtggcatgtgcatgtaatcccagctattcaggaggctgaggcaggagaatcacttgaacccaggaggtaaaggttgtggtgagccgagatggtgccactgccctccagcctgggcagcaagagcaaaactctgtctcaagaaacaaaaacaaacaaacacacacccaaaaaacagaaaacactacatgtaatgggaaccagcgcgtagctgttaaaaataaatggtagacctaaaaccactcgggaaatacacaggtcaggcttcttgaaaactgcatcatgccaatgagggtggccagtagcatgagggtcatagtggcatgtcacaaagcttgtaggtgctgttacatggttttgaactccagtaattagtggcttaatgaacaaggagaggagataataaacattgtttaggggttgggacttttgcatgaaattatccccccaaaagtttaagaaggtaagagttagttgtgaggaggaaggtttttcttctttcagtcacaaatacttatagagcctgttgggtaaaagattgtgctctaggctctgggaatacagaggtaaaactgtcaaaaagcctaaggcttttagaaccaagagttgcagctttttccagccatgtcttcactgaagagcccactgtgcccagcctcgttgacttcgcagtagaggctctaagcttgaatgttgtgaacgttccaaggctgggtttaagaaagccttagaactccatctagacctgtaacaagtacaagtgacttgctcctctgaagagtgcttgaggctgcatgtgtcctgcatgtgaggctggagctctcagtccttctgcctcctcaccacctgtattccacatgcacccagcagcacctctcagtcttctctgtcggggttgggggagagggtaaaccaagtgtcagattacagcactcttggtttacgttcacactcgctaaaaggggtaggaagaattggagagcttttaaaatacttaccgcgcccccaagttttaggtgtgtaggattcatcagtaaacagaaaaaggagctgccctcatgggacttacattccagcaggttagcaggcagcatgcattcccagctcccctcatggcagccaggcagggtttacacattagaagctgctcagaaaagggaatgaggtacattcaccttagcttactagcccagaatgcagtgtcagtgtgtctgactcaacaccaagctggtctaccacccccagagggcaaacagtggagaccgttcaaagggagctcaaggtcagagccagggaagacatgccttacttagtatcaggccgcaggggaacttgcagaagtcaagtccactctggcctgtgatcaggagtagcattatgctaaaatcgttgtaagaataggtcagttatgatcagacttcttatacagagcctgttggaactgagtaccccccttttgaagtggaatatcagtaaaatgcttgaagttgatgtgcatcatatcagtttgcctgggagatgtgatgaatgatggtccattttatttgggagacctctctcaatattgcctgagtccatgcactaatagttggttagaccagatgaaatactgattgagcatcttgcagtgaatgggttcccctaatgcattgcctcctcccttgctgatggtatatacggtgcatatgtgtctaaagaactgacttgtaaaggactttgattgtgaaccaccatgagaaatacattttacatcctgacatagtatgcacatataaacacacacaacattttcatgtaaaatactgtgtttaaagtgctatgataatttgtcttcctgcacatgacacattaaactggcttcatgaactactaaacagtttctttacacagtttgataaatatcagtccagaacagttgtattcaaagtgagatctgctgactggcagcatcggcatcaccctggagcttgttagaaatgcagattattaccccttgccctcataccttctaccagtcagtctgctggtgaagtgcacacagcatctttaatccaggtgattctgatgtttggtgaagtttgagaagcactggttctttttacactccagagagcttttgtgattatatatattgatatttaccacattataaattaaaactgaggaacttgaaaatatttattcattcattctgaaagtaatggtaataaatccattacgtgttgacatgcatgagagcagtgatgtcatcacacaatatgtgtcccttggatctgggaacctctgcagtatactcttgagaaaatgagagttaaaaaagcaaatatattttagtagtactatgaaaatcatttgaccttgcaaggactcctggggactcccagttgttggcaggtcatgctatgagaactgttcttctcaactgtatgttttgacaagactgagagcaaatttttgtaatacttcttatatagagtaattatgtaatcatatgggatgttttcatcactgcttaggtgtcaggggaaaatgaggaactttccaatgcccataagagtatggtttattaggctgttgtgaggatctagtatggaattcccagaaccagttggtagatcccatatttgtattatgttttatgtaatgtctaggtttgtctcaaaagagggtggattacctgtgctctccctgcccttcagggagcagatagattacttccctgtggaaaattgtgctgtagatattggaagtatttgtatcttaattttgaatatttttagtcttatttgtattttgagtgattttttagacataatgtttaaattacttcatttcttccaaataagtttaggcaactagtttttttctttttttgaattgtacatttgtttcttggtatctgtgggtgattggttctaggaccctttcaggtacaaaaatccacagaagctcaattccccagtgtcgtatttacatataacttagacatatcctccctgcactttaaatcatctctaggttacttataatgcgtagtacaatgtaaatgctgtgtaaatcattgttatactgcattgctttgaggaaaatgacaagaaaaaaaagcctgtacatgttcagtacagacaacaatacattttttttctcaaatattttcaacctgcagttgtttgaatccatggagggtcgactgtaaaagtagcaccttatggctgacgagccagcattcaagttgctcatactgtcccatttaatactctactatctatatgtagtactctggtaaataaatagttttagatttgtggtgaagttacagagctgtcaaaggatgtgttaacctatagaccctggagtatttgaatcctaccttgactcacaaccttcttgaagaattacgcaaattcttcaatcagtcactcaccccaggcctttgcggccagccgactatcccaggtccagctgtgtaatggtaggaagatactgtgagtgagaggaggagagagattggttggttgattgggattcatgcagagaagcagaagaatcacggcgtgatattctttggatcttcgcaccagaaagcatggcctcatctgtgtccttgaccagccgctctccttttctccagggacaggggcttcttgcacgctatcctcacttccctcagcagggaagctgggctgggaaaggacagagagaagcagatgtgaggagcttatgcttttcctggagatctctgtgtggatggttttttctttttaattgtctttgttctgtgcatctgttgaatatcttctttcccaaattaaacttctttcccaatataaacttcccgtgagcaggattttgttgtcttatttgaatggtcttgcttcctcaatgtccgcacaccccagtgcctagtacaatcctagctgcataatagatgccctataaaatacttgtttgaatgactagtaattctataggagagaagcacagatgttaaaataaatgattgattgattgattggttgattgatttccctcaggacacatgctaaccaagagtgagaagaaccagttattggcaatagcatcatcattgtttgtggcattccagttaagagcacaacattttcaagaaaattcaaggtatggtagatcatttaaaacagaataaatgagcagaacaatattgataatccagtctacataggaaatactaataaaagatgtggctgatctcagttctagagatcttatgggtctttggagaagtataataaagtcacactgtataaatatgatattgcttacattttgtttaaacaagtttttttaagttcagaaaggataaaaggatcttggcccttttaatttggacataagaagatagtctgaaatccgatgggaaatccattcgagtagtttgtgtttatgatttctgttttatttacttatcttgaaaaacgtttggagaagtatatttaaatgtaggaatgaatctgggcagttaaaaaaatatatatcagaaactagtgaacacacaagaaggaattaacaccaggttgagttagtcatttgtgagacacaagtgtgccttttagcttcctagtgacccaggtaaaaggagaacatgctttatatcagggtaagtagaaacaaaacctcaatgccattggtgcttctagagagaggattgtttattatgaatgtgtgtttacttgctggagcaatccctttaaaggaatcatgctgttgataaattgttacttcagtttcttttcctttttactttttcacaagaggaagaacaaagtttaaaaaaaagaaaaaaaaagatggaaggtgatgaactagctttgaaaagcacaaatcagaaactgaaattacttctgaagaattaggtagaggagaaactaaattggatttaggctgtatcttagtggctaatgtggttttattcaggaaatctcagtgtagttggtactcttcacttgttctctttacctagaaagaataggaagcttacagtgtatctttttaaaagttatgatttggtagctaccagggagagatgagaagatatagaatatcagtaaatgactgaatgactggacggaggaggaaaatggtcaatagaaccgtgaatctgcttgtgcatctgtttaatatcttctttcccaaattaaacttctttcccaatataaacttcctgtgagcaggattttgttgtcttatttgaatggtctttgctcccccgatgtctgtacacctcagtgcttgttgtttggttgtttcccccccacatagttgtgcggtctagtatgggaggcactagccatgtatggcaattaagattaaagtgaatggaagaatccttttcaaagttaccggaaacgtggctacatttcaactgttccatagccacgcgtggttagcagctcctgcactgggcaactctaagaggctttccaccacagcaggtgtgtttccatcaagttctgttggacagcatttgtctggagggatatgtgtgtaggagagaatgttgcttttgttttaaaacctgaatttcatattttttattcttttgataaatgcagtattcagatcctaattcctttaccttcagatgttatttggaccttgattatttcagaagttctgagtgtagctaaatatgactggtttgatttttaagaaatgtatgcaagttattttcagagagtgctgccttactgtgtggaagaatctgaaaagggcttaaaaagatggagaataaaaattacctgtaatcccataattattcaataattacttttaatgttttggtagaacccttcaaagtatatatatatatatatatatatatgtatttatgtgtgtgtatatatatgtatttttatatacatacatgtagcatttatactttgcataattagagtcataaacctgggaatatggtttgaattacttgtgcaagataaacagcagtatattgaacacccatgcacacattatctagcttcaatgactgtaaaaaatctatcttccttgtttcatttttacctctacccactccacactttccccatttgttaattttttaaggtaaaatatacaaacacacatatacacttcttacctgtacagtttttgtttttgttttttgagacagagtcttgctctgtcgcccaggctggagtgcagtggtgcgatctcggctcactgcagccttcatctcccgggttcaagcgattctcctgcctcagcctcctgagtagttgggactacaggcatacactaccacatctggctaatttttttttgtattttcagtagagatggggtttcaccatgttggccaggctggtcttgaactcctgacctcaggtgatccacccacctgggcctcccaaagtgctgggattataggcatgagccaccgcgcccagccttacctgtacagttttaacaaagggatgcttgtgtgtaactcagacgactctatctttacatcgtctcttccagtgcactccctgcctccttttgcttgtggtgctacctgcggtgtgatttcttcagattgcttttttggtaaactttttttttttcttttctttttagagagatgaagtcttgcttttgtcgcccaggctgaagtgtagtggcacagtcataactccctgcagccttgaattcctgggctacagcgaccctcctgcctcagtgtccctggtagccaggattacaggaacataccaccacgcctggctaatttctgtattgtttgtaaagatggggtttcaccatgttgtccaggctagtctcgaactcctgggctcaagtgatccagtccaccagccttggcctcccaaagtgctggaattatagacctgagctgggcgaaaccttgtgtctgctaagtacaaaaattagcgggggcgtggtggcgggtgcctgtaatcccagctactagggaggctgaggcaggagaattgcttcaacccaggaggcggaggttgcagtgagccaagaatgcgccactgcactccagcctgggtgaaagagtgtgactccgtctcaaacaaacaaacaaataagctaaacaatctaataaaaaacgggcagtaggtttgacttagactttttatcagagaagataaatgaatggcacataagttcatgataagatgctcagcatcatcggtcagtggagaaacaaaatcacaaatctataccactacacacccactagaataatatgcatcaagtaatgagtgggtaaataaaaagtggcatatccatactatgagcttattcagcagtaacaaagaataaacagctacattcactaatgtgtgtaaatctcagaaataacatgtgaagagacagaaaccagataaagaagactatgtaatgtatgacttcatttatttgaaatttctagggaaggcaaaaagtataaagaacaaaagaaagatcagtggttgtctgggtctgggtatgggagcaagattgactgcacatgagttttattgttctaaaactggattggggtgatgggtgtacaactgtatgaatgtattacaatctcacttgatcttagccaaaaggccgagaagtgatataaatgtattacaatctcatcagactatacaattaagatgtatagatgttattggccaggtgcagtggctcatgcctgtagtcccacactttgggaggccaaggcggactgatcacatgaggccaggagttcgcgaccaacctggccaacatggcgaaaccctgtctgtactaaaaatacaaaaattagccaggcttggtggcgcatgcctgtagtcccatctactcaggaggctgaggcacgagaattgcttgagcctgggaggcataggttgcagtgagccgagatcacgccactgcactccagcccgggtaacagagcgagaccctgtctcaaagtaataaaaagtaaaatgtatagatgttatacaagtaaattatatcttaatgcaacttaaaaaactgtaaatgtggtaccaacaaagggcttgaaagaggtgggaagtattatgagaagtgttaagatgatggaagatacatgtaaaaataaattgtattcgaaacttgagtagaagcagatattaaggagtcaggttactgacttggaagacctggtggatggtggtaataacaaaagtgcaagagcagctttgaaaagaaaatatgagaagttccatttaggcagttgagtttgagatccttgacaggcataattgtagctcctaaagacttagcaatatgatatattcctatccctttgactgtttcttctttaataataatatatatgcccctttgagcccattaggaaatacttggggcatgcttttgtactcattagttccatgatttttttgtaataatcaaatgcacacagttttagacttcaacggtgttccttaatgtgtgctccatagagcgctagtttgggggagtattaaaatgcattacttaagaaaatgtttctgtgtttaaataaacgtggaaaatcccttgttaagttagaaacctcttagagactgtcatacaggcacacctcatttcattgtcctttgctttattgcacttctcagatattgcattttttacggattgaaggtttatggcaaccctgcattgagcaagtctttttgtgctgtttttccaacagcatgtgttcactgtctctgtgtcacattttggtaattctcattacatttcagacttcatcattattatcatatctgttttggtgatctgggattagtgacctttgatgttcccattgtaattgttttggggtgccacaaaccatgcacgtgtaaggtggtgaacttaattgacaaatgtgtgtgttctgattcactgacctggccattcccagtgtctctcactctccttgggtctccctattccctgagataaagtaatattgaagttagactaattaataacaaagcagtggcctctaagtgttcaagtgaaaggaataagtagcacatctttcactgtaaatcaaagggtagaaatgattaagcttagtggagaaggtatattcaaagccgaggcaggctaggcctcttgtgccaaatggttagccaagttgtgaatgcaaaggaaaagttcttgaaggaaattaaaagtgctattccagtgaacacacaaatgataagaaagtgaaacagccttattgctgatatggagaaagttttataggtctggatagaagatcaaaccagccacaacattcacttaagtgaaagcctaatctagagcaaggccctaactctcttcaattctgtgaagggtgagagaggtgaggaagctgcggaagaaaagcttaaagctatcagagcttagttcatgagatttaaggaaagaagctgtctccataacataaaagtggaggggaagctgcaagtgctgatgtagaagcttgcagcaagttatccagaagatctcactagcatcatcgatgaaggtggctacactgaacagcagattttcaatgtagataagacagccttctattgaaagaagatgccatctcatactttcatagctagaggggaaaagtcaatacctggcttcagagcttcaaagaaccagctgactctcttggtaggggctaatgcaactgatgacttgaagtagaagccagtgctcatttaccatttcataaaccctagggtctttaagaattatactaaatctattctccctgtgctctagaaatggaacaacaaagcctggatgacaaaatgtacatttacagcatcatttactgattattttgactccactgttgagacctacttctcaaaaaaaaaaaaatttttttttcaaatgattgctgctcattgacagtgcacctggtcacccaagagctctgatggagaagcacaaggagattaatgttgttttcacgcctgctaacacaacgttcattctgtagctcatggatcagggagtcattttgattttcaagtcttattatttaagaaatacatttcacaaggcgatagctgccataaatagtgattcctatgatggatctggacaaagcaaattgaaaactttctgggaaggattcaccattctagatccccttaagaacatttgtgcttcaatgggcaaaataaaagatcaacattaacaggagtttggaagaactggctttgaggtgttcaagatgtcattgaaggaaatagctacagttggggtggaaatagcaagaaaactagaagtggaacctgaagatgtgactcagttgctgcaatctcgtgatagaacttgaatggatgagagttgcttcttatggatgagcaaagaaattttgcttaaaaagcaaagtttttaagatggactctgcttctggtgaagatgctgtgaacattgttgaaaaggattttagaatattacattaacttagttgataaagcagcggcaagttttgagaggattgactctaattttgaaagaagttctactgtgggaaaaatggtatcaaacagcatcacatgctacagggaaacctttcatgagaggaagaatcaattggtttagcaaactttattgttgtcttattttaagaaactgccgcagcctccccagccttcagcatccatcagcctgatcagtcagcagctaccctctatcagcaaaaagattatgactcactaaaggctcagatgagggttagcatttttttagtaataaagtttttttttttggagatggagtctcgctctgtcgcccaggctggagggcagtggtgtgatcttggttcactgcaacctccgcctcctgtgttcaagcagttctcctgcctcagcctcccaagtagctgggactacaggcacatgccaccacaccccactaatttttttgtattttttagtagagacggggtttcaccgtgttagccaggatggtcacgatctcctgaccttgtgatccgcctgcctcggccatccaaagtgctgggtttacaggtgttagccaccacgccagcctaaactactttttaattaaggtttgtacattgtttttaagagctatcgcacacttaatagactacaacacagtgtaaacgtaacttttatacacattggaaaagtaacaaattcatgtgacttgctttattgaaatacttgcttcattgcagtggtctggaactgatctcacagtatctccaaggtattcctatatactaaaatgcattctgaaactcttaagagcaggatatagttggactcttacctacactctttttttcttgtgaaaacctttttcctaaaagctctttgaaaaattaatattccaatgaatgcttttgggaaacacagagtatgttatattgtgatttgtagtgttttagatagtttaaacacaacattccttagagattgttgaaatatttagggcaattgctttataaagtggaggttaagaagcaatctttatagtctttgctaatttctagctaaaattgtaaatgtgataattgctacattaaaaaatttaagtatcttattttttaactcattatcttttagaagttagaaacaaaatatgtatttatgaaatatgtagactgcaagttcacttatccagataattgcacatttattttctatacaacaagcaattgttcatttttggtgagtttattttctgttgaaaaaaaggtactatcacttatttagtattatcagtttattgtaaaattgctacaccctataacagtgtagagctgtaacatttagtaaatatagtgttcttcttcaggaagcataatcttgtgtagctaagtgaagctatgtttctggcttgcttactgaggaggtccttgacacctacatcatgaaagctgatgtacggtgtttgaaccttcacattttggctttagagtcatgttttcacaatcggcttgggaatggattctaagagtcaccctccaggtgtggctctgtattgctttgtcatgggtgtgtccgtgaaatgtttttccttccaaaccagtagcccacagcccttcctttgtgttgcttgttttggctgctgatcttattttcccaatttctctatgggcttcactctttcatcatttatgacttggaaaaacacattaataatacatacccctagtatttggatagtaaaacaatagtggttcattttagaaaaaaagaaaagttaatgtcagaaacaatagccattttttgggggatgactataaaatgaatttgatgagctcaatctttttctgacttaccatgaaggcttctttttaataattattcttaaacacttatattgacagaaatgaatcattaaaagctagttatattaaacaaccactttttttaaaagctaaaatgattttgttgacattgtagtttgatataataatttgtttcactaactggtaatgattggaagaaaaaatagtaaaggtaacattttaatcatttttagtaatctttatttttgctcaaaatgtctgttttttcttggatctggattcagctttcttgagaatcagcttttactttccgttttttttcctttctttctttctttctttctttctttctttctttctttctttctttctttctttctttcttccttccttccttccttccttccttcctttctttcttttctctctctttttctctttctctcttcctcccttcctccctttcctttctttcttttctttctttccttccttccttccttcctttcttttcttttcttttcttttctttcttttctttcttttctttctttctttcctcagtcttgctctctcatccgggctggagtacagtggtgtgatcttggctcactacagcctctgcccgctgggctcaagcagttctcctgcctcagcctcccaagtagctgggattacaggcatgcaccgccaggcccggctaatttttgtattttttgtttgtttgtttgttttgagacggagttttgctcttgttgcccaggctggagtgcgatggcgcaatctcagctcaccgcaacctccacctcccaggttcaagcagttctcctgcctcagcctcccaagtagctgggattacaggcgtgcaccaccatgcctggctaattttttttgtagttttagcagagactgggtttctccatgttggtcaggctggtctcgaactcctgacctcagataatccacccacctcggcctcccaaagtgctgggattacaggcgtgagccaccgtgcctggcctaatttttgtatttttcgtagagactgggttttgccctgctggccaggctggtctcaaaatcccaacctcaggtcatccacctgctttggcctcccaaagtgctgggattacaggcatgagccaccacgcccggccactttctggtttctactttatcctcataatttccctcttggtatttgagcaggggttaaagactcagaaaaagaaacaacttcactatggcctataatattaatggaaatacttcagcctgaaaggttaaaataaagcactccctttggtggaggatgactttggctgcatggaatcagtgtactttgtgctcaggcttaggagaacatatcaagtatcacggctggctacacagcctggtgtcagtttaactctttcagccacagtagcataacgggaaattacttcctcttgggttctttgtatgtgcagtcattgtgtctgcatttgtattgtattatctttcctcatctggcttcctgataaaatggagaatcgattttttagtgatttctgcctagcagagacaattatctgtttatttttctttgcctttcctggtttcagatatagaatttattcacctgttattaaattttcaattagatgataaaagtttaaggtttttgaaatatgatcttaaccactgaaagatgagtggggtgagaaacatagaaaaaagtaaccgtgtgaaaataattcccaaggaaaagccggtattgttgaacgggtacatactggctcttttactaagatgtcttctgaattaaaagagcatgtgaaattataacacatttatacgtcaatgaaaataaaacaacttatcataactcgtttcatactctcagataagccacttcactgtgacaatgaaggtgacgtgatacctaactatacaataaaaaaaaatagcactttaagtatatatttacaaacgtatgtatacactctttgtgtttggaaatagctacgttcatttgagcaaataaatcccctaaaagcaacaagatgggagaaaacattaactcaatcattatcacttaagcttgccttactttttactgtctctgttatgatattttcagttacttaatatgactgtgttgaagatggtttagaaatctatgtgagattaagtacaagatactaagtggataagaaagcacatttacatatttttgcttactattacattgtaaaatatttttattttgatcctactataagagctgagggaaaggcagaatagcctgattattgctggagaatttctctgttccctaccatgattccagaagctcttgcacacttcatcagtattattgtaattctttggctgcaggatatttggcagctgttgcaccccactggcaaatcctattcatacttctttcccattcaccattgccattggagaattgatttctctctcctctactctaacctttcccaattcattttggattgttcaatgtgaaacattttaatttcatatcatacagctattcagcttacaatcccttttttaacctgtcaccagggtaacagcatagcatgctttctttaggcaatcaagtttttatttcacatgcttaatgttgcattaaatgtttgcattttgtttaacccccttaaatagtttgaactctggatatgttttatagggtaatgaaatccttgatttttgaattgaaactaaatcaacaccatcagtgcatttataataaaatgtcaaaagattaatttccataatacaaagattattattaaaaacgcaagttagctgatctgtgtaaggcaattttctgtaggtaatggaggaatatttgtatatattatatttgtgttcagccttgttccaaaaaaagatttaaaagtggtttagagattgtcagtgagataagtaaaaaacttaaaaaaggaatagatttggtgcaaatgggaaaatatatcttttgaacccattatttgatttttcagtataatgcttttttctctgttcgtatatatgaagatttgattacttgatttttcagtataatgcttttttctctgtttgtatatatgaagatgtgattacttgatttttcagtataatgcttttttctatatttgtatatatgaagaccataatgatttatgcatgtggagatgggtgaagtaacgagatgtactagaatgagattagacatcttttctaggagaccagtgtgggcattgtgtgctttaatatctcttcatcagtttactttagaactaccttttccttaaaataagtaatttaataataatagattagtgaagataaaaatgcatatgtttagatattgattatttgacttgaattggatagacctcagtttccctttacagaactacctagtcatcttttcagccttatccccaataatatgttcaatgaaatttgttctgtgaataaatcctgtgatatttggaaaatactaagaaatgtgtaagacaaggtagagcagagactagcaaaccatgttgcttggaagcatggttcaaattgtaatgcccggggtaaccactaagaaaataactttaaaaaatagtattagtaaaagaaaagtcaagggaattaaaataagacaatagaaaacgttgatttaaaacaagacaataataaaggaatagagggagaaaaaagatatgacatatagaaagtaaaaagcaaaatggtagatgtaaatcctacctgatgggtaattaattatattaaatgcagatggcttaagcctatcaagagcagatactgacagaatagatttaaaaatatgatcaaaccatatgctttacaagagacacactttagagttaaaggcataaataggtcaattgtaaaaggatggaaaaaagtatcagacagacattgtattcgtaatattattatcagtattttattactaataatgctgatgtcaaacaaaatagccttttttttttttttttgagatagggtcttgctctatcacccagtctggagtgcagtggcatcacaggtcactgcaagtttgaactcctgggctcaggtgattctcctgcctcagcctcctgagtagctggtactagagtgcatgccctaacatttggctatatatatatttttaaatagagatgaggtcttgctatgttacccaggcaagtctcgaactcctgggctcaagtgatcctcccacctcagcctcctgaagtgctgggattataggcatgagtcaacacacccagcctttttttgtattttttttttcttccagagacagggtcttgctctgtcacccaggctagaatacagtggtgtgattatagctcattgctgcctctaattcctgagctcatgtgatccttctgccttagcctcccaaggaactaggactacagatgtactccaccatgcccagctaatttttaaaaatctctttagaggtaggtttttcctatattgcccaggctggtcttgaactcctgacctcaaatgcctggactcaagtaatccttacgcctcagccttccaagtagctgggattacaggcatgagctgccaagacaaaatattgttcaagacaaaattattgctagagacagaggggtattttataatgataaaagggtcaatccatcagaaagctataacaagtataaacatatatgtacctaataacacaattcccaaatatgtgaagcaaaactgagacaaagagagaaataggcaattccacaatacatcactttgaaaaatggatagaacaactagagagaatatcagcaaggaagtaaaagtgtcggacagccctatagaccaaatagatctaacagacatctctagaataatctctccaacaacagcagaatatacctgtctcaagtgcacgtataacattctccaggctagaccatatttaccataccatatactaggccataaaacaagcctcagtaaatttactagaattgaaatcatccaaagtatgtttctgacaaattaaatgaaattagaaagcaacaaggaaaatttgggaagttcatacatatgtggaattaagcaatgtactaccaaataaccaatagatttacaaaattacagaggaaactagaaaatattttgtggttaatataaacatcacaacatctaaaaacgtgtgggctgcacataagcagtgcttagagggaaatgagagctgtaagcacatgtattaaaaaaagaagaggccaggcaaagtggcttacatttgtaatcctagcactttgggaggctgagacgagcagattgtttgagcccactagttcgagaccagcctgggcaacatggtgaaaccctatctctataaaaaatacaagaatatgctgcgcatggtggcacgtgcctatagtccttgctacttgggaggctgaggttggggaattgtttgagcccgggaggcggaagttgcagtgagccaagatcgtactactgtactcctgcctgggtggcaaagtgagaccctatctcaaaataaaagaagaaataaagctgggtgtgggtttggtggctaacgcctgtaatcccaattctttgggagattgagactggaggatcacttcagcctagaagtttgagaccccatctctacaaataataataataataataataataataataataataataataataaaataattcgctgggtgtggtggcacacacttgtaatcccagctactaagaaggctgaggtgggaggatcggttgagcccaggaagtcagggctgtagcagtgagccaagatcatgccactgcactccagcctggctgacagagtgagaccctgttgaaagaaagaaggagagagagagagagagaaagaaagggagaaagaaagaaagagagggggcggtgggaggagggagggagggagggagggaaggaaggcagtcaggcaggcagggaagggagggagggagggagagaaggaaaggaaggatcaattaccttatcttccacttcaggaaacatggaaaaatagagcaaacaaaagcagagggaataaaatactgaaaactagagtacaaataaatgaaatagatactagaaagcaatagaggaaatcaataaaagcaaaatgtgtttgttggaaagatcacagaaatgacaaacctgtagataggctgaccaaaagaaaaaaaactgaaattgtaaaatcatgaataatagggggtatgcctactgaccttacagaaattaaaatggtcataagggaatattgtgaacaattgtttaccaataaacaagataacttagataaaatggagaaattcatagaaagatacagactgccaacactttctcaagagaaagtaggaaatccgaatagacttatcataagtaaagagatggaactaatcgttgcaaaacttcttagaaagaactcaggaccagatgacttcattggttaaaaaagttaaaggaaaattacttaatactaatcctcacaaactcttccaaaatcccaatttacaagaccaatatcatcatgattccaaaaccagataaagtcattgcaagacaaaaactaaaggctgatatccttcttaagtattaatgcaaaaattcccaaccaaatagtggcaaactgaatccaagaatatatacagtgatatacatcataaccaaatgaggtttctcctagagatacaaagttggtttaacatacaaaagtcaatcgatgtgatacatcatattaatagaataagagaaaaaaaccacaggattatctcaaatgcaaaaaaaaaatctgacaaaatccaacagcttttcattatgaaaaacactcagcctactcggaatagaaggcaacttcctcagactgatgaggagcatgtgtaataaacccacacctgaaaataagggcatctagattggagagaagtcaacttacctctttttgcagatgacatgattttagatgtagaaaatcttgaggaattgacaaacaaatctgttagaactaatgagtcctggaaggatacaggatacaagaatgatatgcaaatatcaatttttgtttttatacagtggcattgtacaagccaaaaatgaaattaacaaaacaactctatatagcaccaaaaaatatacaatacttaaatgtaaattttaaacaagaaatgcaatacttgaacactgaaaactataaaatgttgttgaaataaagatgacctaaatgaaaaacaccctatgttttgaatcagaagacctaatattgatcaccaaactgatctacagattcagcacaatccttactagaatcccagctgcattatttttggaaaaatagacatctgattccaaaattcatatgaaaatgcttttgcattgtaaaagaggaatgaagttcagaggctcctacttcccgatttcaaaacactacaaagctacaataatcaagacaaagtggtactggcgtaagcatagacatgttgatcaatggaatagaatcgagactccagaaataaattgttatatttacagtcaattgagttcagtaaggataggaagaaaattgaatgagttaagattaatcttttcagtaaattctgcttgggcaattggatatgcacatgtaaaagaatgaagttggtctccttcctcacaccatacataaaaatgaactttaagaatcatagacctaaatgtaacagtgcatacaacaaaattcttagagaaaaacataggagttaatctttgttacgtttggttaggtaataatttcttacataagatgtcaaaagtacacgcagcaaaagaaaaattagataaattggacttcagaatttaaaacttgtgctttaaaggacatgatgaagaaagtgaaaagacatccctcaaaatgggagacaatatttgcaaatcatatatatttaatagtcttttgtctagtatagggaattcttacaacttaataataggacaaatgatccagttaaaagataggcaaaggacatgaataaaaatttttcaaaaaagatatagaaatggccaataagcccataaaagatgctctgtatcattagttgataggaaaatgtaagtcataaccacaatgagataccacttcacacccatgaagtggtgaagatgtggaaacatgggaaccattacatgttcctggtgggaatttatgactacagtgatatgaacttgggaataatttgacagattcttaaaatattagacgattaccacatgacctagctattccacttcctggtatatacccaagggaaatgaaaccatgtgtgcacagaaatgttgtatacaaatgtttatagtggcatttttcataatagccagtggaaacaaccctaatgtccttcaaatgatgaatgagtatataatagtaaataaaatgtgatacgttcatagaatggattatttttcagcaataaaaataaatgagctattgatattttctgcaacatggatgaattttgcaaaaatgctagatgaaataattcagtcaaagtagatcacaaattttcccagaataagcaaagctatagaaatcgaaagtacataacagttgcttagggctgaggaggggaatgtagagtaactgctctcgtatctaatgtttcccttatgaggcaatgaaaacgttttaaagttgcttgtggggatggttgcataactctgtgactatactaaaaaccattaacttgtacacttcagatgggttaaatgtatgatatgtgaatttcatctcaaactgtttaaatgtatatagtctgttacacattttatatttaagaatttgttttcctaatggtataatagatgttcaaattttaggaattaaatgaggcatttcttccttctagtttgatggagtctttgagaatatttcttttcaaattgtaaaatatgtttctatgtctgctctcaatttagtgcaagagtagctcttgggggtagcaatatcaagtgttcctgggctaccacctggaaggtggaagtagtagatgtatgtgaacccgcgttcttccatcttttctttcctcttctgccttgaaatgcaagtgacataaaattaaaacaacacggaaaagtttcagttcctacaatggcagtgtagtgtattttcaatgaattcctttccagataaataattataaactctggacaaaatataaagcacaactatttgaaggctgtcgatgtacaaccaaatacgacccctaaaagaagaaaactacaccagtgagatgcacatttatgtggcttttcctctgaaagcagtcactattgcatgcattaaggcatggctgtaactcagttattggttttaggtctcagagaatgatgttcagtgttgtcagaactgctggaaattaagcagggatatcatggcagaaagggagcaacagagtgaagagttccatatgtgaattcaggttctctcaaattgttggttgaccctggaaatgtgcgtaacaaagaccccagggatcccagaagatcccagaactgctggaatgctgaatgaactgagctaaaatttcagttgcctaccatggttatgataatgttggaatctgaatctcatcaatttgaggtacttgtaaacaccttgagctttccattaaaaccctggaaggaccatgccttgggagaaaagactgtttctggaataaatggtttggactttttatttattgagagcaaaaccaaatagttcctagtacaacataaaagtgagcctccacaacttcaggactggtaactagcaatgtaactgcctgctgtaataaaaatcagtacttttcagagggagataacatgatgagtgaagtctgacaacatctccacaatacagtttacttggcatgcaatctaagaataaagacaactataatccagaggaaaagcagtcaacagaaatcaaccgtgagattactaaaatgtttgtttcatgggcaagagctttaaagtagctattaaaatcattttcaagtattaaagatgaaaatgagggaaaaatgggaactatcagcatagaaatggaaattaaaacacactactaagtggaaattccatatctaaaatgtcctatatctgcaatggataatttgctggataggctgaaaagcatactggtgatggcagaagaaggaataggtaaccttgaagatagaagaatagagattatgcaatctgaaaaaagagaaagaaaaatgtgtttaaaaaattgaagagacacaaaaggacaaaggaaacttttggaggtaaaacatgtttattaccttgattgtggtgataatgtaatgaccgtatgcatatgtccaaactaatcaacttgtgtgcattaaacatgctgttttttaaaatgtcaaatacacctcactaaaggtgtttagccgaggtgggcagatcacctgaggtcaggagtttgagaccagcctggccaacatggtgaaaccctgtctctactaaaaatacaaaaaattagccaggtgtggtggtgcacgcctgtaatcccagctactagggaggctgaggcaggagaatcacttgaacctgggagctggaggagcttgcagtgagctgagatcgtgccactgcactccagcctgggcaacagagcaagactcctcaaaaaaaaaaaaaaagaaaaagaaaagaaaaaagctgtttaaaaaaaaatggaagacagcctcggtgacttgtgggcactataagttatcaggaagcatgtattaggaaggacaaaaagaaaggcaagagagtgaagaaacttcagaaaaaatatttaatgttgtcttcttaagattgggaacaagacaaagttgtctgtttttatcgtgtttatacagtattatcctggagatcctagccagtgcagttggaaagaaaagaataaaaggcatagaaatcagaaaggaagaagtaaagtcatttctatttacagaggtcataattgtttgcatagaaagccttataagaatctataaaacaattgctggaactaacaaatttagcaagattacaggataaaaaggcaatcaaatgcaagttgtatttgaataaactagcaacaatgggaaagtgaaaattaaagttccacttaacatagcataaaaataggcaaagcagacaccgtcactagttagagtatgaaggcatgcaagaaataacggagcctaatgattgcaaaggaagctttccacaccttaattggttacctaagaaaactctaaggagtctgccatacaatgaataaaactaaggcaaaaataggcataaagttaacaaaagagattcatgactaccacactttatgaaataaattaaaaatcagaagaagtaagagttatatcctgctcatggactggaagagaaaatattaagatgtcacttctctctacagtaatacagattcaatgcaggcccgatagtaattctattgggattgtatctcagggaggatgtggaagaaattggcacattgattttgaaatttctatggaaatgcaaagggacttgtattagtccattttcaccctgctgataaagacatacctgagactggacagtttacaaaagaaagaggtttaattgaacttacagttccacatggctgaggaggcctcagaatcatggacgaggaggggcaagtcacatcttaagtggatggcagcaggcaaaaagagttttgtgcagggaaaccccccccttttttttttctttaaccatcagatctcgtgagactccttcactatcatgagaacagcataggaaagacctgcccccatattcagtcacctcttactgcatccctcccataacacgtgggaattcaagatgagatttaggtggggacacagccaaaccatatcagacctagaatagctaataggaacaaagttgcagtacttggtctacaaattttcctgaaatgggctcacccctgtctcctaccacacaggaaagttagagatgcatcatagacagatctacatgtaaaacatctaaaacatgtgagtatatcttctgaaactttgtatgtaggcaaaaaacttcttagcaaggacacaaagcactaaacataaaaggaaaaattagtgagttagattttgttaatattaaaaacttccattaaaactgtaaaaagataccactacatacctattagaatgtctaaaatccagaacaccgaacaccacgtgctgctgaggatgtggagcgacaggagctctcatgcattgctggtgggagtgcaaaatggtaagccactttagaagacagtttggcagtttcttacacagcataaccttaccatataatcaaggagttgtgctccttggtatttaccaaaatgagctggaaacataggcacacactaaaacctgcacgtgaatgcttacagcagttttattcataattgccaaaactgagaagcaatgtccttcagtaggcgagtggataaactggtatgtccgtacaatggaatattatttagcaataaaaagaaatgagctactaaggcatgaaaagacagtggaaacaaatacatattggtatggggaaaaagctaatctgaaaaggcagcattctgtatgattccagcgctaagtgacattctgaaaaaggcaaacctatggagatggtagagatcagtgattgccaagcattcgggggagggaggggaaataaataggtggaacaggggacttgtaggcagtgaagctactctgtatcatactgtaattctggacacatttcattagatatttgtcaaaacccacagaatgtataacacagtgaaccttaatgtatggacttcagttaacagtaacattgatattggcttatcaattgtaacaaatacaccatacaaatgcaagatgttcataatagaggaattcatgtgggggaggatgtatgggaaattgaaattctgttgagtttttgtcaacctaaaactgctttaaaaaataatgtctttttttttttttttaaatctgctgaaggaaagacattgttaagaaaattcataagcaaaccacagaagagaatacttgcaatacataaatctgacaaaggccttgtatccaaaataaagaactttcacaaatcaataaaaataaggccaatgacctaataaaaatgggcaaaaacttgaatataaatggccactgagcaccataaggtcctcagcattactagtcatgggggaaatatacatgaaactatgataagatgcggtttcccagcctctagcctggctagaattagaaagactgacaatgccaaatggtggcaaggatgtagagtaactcattgcagtggaaacatggaaatgttgtaatcttttggaaaacaatttagcaactcatataaaattaaacctacatttagcctacgacctctactccctagattttttaccccccaagaaatgaagacatacctctttaaggggggaaaaagcaatcaagtacaaagaatatctacagtggctttgtttataacagccccaaactggaaaccaccaaaaatgtccatccacagaaggatgaacttattttggtgtgttggtacagtaaaatacttctcagcaagaaaaaaaggatgaactattcaacaacatggatggatgcacctcaaaaacattatattggtcaaaaaagccacagttttttttggagtctgttcttgtgaagctcagaacaggcaagcataatctctggttgactgttagtggcaggcagagccaagcgactggaagggtgaatgacagaacttaagatcttggaatttgactgtatgttagttgtatgcgagtaaaatttaaaaaaaaataacagttgctgaaacaaaagagagggatttcagatatttctgcacccaattatggtaacaataataactaatttagcatttatgtgccaaacactactctaagcattttacaccttttatctcatgtaagcagcatatgggttaggcattcttattatctttgtcttgctgatgaggaaactgaggcacaaggaggctaagtaagttgtggatggaggtcacacagcttttgtaggtctgcacttggtcagtgagacatggggtctgctggggtgacagctgtgccacagtgcctttcctggctaatcatgcccagtgtctaaattgagaaccttaagcccttatcggtggaagaaggaaagggagtatgcataatatttaaatatatgagattatgagtaacattacgtattctatcctagattcagatgtcatttgtgtaattatttgtaatgctaataacaccaaacttgggggtgttccctgtttctcagcatgattatgtgatacagactcttccacacagtctcatgtatttgaacatacacattttcaattgcatgtaggcagaattctaatcctcctctatgccaattcctagctttgaagaggttctctgaaaatgctgcttttatctttcttctgcagtgatgaactttaatgttggagtgttgtaagttctcacataataaggctcagatttttgtttggtttggcagtagacttctgtttaaaattcctttaatctgttcattctatgctttttatattcattttaataactgatggctctgtaaagaattttttttgaatttattgcactagttaaaaaactactaaaacttgtacttaactattcctccatctcaacgttctaaaagtgagttttccagtgaattgctgaatttttatcttccctgggagttgttcctccccttccccaaccctggggaaataagaaacaattcatatactagatctaaagtttcattaaaattgcttatgccctgtctcaggcattttaagtgggccatctgtctaaacatctctctctccttttttttttctgatcatttcctcgacttattcatgagccatgggagggctcctttgtagtctccatgtagctggttctgtctacccccactgaatacatctatgtgcttgcataacatatcttttcaccgtgctggaaattctctgaacttggttcagatgaatggcccactttctgaaggcctttttcttcctgcaaagatttgtatgcagaaactgacctcagtggccatggaatgcagcatattattctcgatcattttacagcccacccactgtgaaagttatgatgaagcatttcttaatgattccttgaccattagcattgttttaactcagtattttacttctaaagaggtgatggcacaacaaaaaccagcttttttgagtgtctgataattatggtttaaaatgcttataatcctttctaactgaagatgctgagagtttttatgtttatacagtcttcttttagcaaatgacttgtaatagcaaagtatttactcaaaagcacccttttgagtaaaatattccagtaagttaaatgtattagtattaatagtgactatcagctgacagttcttcaccatcaaatataaaaaatttagttatgtcgagcatattcatcctggctggctgatgataaagtggacagacctgggttagagctattattttatttgctttgtgagtcactgtttatgtgagttcttttttactggggtttttggtttttgtttgtttgttgaagaaataacttaattggtatcagctttgcaggtgactaataagttgcacagattaaatttttggtcagatgacagcatctttcactagaaatgtacttcgttaaaggaaactgtatcattactatggtgagttgaagttctaagaccttttccttattgtcagagagttgttcataaaaatcttctttgagactattttgaatttaatggatctgtgtaattcttttctaaacatttagcacataattgtaggtaattgttactatcataaatctgtctgtgctggttaaattaataagaatgtttcaaagtaagtattataaatgtattttcagtgattttgcagaaatagagcatgcattctttcaggtttgtattttttaaaatttatagcttatttctattgcagagcatatttatatctgccagttaactggcatatatgcccaacccatccattttatttaaaaacccaaacaaaactagtttcaaacttatgtcaagccagaaggaatctttgcaaattttgtttgtagaagagtgaacttacaaatagatttcacagtttcgactctgttttggtatttagaggtcttgcacagtgaagcctttttcctatatcctgttaacatatcaccctgaaagaaattgttagaaaaaggctgggtactgtgactcacacctgtaatcccatactttgggaggacaaagcaggaggatcccttgaggccaggaattcaagaccagtctgggcgtcatagcgagatccaccccatctcttaaaaaaaaagccagacctggtggtggcgcacacctgtaatcccagccactcaggaggctgatgcagaaggatcatttgagcccaggagttccagactgcagtgagctatgattgggccactgcactccagccattgtgacacagtgagatcatgtttcttaaaagaaaaggaaaaaattgttagaaaagtgccactgcaggagttaagtttgtagaagaagcagtagcttcctatcacttgcctaactctgatacacttttacaggtgtagaaatattggttcaaacagattgaataagttctcaggtacattgctagtagaacaggctgagatttagacctggatgttttaactcgaaaccctgtactctttccataaggcccctcctgggacaaattataatatatatgaaacagatgtgaatcaaaataaaacaatggaaaaataaatagtacttaggttttggagagtggcaactgtatctcatcaccatctataaggtccctttctgtgggaaaatgggttctgggttggaacaggatgtcaggatcagcaatgttccaatgcctctggaagcagagacttgttacgtgatagaagaaattctcaatccctactccatcaggctgctacagtttgaaaaatattacagcatatgacatagattaaatggaagaaagatctcttgagtttatgctataattaaggaacaatttgtgagggaggcaatattttccttgaaggatctgttagtgtgagaagcagagagatgagatgagaatccaaagtttctataaagaaagaggtttcagttataggggaaagtaagaatataggccgagagccgggacaactactcataataaaagctatagcatgtatacacctaatttaatcaacacctccctatcaatgcagatattgttacaatcttttatacatacataaggaaactgagacagacagtttgctccgggttttgtgtcagcttctgtgactcatcaaggcctgagttcaaaaccactgtcttgctctctgcctcatggtagcttggtttaagagtctgtcctaaccaaatagacaaatcagagaataagcagaaataaaattgaatgcaaaaggtgggttcttacttttaaggcattgaatggtagttaggttaataaagatgtaacttggtgtggggtagaaaacgatcaaatgatcatgagcaagatagtgacataattcttgaggaaagcacagattcaagaaagccaagttgcacggtcatctagatgtgaggctgtttctgcaatcacaatacccctgtgaaattggagtattgaccccattcgaagtgagcaaaatgaagtcttagtgagatgataggcgtagtccagggacacccagggagtatccaggagcttggggcacacagtcctgtcacacctgtgctcttgctctcctgggcaagtcagcctccccttctacacgtgcttggtgcatagtagacactcctcacagtcttttctacttatccctcatctctttgtctccatcctgtgccaggagctggagatacaaaaataaggaatgattttggtcttttaggagcccacaggacactgggagacaaacatataaacaaataaatgccctgtagaataaaggtgctaagaaaaaaaagaggaatactggcacagaagccctttcttcccttcttcctttctgctcagacctccttttctttccctctcctcctcccctccccactgtgtgttgtctccctcaactcccctgcacccccattcattcatactcttctgtgtgaggctctatcccctgaaacagttcttttcacactgccagaaagaatcgtcaaggcctgtgtgtacagtgtgcattattgttgatgcattttttttttacttttatttttacttccatggtatttaaaacatatccttatcttcagaataatgcagatcaagaagtggtaggtcaaatacaaatatgtatttaaattaataatattaatcagatattgaatctagaggtgattggattagaagcatagtttttgtgactctgatttttttaatgctgaatacacagagacttcttttgaaaatttggtgggtttaaatgaaaacataacttggaacattttttcagaactgtggtttaagctggagcccagatactacaaaatgctgatgtttagtacttggtaaatattacttcacaagtataaatatgcaatacctaaattaggttaattctgaaatcattaaattttgttactttaaaaagtcgtgggaaacatttatattctaaaaacacttttgtctttggctgcttgatacggattttctgaaccatgtaatactgataatatgcaagaaaagacccgtatgataagactaacattgttcatagatatggagtcctttctggggggttttaggtgatggggaaaaccagggctagaaaagaaataatgtgtaagtttccaagatgaggactgtgttttatttctctgtggtgccccacaatttagagccaagtgcttagtgtttgttgaactcataagtcatttagggttttgtgtgtgtgtgtgtgtgtgaatgtgctttattttagcaaaatttagatgttgtcctattatataataacataataagtgggtatctgagtaatgtttaaattcgttttttaaatttcgtgaatttttagtaataacattataaaataagtatagttttttttttgtttttttttttttgcaaaaaataattatatcggccaggcgcggtggctcatgcctgtaatcccagcactttgggaagccgaggcgggtggatcatgaggtcaggagttcaagaccagcctgaccaaaatagtgaaaccccatctctactaaaaatactaaaaattagccgcgtgtggtggtgggcgcctgtaatcccagcctctcgggaggctgaggcagaagaatcacttgaacccaggaggcagaggttgcagtgagccgaaatcgcaccattgcactccagcccgggcgacagtgcaagattccgtctcaaaaataataataataattaaaaaaaattatatcctagctaatgtactaagatatttctcttctaattgacatcatgaagaaacattctataagtagaataatgtagagaggttcattgtttaatacatttttagtctcatcaccagtaaagaacaaaatgattctctaggccacatcatgctaactcagtaattcattttatgtctctgaagtttaaggcatggcatacttacttatttcattgtaatttttttttaaaaaaaccattttgaatagtaaccaaatattgaaaaaaactaatactgcttcaggcagatgaatttgtgaatgactgtaacaattaggcaattcaaattcatagatacatgatgattcttagagtaggtgtttaaaatgttcgcaaatacattcaatggcagttttagcctgtgcattttatatcaaagggaaattagtttattgagaaataataatataaaattattaactctttttcttttcattctacttcagaatgcctgttattaaaccagacatagccaactgggagctctcagtaaaattgcatgataaagttcataccgtagtagcatcaaacaatgggtcagtgttctcggtgagttttctttctttattttcttggtaatcttgatgttatctatgaatatttaaagccatttttaacctgttcagtgactctcgtcttttgaatttgtagtacctctatgtatttttcatcttctttaggaagctgaatggaaatggaaatttttgttctcttatgcttattaggaaatacatttctagatttagccacatcctaaactcactttctgatacttgattcatttttcttttatgctgtgagaagtaatacttttgcctttgttacagagaagagcattttgaattacagttccaaatgtatgatagtggtggtaggtaaccatccttttaaaacaaataatctgaagcctcacataacattatctttaaatctcatgctgcaagacactcttgaggctaaatttaccttgtggtgacactctttttgttttgaagaacttaaaccccttggatatagggtccaagatagaactgccacagttggaattctagtctatagtgaacaagattacagtaagatttcagtgtttatactgtagtatgagtgatatgtttaaaactgtgatccgagtgtgccagaaaaataccattaagagttgctgttttaagtcgtatgccttcgtgttttcagcctgaactcaaggaggttgctattaatatatagttagtataatgaatattctgtttatctacatttctcttcttacggctaaattgcattgaaatgtcattttgttttggggaaacaagtgaatttttatcagaatattgaaataggatatgaacatcaaaacaatataatttcacacaaataagacctggtgtggcttgagaggggtacggcagtttcttgatctcagtgagaaaatatcacaagttgaagattcatgagaattcattcattccacaaataattgttgcatgcctactgtgcaccagatcagttccaagctgttgccctggagaagctgacattcttgtgtggtgtcagactcacagatcaatgatgtcagtccatgaactaagggtagtctccttggttttctttaaatgttgtgattcactgtatacgccaaaattgctgaaacgttagatactgaaagatacttcactcagctctcttaaaatgaaagctatgatggagttaaacagctgtctcatgagatcttgtgtgactctctacattccacctattgacatggtcatttcagaaaaacagctttgtaagtgcacatttaaccagagatcaggttgagtagcaaattataggaattgaatagtaaagagtatcaatattacaatgtagcatttttttttctgggggaagattaactttacaaaaatgtagagtttagcataattttcagttctatattgagtcaccactgaagccttactgtaatctgatattctgatacaatgttcttttaagtagtgccttaccttaataaagaaaactgtctagattacttttcagagctgttacttctttttttttttttttttttttttttgagacagagtcttgctctgtcgcccagaggctggagtgcagtggcatgatctcggctcactgcagcctcttcctcccaggttcaagtgatttctcctgcctcagcctcccgagtagctgggactacaggtgcatgccaccacacccaactaatttttgtatttttagtagagatggggtttcaccatgttggccaggctggtctcgaacacctgagctcaagtgatcctcctgtctcagcctcccaaagtgctgggatcacaggcgagcgttgcttctttatgtttgttttagattccatgttgaaaagtagagacctctggcctgactgcatacgtggtatctttcaaatttttttctgtagaattatctccagcttcactttttagcttatgaggaaaacagggctgtttttaaaacacatcaaaattagtgcattaaaaacttccctggaaaatatccaccttagtatataatatcagaaatgatttcctatatttattggcttagctactgtcagagcatcaatagcccaatgaaaggcatgtgcacatgatagtgtagccctttttcctaggcatatttaaatttagctactttcatttgacatcagtattatgaaaggaggcaggttgaacagcgtggcgaagtaaaggctcattggtagaaatatttcaatagtatggcactattgtctgcttttagggtcatagacgggagaactgtgattgttaacttagtttcccagatcacccactgtcacatcaagaaaaaaattagcctacaggtgacaagccaggtctgggttaatgactctggagatagtgcaggcaaaggctttactgagcacacagtaaagctttaggtgccctacatttccagagttcttctgtttaatttttaggagtttaaattataagatatttctaataaggaaagtacagcagatgttgcagattttccatacaggtctcctatttaaaaagaaaaatatatagattaaactaagtcctttctttacatcatcctgttccactttctcccaagtggtggcagctaacctgatgatgctgtgtgtcctttctgtatgtgttgttaagacttttggtacagatgtatacaccacaataatggtaaaaaggaaagttgcaacaatatacatacttaatggcaccatttatgtaaattttaggcaaagcaatttcatttacaatagaatgaaaaggactaaaatacttaggaatatatttgaccaaggaggcgaaaggcttacacactgaaaactataaaatgttgctgaaagagcttaaaaaagacacaaatatatggaagggtatcttgtgtcagggactagaagacttaatatggttaaaatatcagtacctctcagctacttggaaggctgagacagtaggttcacttgagcccaggagtttgtgcccagcctgggcaacacagcaagactccatctctggtgaacaaaagaaaaatgaaagaaggaaatgtcagtactacctgaagtgatctacagatacaacgccatccctatcagaacccccaaatacattttgttgcagatatagacaaatttattctgaaattcatgcaatttcaagggggtcccaaatagtcaaaacaatcctgaaatagaagaagaaagttgaaagccttatacctcctcatctcaaaacttattacaaaaccacagttttcaaaacagtgtggtactgcacatatatagaccaatggactaggatagagagcccataagtaaacccttgtatgtatggtcaaatggcttttgacaagagtttctaaaatattcagtggagaaaagacagccttttcaacatgaataaatttgggtccttttcttactctgtatacaaaactaaccaaaatggatcaaagacctaaatgtaagagctaatgctataaaattcttagaagaaaacacaggggaaggctgcgcacagtggctcatgcctgtaatctcagcactttgggaggccaaggcaggtggatcacttgagctcaggagttcaagagcagcctgggcaacatggtgaaaccccatctctactaaaaatacaaacattagctgggcttggtggtgcatggcacacacctgtaatcccagctactcaggatgctgaggcaggagaagctcttcaactcagtgggcaaaggttgcagtaagctgagatcgtgccactgcactccattctaggtgacagagtgagaccctgtctcaaaaacaaaacaaaacaaaacaaaacaaaaaaaccagtagataacataggggaaaagcttcaaggtattggatttggcaatggtttcttagacatgacaccaaaagcacaggcacaaaagataaattggactatgtgagagttaaacacttctatatatgaaaggagaatattttcccagaattttcatccctcctttaaaattttccattctaaacactataaatatataaatgtttcatgcaaatattttctcccattctgtgggttgccttcttactctgtttttttcccaaagtaaccactctgtcagagtacaatcaacagagtgagaaggcaacccacagaacgggagaaaatatttacaaatcacatagatgataagagtttgtttgtttgtttgttttttgagacagtctcgctctgtcacccaggctaaagtgcagtggcacaatcttggctcactgtagcctctgcctcccaggttcaagtgattcttctgcctcagcctcccaagtagctgggattacaggtgcatgccaccacacttggctaatttttttttgtatttttagtagagatggtgtttcaccatgttggccaggctggtctcgaactcctgacttcaggtgatccacccacttcggcctcccaaagtgctgggattacgggtgtgagtcaccacgcccagccctcccgataagagtttaatatctggaatatataaagaaatttttcaactcaataacaaaaaacaattaaaaatgggcaaaggactttcatagacacctctccaaagaagatatacgcatggccaataagcacatgacaagatgctcaatatcactaatcattagagaaatccaaatcaaacctgcagtgagatactacctcccacccgttagaatggctagtatcaaataaacagaaaataagtaccggtgagggtgtggagaagctggaacccttgtgcacagttggtaggaatataaaatgatgtggttactttggaaaaaacagtatgatggtccctcaaaaacttaaaagtagaattacatagtaaccttagaaagttggtaattctgatatgtgctatataacacagatgaatcttgaggacattatgctaggttataagccaggcgcaaaaggacaaatactgtacgattccacttatatgaggtacctggagtagtcagactgatagagacagaaactagattggtggttgccaggggcagagaggaaggggaatgaggagttattgcttcaagaatacaaagtttcactttttaagatgaaaggttttctggaggtagatggtggtgatggtagcaggaaaatgcaaatgtatttaataccactgaactgtacatttaaaaatggttaagatggtaaattttatacgcgttttaccacaagtaaaacatacacaaaacaaatcagtatttataatgaaaaacttaaaaggagggttgtggccaggtgcagtggctcacacctgtaatcccagcactttgggatgctgaggtgggtggatcacctgaggtcaggagttcgagaccagcctggccaacatagtgaaaccccgtctctactaaaaatacaaaaattagccaagtgtggtagcacgcgcctgtaatcccagctacttgagaggctgaggcaggagaatcacttgaacacaggagatggaggttgcagtgagctgagatcacgccactgcactctagcctgggtgacagagtgagactctctctcaaaaataaataaataaataaataaaataaaaaaggaggtatgaaaattctgggaaatgaatgcatggtaaaaatgaaagttaagtgaagtgttaatcgtaggagaagtgaagtattttatgtattttaggtctttattctgatttctgaatacagctgtctgaatgaatgacagaattaattaatagtataaaacctgctagacacaaagtagaaatattattcagcttgtcatggtgataagccgaaaagtacccaataacaaactgatttttattataattattttcatgattcccttctggattcccaggatgttttccatttctgtcttgctcaatataacacaaaactggtcaaaatagtttttggccaggtacagtggtgcgcacctatagtccatccactcaggagaaaataagtttatgatgaattaaaatattaacacagttaatatcttaaagatggtgaaaaactaaattcatattgaatgtgattcacttgaaagaaagagttgaaagaagagtgtcagagtagtcctaatgtataagaaaattagttagaaatttggccttcctagcgatggaaaaaggagcactatacatgcactttttgaaaaattttgcctgatgtttcatgtttactactaataaactagaaagcaattgtatatgatcctgtatattgaattgttacagtgggccaatgatagaaaattttgtaaggacctaagggtttttcgtgtctctgtctccttcagttcggctctgatcttagttatttcttgtcttctgctaggttttgaatttgtttgctcttgcttctctagttcttttaattgtgatgttagggtgtcgattttagatctttcctcctttctcctgtgggcatttagtgctataaatttccctttaaacactactttagctgtatcccagagattctggtacattgtgtctttgttctcattggtttcaaagaacttatttatttgtgccttaattttgttatttacccagtagtcattcaggagcaggttgttcagtttccatgtagttgtgcggtttcgaatgagtttcttaatcctgagttctaatttgattgcattgtggtctgagagactgtttgttacgatttccattcttttgcatttgctgaggagtgttttacttccaattaggtggtcaatttttgaataagttccatgtggtgctgagaagaatgtatattctgttgatttggggtgtagagttctgtagatgtctgttaggtctgcttggtccagagttgagttcaagtcctgaatatccttgttaattttctgtctcattgatctaatattgacagtggggttgttaaaatctcccactattattgtatgggagtctaagtctctttttaggtctctaagaacttgctttatgaatctgtgtgctcctgtattgggttcatatatatttaggatagttagcccttcttgttgcattgatccctttactaccaggcctgccttacaagagctcctgaaggaagcactaaatatggaaaggaaaaaccagtaccagccactgcaaaaacataccaaattgtaaagtccatcaacactatgaagaaactgcatcaactaatgggcaaaataaccagctagcattataatgacaggatcaaattcacacataacaatattaaccttaaatgtaaacgggctaaatgccccaattaaaagacacagactggcaaattggatagagtgaagagccaacagtgtgctgtattcaggagacccatctcacatgcaaagacacacataggctaaaaataaagggatggaggaagatgcactggtttttcctcatctttatggatttatctaccttttgtctttgatgttggtgaccttcggatggggtttttgtgtggacctcctttttattgatgttgatgctgatgctgttcctttctgtttgttagttttccttctaacagtcaggcccctctgctgtaggtctgctggagtttgctggaggtccactccagatcctgtttgactgggtatcactagcagaggctgcagaacagcaaagattgctgcctgttccttcctctgaaagcttcgtcccagaggggcacctgccagatgccagctggagctctcctgtgtgatgtgtctgtcaatccctgcgggggggtgtctcccagtcaggaggcattggggtaagggacccacttgaggaggcagtctgtccgttaacagagctggagtgctgtgctaggagatctgctgctctcttcagagccagcaggcaggaacgcttaagtctgctgaagctgcgcccacagctgccccttcccccaggtactctgtcccagggagataggagttttatctagaagcccctgagtggggctgctgcctttctttcagagatgccttgcctagagaggaggaatctagagagacagtctggcgacagcggctttaccaagctgccatggctttgtttattctctgaggggaaaaccacctactcaagcctcaataatggtggatgaccctccctgccaggttgacttcagactgctgtgctggcagtgagaatttcaagccagtggatcttagcttgctgggctccgtggggctgggatccgctgagcaagaccacttggctccttggcttcagccccgtttccaggggagtgaatggttctgtttcgctggtgttccaggcaccactggggtatgaaaaaaaactcctgcagctagcttggtgtctgcccaaacagccgcccagttttgtgcttgaaacccagggccctggtggtgtaggcttccaagggaatcttctggtctgcggggttgtgaagaccgtgggaaacgcttagtatctgggctgaatagcactgcccctccctcatggcacagtccttcacggcttcccttggctaggggagggagttccctgaccccttgtgctgcccgggtgaggcaatgccccaccatgctttagcttgccctttgtgggctgcacccactgtctaaccagtcccagtgagatgagccgggtacctcagttggaaatgcagaaatcacccaccttctgtgctgatctcgcggggagctacagaccggagctgttcctgtttggccatcttgccagccacttgagaaaaatgtctttttactgtttttgacttaaagctgttttatgtgataacagtatagctactcctgcttatttttggtttccatttggatggaacaattttttccatccctttactttcagactatttgtgtctttaagggtgaagtgtgtttcttgcaggcagcatatatttgggtcatatgtttattcagtcagccagcctccatctttttattttattttattttatttttttgagacagagtctcgctctgtcacccaggctggagtgcagtggcgtgatctaagctcactgcaagctctacctcccaggttcacgccattctcctgcctcagcctctcgagtagctgggactacaggcgcctgccaccacgcccggctaattttttatatttttagtagagacagggtttcaccgtgttagccaggatggtctcgatctcctgaccttgtgatccacccgcctcagcctcccaaagtgttgggattacaggggtgagccactgcacctggccaccagcttccatcttttaagtggagcatttaatccatttacattcagggttattattgatatatgaggttttgttcctgtcatatcattaattgctttctgtttgttttatatgttccttgttccttcctattttatattgtttatctttgtggttggtgttttccttcagtggcaacattagagtcttttctgttcctcatttgtgtgtttgccttaccagtaggttttatacttgcacgtgttttcatgatggtgtatattgtccttttgcttccaggtttaggactcccttgaacatttcttatagggcggatatggtggtaatgcattccactggtcaaattcggcgtttgcttgtctgggaaagactttatttctccttcattaatgaaggatattattactgggtatagtaccactgagtggcagtgtttttctttcagccctttgaaaatacgattccattctctcctggtatgtgtggtttctgctaagatgtcgactgttagtctgatgggacttcctttatagatgactagatacttttctcttacagtttttaaaactctgtatttggctttagatagtttgactataatgtatcatggaagagatactgttttgcattgaatctggttgaggatttctggaccttctgtatctggatgtctgtatctctcactagacttggggagttttcagttattatgtccttaaatagagtttcaaatcctttcattatttctttgccttttgggatactgataatcttgatttttggttactttattgtgtcccatatatcatgaaagctttctttatgttttaaaattactgaaaaatttttttgtgtgactgcattatttcaaaagacttctcttcatgctttgagattctttcttctgcttgatctagtctgttgaagcttttgaatgcattttgcatttcattcagtgaattcttcattccagaatgtgtctgattcttttttatgatacccatctttttggtaaatttctcatttatatccttaattgtctttctgatttttttgtgttgtttttcagatcactcttgtgtctcactattattagtatcaaaatttttagttatttttctggaatgtgaatttcttttggatgggatctgttgctgcagacttattgtattcctttggaggtatcatattcccttgctttttcatgtttcctgtgtccttacgttgatatttgaacatgtagggtaatattcgcttcttccaattttagaatttgttttcataggggaagactttttcctgaagatgtatccatgctgttggttgggtaggaccctttggctttgattctgggtgcatgtggtagtcactgtatagtgtagtcactgtatgatttctttggctgtaaacagtatcggtggtatctgtgatttctttagtggcttagggtactgttattagtagaggctgtaatgaggttttctggggacaaggatgccacatgggccactctttgggcctaatggtggtagtggtgggctgagtatgtctgtccttgggccccggggttgcatgtgctgacactgatgttagtgggtccaggtgagtaaatttaacaaaagaagtataaaacttgtattgtgaaacaaaccattgaaaaaagaaattaaggaaaatccaaataaatggaaagtttctaatatttgtgaattgaaaaacttaagatggcactgcttgcctgtattagtctgttctcacgctgctaatgaagacatatccaagactgggtagtttataaatgaaacagctttaatgaactcacagttccatatggctggggaggcctcataatcatggcagaagatgaaggaagagcagagggacatcttacatgcagcaggcaggagagcgctcttgcaggggaactcccctttataaaaccatcagacctcctgagacttattcactatcacaggaaccacacggggaagacccacccccgtgattcaatttcctcccactgggtccttcccacacatgtgggaattatgggagctacaattcaagatgcaatttgggtggggacacacccaaatcatgtaattcccaaattagtctaaagatgcaacacaattcctgccgaagtccaagctgtatttttatcagaaattgacaagctgatcctaaaatttggaaaatatggaaacttaagggacccagaatagccaaagtaatctaaacacacacacacacacacacagacacacacgaaaaaacaaaaaaacacgccagtcacattggctcagacctgtaatcccagcactttgggaggccaaggcaggaggatgacttgagcccaagagttcgagaccagcctgagaaatatagtgaggcccccatctctacaaaaaagttttttttagctgatggtggtagcatgtgcctctagtcccagctacctagaaggctggggttggaggatagcttaagcccaggaggtggaggttgcagtgagctctgatcacaccactgcactccagcctgggatacagagcaaaactctgtctcaaaaccaaccaaacaaacaaacccacaaaaatccagaattggataaatcatatttccatctttcagaagttactacaaacagccttgtaatcaaatacagtgtagtacttgcaaaatgattgtcatataaatcaacagaatagaattgagaatccagaaataagcccaaaaatatatggtcaattgatctttgacaaaggtgccaaaataattcaatggtaaaaagaataatctcttcaacaaatggtgtcgaaacacctgggttcacatgtaaaggaatgaagtagaaaccctacctcatattgattagtatacaaaaattaatccaaaatggattgaagacctaaatataagaggcaaaacatctttaaaaatagatgaattgttcaacatcaagattaaaatgtttgcttcaaaggacactaacaggaaattgaagacaaaccagagaatgggaaaaaatatttgcaaatgaaattttcagtaaagcacttgtgtttaaaatacataaagaacacttacaacttaacaataaaaaacagcccactctaaaaataggcaaaagatctgaatagacgtttctccaaagaatatatgcaattgccggtaagcacatatagagatgttctgcatcataaggcatggagggatccagatgcaaatcaaaaccacagtgagattgtcctttgtacccactacatagctctactttaaaaagtcaggtaataacaagtgttggtaggccaggtgcggtggctcacgcctgtaatcccagcactttgggaggctgaggcaggtggatcacgaggtcaggagatggagactgtcttggctaacacagtgaaaccccgtctctactaaaaatacaaaaacaaaattagctggggcatggtgatgggcgcctgtagtcccagctccttgggaggctgaggcaggagaatggcatgaacccgggaggtggagcttgcagtgagccgagatcgccacactgcactccagcctgggcgatagagcgagactccgtctcaaaaaaaaaaaaaaaaaagtgttggcaaagaggtggagaaattgaaaccttcaaatgctattggtgggaacgtaaaagggtgcagctgctttggaaaacaggatggcatttcctcaaatggttaaatatctgggttattcagaaccttggctctgttgtatcaggagtatttaatcttgaatatttatataagtatttatgtatttctttattactatggtgaatatatcttacctttcaaataatattgaagcaagttatttccctgacccctttgcgggaccgctttgccacggggtgcctcctttaatcagcctatagctctcaactccttgtgggagggagcacacgagcgaaggaggcgggaactgtagtgcaggagcactggaactgaccagccgttttggcgccagtgggatcaaactccactcatttgcacctgttgccttccacacctcgtaggagggagtgcacaggtgagtgggtgcaggaaccagagcaagtgcttttgggcgccagcaggagcgaactctgtgcaggccccatggcagcatccaggaggggtgcctgtgactcccaaagccccagagggcatgttacagtgctcttttagctctgctctccacaggcggcttaagtgttaacagctcagttggcctgctgctgccctccaccagcgagggcaaagggccagcgtaacaaccttttgtatccacacacatggctcctgaactcttgtctggtgtccaggaaaaatgaggtcacacgaactaattgaaggatggtaaatgcaggaatgattttattgccgatgaaagtggctctcagtgggaagagaggggagctgaaaaggggacagaggaggggtaggtgatcttcccctgaagtccggctggattttctccggttactccatcaagctgtccctctgaagtcaagtcccttctctccaacattcagctgcttctcctctctgctgattgagtctggggtctttataggcacaggatgaggtggggtggggccatgggtagtttaggaaaaggcaacatttgagctggaaaacagggagagaagttctcactttgggccacggtctcaggcttttcagcttgagggtggaacttcaccagggacccacacctgtctgcctagaatttctctgcctcctgtctctatcattgtatcaatatcaaacaatagttgttggcctacatgtcagtaatttaaagatgaattaaatggttatatatgataacatttatcagagacctttagaaacattcatattctttggtctactatttttacttctagaacatattccaagcaagcaatgaaaaatcgctaattcaacatataatattttgtcagggaaaaaataaattaaaggcagttgggcttggagatatccatgtaaacaatctgtacttataagggaaggcagagttggaagtaattaaaataatgtaataaatgcattaatagaggtgtcatcaaccagttaaatctatgagaaagaaagaaaggcactcaactgcttgggggaagggaaggatctgggggaagatgaaagaagttcctcttgggggagatgactgatgagtcacagcttagaacatattttttagtatatataagccagaacttgcctcaaaattattgtataaataaatgaggaaaaacattagaatgtggtagcatgggggagagcacctcagtcccccaagtagctgagactacaggggcatgctaccatgtctggctaatttttatattttttgtagtgacagggttttcgccatgttgcctaggctggtcttgaactcctgggttcaagccatctgcccaccttggcctctcaaagtgctgggattacaggcatgagccaccgtgcccagcctgtgatttcaagttttatccaagcaatattttttgagagcaatataagatttgagactgggtgcgtggctcacgcctgtaatcccagcacattgagaggctaaggcgggaggatcacttgagcccaggaggtctagaccagccctggcaacaaaaaaaattttatatgattagccggtcatggtgatacacgcctgtagcctcagctactcaggaggcccaagggggaagatgctttgagcctgggagattgaggctgcagtgagccatgattgcaccactgcactctagcctgggtgagagtgaaatcctggaccccgtgtcgaaaaaaaaaaataaagatttgagataggtaagcttttgtgtacaagagagtttgtgctacattttgttttctttataatgtttgttttggttgatgcaaaattgtttcatcttagatgcttgaggtggaaggagggaattgttttgtagtattcatataattgaaattaccaccctatatttttctcctcaaagaaagaatatggtgatgaactaagaatagaaaataataactacatatggatgcataataagaaataattatatacgcattgtttgacgttttccttctctgctataactcaccctttttcctttgttctaccaccatatgttttgttctggatttcttgactaagaaaacattccaccatagtttattttaatatttaaagagcactttgaaagtttgatttttttttttttttttgagacagagctcactctgttgcccaggcaggagtgcagaggcacaatcttggctcactgcaacttccacctcccaagttcaagttattctcatggctcagcttcccgagtagctgggattacaggcacgtgccaccacgcctggttaatttttgtagtttaagtagagacggggtttcaccctgttggccaggctgatctcgaactcctcacctcaggtgatctgcccgcttcagcctcccaaagttttgggattacaggcgtgaaccactgtgcctggccaaaaattcaattttaagtaaatctgtttaaatgtttttgtgtaacgttttcataaaaatgaaaaattcgatgaacttagaatatgccaagaatcttctgcacaaaataataactttgtgttctcaaatagtaatataaagaatctgtaatgtatcttcattaagaatttatacatgcattttacatcataatctcttttattctatgaatagagcataatactaaattatgaagttactggaatttttataggaacatgataagaatcatgtggttcttttaaagagttaattttggaacatcttttgttcaaaaaatagaacattattatatgtattcttttgcctctattgtcagtttttaggataggcttttaatcttgaacatgaaaaggacatcagtaaacaaggtgagttaactattacatttatgcctattataggcttttagtttaaaaattacctatggcttaaatacagagaaggcagacagaaaaagaacctttttttccctgagcattttaaagagaatactacagtaccattaggggtttataataaaggactataattctatttagaaaactgacttacagtacatgacaaatgatagaaaattgaggtaagttttttgaagtcatattttatatttattttttatttttcattaatttgtcttttgccagaattaaatgttatgatcattaaactacttctcttcttaggtaattttttcacttagtctttctacccctctacctttaaaaagtatactgaacaaagcagcaaaagatattctctttgaggaaaataccttattttctgtgaatagttttttaaaattaaaacataatgcataaacatagaaattcttttacattggcaagaactttttccttgataaaattatttttccatttgaaaaattattaggataataagtcaagataatgcttaaaaatgtaaaaattttctgcaaagaatgtaaaactgtcgtaagtgaagccaacaggtaagccaaaaaaccagagagaaaatttgcagttcattttagtcacaaaataagggatgcccttcatatatgcagaactcttacaaatcaatatgaaaatgaacaaaagccctggtaaaaaaatattcagagacagtttacagcaaaggacatgtggctcctgcacatatgataaaaagtgctaaaagccacacacacattcaagtgaaaatcatgatgagatacgattttccatgcacattttggcaaaaatgaaaaatgtgttaattccgttttgttttgattttatttatttattttttttgagaccaggtcttgctctgttgcccaggccggagtgcagtggcatgatcacggctgactgcaacgtcggcctcctaggctccagtgatcctcccacctcaggctcctgaatagctgaatagtcagcatgcccagctcctttttgtattttttatagagacagggtttcaccatgttgcccaggctggtctcgaactcctgggctgaaacaatccacctgccttggccttccaaagtgctgcaattataggcatgagccactgcacctggcctcttcctaagattgtagaaacgtaagctctcaaacgctggtgggagtataaatggatataacaacctccatggagagcaatttgacaaaatgaatttatactgtgtgttatgtccacctgtaggagatgtgcaagaatagtcatgttagtattatttcttagagcagaagactggaaagaactagcaaaaggtagtgaaaaggtagctcactccaaaagttttgcttagggttccagagttcatagtaatttcatttgtcctaaaacatcacaggactattttaaagaatactatgtttctccctgctattggtttaaggaagaatgtctaaaagtaacttactgtaccagtgtaacatggtatcaaactgcctgtcagactggaatagttaaataaatatgatacattcataacattgaaatactgtgcagcctttaaaaagttgagagtgtcttctatgtgctgctttctttttttttaagacggaatctcgctctgtagcccaggttggggtgctggggtgcagtggcgcgatctcagctcactgcaagctctgcctcccaggttcacaccattctcctgcctcagcctcctgagtagctgggactacagatgcctgccaccatgcctggctaattttttgtatttttagtacagacgtggtttcactgtgttagccaggatggtctccatctcctgacgtcgtgatccacccgcctcggcttcccaaggtgctgggattacaggcgtgagccaccgcgcccagccctgtgtgctgctttatcaagtgacagaggcaaacgacattcattggcataaaaaagaatgtgtgtgtttgtgcttgtgatatccacagaatatctttggaaggagccacaagaaactgggacccatggttgcctgtgagttggggagctggagggctgactccataacaagtgagaaggatacatctcttagatcatatctttttagtattttttgaattttgaaccctacatgtgtattacctattttttttaaaaaacatttcaaaattgtgcagtggaagggtctgtaagatggagcagtgttgaaataatggagccttaattacctttcaagaaacttctgcagtgacttggccatccggggaagcaatcagaaaagcagctggctcattaaatggagagtgctggtcccacaggtgtaagtacacaaaacgcaatcactgaaattctttggctagcacttccaactcggagacagttgctggagatcacttaataggctctggttacaggttgatctaatctgaattaagaaattggaaaaagcaaagaaagagcagtaacataggtcagagtaaggaagctgagtccgaacagttcctccacagcctcctgtttccccttctgtaggtgtatgaactacccagagagattactgtgaatgtagaatagttggagagatgtgtttcccaatagcaaaaggcagtgtaaaggtagttcactccaaaagttttgcttagggttccagagctcatagtaatttcactcgtcctaagacatcacaaggctattttagagaacagtatgtttttccttactcttggttcaagcaagaacatccaaaagtaacctgatgtaccaatgtgactccttatcccaagctaaagaatatcctttcaaggcaaattcatccaaatcagcttgacatctgatgggagggggttggataaacaaggttgtagagaaatcaagtctgaagagtaaccttgcacagcttgatctgtttactttttaaatgcaggtttgttcagtgggtatcgcactctacttttgaaacataggactaaattttcacaaaaatgtgaagatcctgcccgtgtactctggaaaattgcttgtctaattgggtgcacagctgcacctgtaccctcttgaatgactcagtcatggtgtgctcaagggccaagtaacttgttatggtgctaagtgaagaacaaaaatatataaaattcagttactttggcaatgaaaaacactgaatggtattggttgttatattacagttggcaaatactgtaattaagacttcaagtgatttttagtattagccctggattcactttctgaagaattttatttagaataaaactttcagcgttgataccagatagtcacctttagttcagttcagtttcataaatctttataaaatatttatagtagtcaaggagcctattacgggtgctagtcaggtttctgcaacaacaaaaagtaaattaaagttggctgggtacagtggctcacgcctataagcccaacagtttaagaggctgaggcaggaggatcgcttgagcctgggagttggagaccagcctgggcaacatagtgagaccctgtctctacaaaaaaaaattagccaggcatggtggcacatgtctgtggtcccagctactcagggggctaaggtgggaggatcaagtgagcctgggaggtcaaggctgcagtgagctgtgatcgtgccactgcactttagcctgggcaacagagtgagaccccatctcaaaacaaacaaacaaaaaatgtaaaactcacaaatttaaaaaagttttaagaccaggcgcaatggctcacgcctgtaatcccagcactttgggaggccgaggtgggcagatcacctgagatcaggagttggagaccaatctggccaacatggtgaaacccagtctctactaaagatgcaaaaattagccaggtgtggtggtggtcacctgtagtcccagctacttgggaggctgaggcggagaatcgtttgaacctgggaggtagaagttgcagtgagccaagattgcaacattggactccagcctgggtgacaagagtgaaactccgtcttaaaaaataaaaataattaaaaagttttaaaattcactttggtatgatattttgacccctcaaagttgtttataaatagaatgaacagtggagccatctgttaaaatgccttggctgagtgactcagctagtagatgaattttgacatatttatagcaccatgcattgatcattttagttgtaatataacagctgtttattgagtaccttttatgacataggtcctggagaaccagtggtaatcaaaagagatgatacatctgacttctcacagtgtcatctgttgagggggacaaggatgaaagctgtgtcagtgaaggaggaaaattgagtggtaacagggagggcaggtgctgtggtgagcatgtatgtagcggaggccccgaactgaacacggaggtggttaggggaggcttaggaaggaaatactggccaggctgagacctacacaggaggtttgggggagggtaggggaaggagtcagagtttgaaggcctacataaaaagtagatacagctataaagaacgagatcatgtcctttttagggacatggatggagctggaagtcattatccttaggaaactaatgcaggaacagaaaaccaaatgccgcatgttcacatttataagtgggagctaaataacaagaacacatggacacaagggaacaacacactggcgcctaccaaagggtggagggagaagatcaggaaaaataatggatactaggcttaatacctaggtgatgaaataatctgtacaagaaaccctcatgacacaagtgtacctatgtaacaaacctgcacatgtatccctgaatgtaaaatagaagttaaagaaaagaaaaacacacacacaccaaaaaaaagcagaaagagaactaagaaagttaattgtgtctgaagcaagagagaagttgtgtatgactgcagcacagaaagcttgaagtgtgggacctggtggcaggcagggagggggaaacgagtggtgagatgggaggggcaggccccaggggaagcagctgggacccggccatgtgaaagtgccagccctgaacctggtctggatgtgtgtggagtgcagtggagagccacagaaggcttgcctgcagggagtcggacagagttgcctgtttgggagatcactctgccttcatgatggagaataggtttggagaggcaagactggaggaagagggcctgctagaagcagtcatgcaggtgggcgctgtgagcctcagctgcaagtattttggagaaaaaatggatcaacatggaagagatttaagatgtagaattaaccgtgcatttattgagcagtaataatattagctaatatatattgcatatttaatatgtgtcaagcactgttctaagtgatccacatgcaatatgttatttaacaacaattgtagtcaacatgtacaatctactttcatttctattccaatcctataaagcataagtactattattagtcctatttttaagtataaggaaattgaagcatagagaggttacgtctagagaaataggaagacaattttagacataattttgaagggatctgtgagatacacaagtggagatgtttcctgggtcattgcatgtgaggttctgtggcccaggagagagtttgggggagattcggtctccagtagtataaatggcagttgaacacgggttgaattgaggagaaagtagaaaagggaagaggaccaagaaagatgaaaccttgaggtatgctaaagatttaaaggatgggcagaggaagaagaatcagcaaaggatactgaagaggagcattgaaagagactgtgtcagaaaacccaagaagttgtgttgtttcagaatttaaaggaagaggctgttttaagaagatgaggtcattgatgccagtgaatgtaagaagtcatgttaaaacaaaaaaaacaactaaggctgagatttatccattggatttagtgaaaataattgagaacaatttcagtgttgtaatggggccagaaatgaaattgtggtgagttcagacattgagatatgcggacaagtggagtgaatgactcttctaaaggcatggtcgttaagagtgggccatggtgttgaggggattgactttttaaaggtttaataaattcttaagtgctgataacaggtgccagaagaagggaatttttgatgattaaagaataaggagaaaaagaagaactaggagaagggcctctgtgcttttttttttttgaaatggagtcttgctctgtcacccaggctggagtgcagtggcacgatcttggctcactgcaacctccacctcccgagttcaagtgaatctcctgcctcagcctcccaagtagctgggactacaggcgcacgccaccacgcccagctaatttttgtatttttagtagagacggagtttcaccatgttggccaggatagtcttgatttcttgaccttatgaaccaccacacccagcctctgttccatttttatatgaaaggacaaaggagcgggtggagatgaagggagagttggtgacttattcacctgtgatggctgctgtgggggaagaggtgaggtgagactgggaggagttgattatggcattagaaattggaagtacgtggaatgttgttgaggctgggagcaagaattgacttaaacacaacagaagggctaggctaaccaagcttccatttgaagtcgtggagcaggagttgatggggtatcaatccatgtggtcagatagtgcaaggcagctctgcatgtccaggaggccaggacacagggaggctaggcggagaggtgccagtgagggaggtggagataggcagatcctgaagggcctttaaactatgggtttcgattttattgtgacattattcattatctagccagcttttataggagcagtttataaagtatgttctagggaatactattgatcaacacgtttttcaaaagtctaaattgtgttcaaattggtgtcttgtgagaattaatagaatacatatttagatcactttcataaataaatacattaacatcatattttcagtaagctcatatttgatatctaatcaaattcttttagtcatgaatttgaatgagaggttttttgggttattgttactgtttgttttgtcttctgtgtttttatatttggaagcagaattagcttttggtctcttaagtgaccccttagtcacttaagatggtgttcatttccatcattgtgcttatcatgcacttgagttctcgtgtttatttctttgtccacttgtttaatttcagcctcttcacactaaaataggagctttgtaaaggcaaggacctagtcttgttcactgtcacacttcttgtacttctcaggaaatattcattgggggcagggtagaggagttggggaaggaaggaaggaaggaagagagagaacagtgaagcgggaaggaaggagttccaaaaactgcttccctagtggtcatggaaactctttaataaattagaatgttgtctccaaaaaatacaggcagatatgcgttgacaattgcctttcatacaccttaacaaactagttacataatgggatatcaaaattcagtcaatgtgtttgctagtttaatttgttgtgattaaagaaaacaatgattttatttataaatttagcacctaggaaatgtgatttcaaatatcaaagcataggcattttttactctttttaaaattgaagggtcaacaaaatctgccttattcttcacagttttttctctgtcagtaatgtagcagtgtgttaatttccagaaatttaatctcttctataaaatttcctgtgacctgaaaacttttgaattggagttaatttaccaaactgtcatggaatgcctgaaatttccttggggcagaggaggtagcagagaggtggtaagttaccatgtttccattgtgtgaataactgataagtgggattccaaacagaatccatgtagcgttttaatgaattcacatttggagaaaaaagtcacagactttcaaaacttacaggaatttggctgtcctagggcaactcctcacttaacagcaagaggggatgagaaggttgagtgactcacccagggaagtgactcacccagggaaggtcaagtgactcacccaaggttacttggtaagtaaagagagaagccagaagcctggggcctcctgacggctcctgcttctctttttactaaggtcttctgccatgggaagaaactctgaatgttagcaaccatctggatggtgttagttgtatgtctctctatgtatgttgaaaagaaaatgttgaagaattgaatttctcctgcttatgggttgtgtcacatttaatagcgttctttaagaaaaaaacacgattgctcaatatgattatatgagctcaccataaccaatgacaggcagaaaatcctgggaggatagacactaacaccacattatcctgttgggataatatcccaaattctgaatataactttcttttaccactttaaaggccaaaaaatggctgttaaatggagtatttttgtcaaaccaagtttttaaagttttcagcagctgcttctgctggcttttattaactactgaagagtctttttttttttttttttttgagatggagtcacgctctgtcacccaggctggattgcaatggcgtgatctcagcccactgcaacctctgcctcccgggttcaagcgattctcctgcctcagcctccctagtagctgggtttacaggcgcccgccaccgtgcctggctaatttttgtatttttagaagagatgcggtttcaccatgttggtcaggctggtcttgaactcttgatctcatgatctgtacacctcgggctcccaaagtgttgggattacaggcatgagttaccggaccctgcctactcaagagtcttaattgaacatcaaaatcctggttttgtttataaggaaaaaaagttaatggtgcaactaggactaattctttgattaattttttaaccacttctacttagcaagtatatgaaacacattaaagactgatgcatctgttttgtttttgttttgagatcaggtagaagatctacaaaactagttggaggctggaaagaaatttcagatagtgatacatagaaatgttctgccttaactctgaatttttagtcatgaaatagtgcaaactcttaacattacttttgtggagctttgtagtccataaaaataacattgttgtagagcctctgtatgcgtcagctgtgactgagtgttttgatgtcttagcaaaaggcagaggagtgctttcctttgaaatgtgtgaggcggtttgagatgcagcttctcagatggatttaattagtccttcgtagaactggatgtccgtttgttgcaactgaattctcatttcattcatccataactagaaacacctcgcttcaaacgggtttcttcaaagaaagaggggtttagggttctatgttgtactgctttttgatgttggtttccctttaactgagaagaccttatgtttatacaactgttattattaagaaaacacagctttcttcagcgaggttccttttgcatcagcgctggttcttggtggcagtcagaggtctgtggaatggatctctgtcagactatcacagcagctgtgtgtttgcagattttgcttatgagaggcatgaactgaaaataggcgtaaacttgagtaattccctaaacccaaaatataagatagaaaccagtaactgaatctggtaacagggtagttgtttgtttcagaagcttatattaaccacaaaaacaaagtgaatcaactaacaagggttaccatgacccaaatagtaattgcattttgattcactttgcctacagtgcacaggtcaggtctgcttctcaataaatatgttgaaagaatgaaatatatccttcatagtaaaattatgttttttaaaaaatatgtcctactactaatattttttaaattatccctaaaccttcacatttcattagaatagctacttcaatttactctgaaaaaactgctttcttgtctttccagtttgtgtgtccagggtctgacgtgctccatcatcaaggcagcttttatcttctgtgtccgtgattctaattacatttcagggggttgtgatctctcccagaatcccgttcatgcattgtgtttaggatgaaatgcttgagggggtttggggctgtacactcatgggcacaggtttgcatatctaaaactttctttgctctaacatcctgatttgtataaaaatcctaaaagcaaatttcagacttctaattattctttgcctttaaggaaagacaaaattaatttagactgttcaagcttaaaattatcccaaagccacagatcacactgaaaacacatagtaatatagcccacaaattattttggtgtcttgtttccatattccatccaagagtctgtagaatctgtaggcttatatttctgtcttgtttcttagccataactgatcttttccatcttattcaccagactcagcactgcgtaactgtggcaatttctgaaactcagtggcaagggatataccaccattgaagagattaaaaataatcaacaaaggctttaaaaagtttaaaaaatgtatttggagcaataatagcaataggtcagaaaaagttttcacggaaagggccaatatacaattaggtttccatctctgtattcttgattgtgtgttttatgtcttgtgactatcttgtggagttcctaattttaaaagaattatgggtgtggctcaggaatattttattacatttgtgtaaattaaataattttttaaaattatggatgtgatttaaatattcttttagtggttctgcctttggtacagtgttccatgattttgtaatgtttttatttgttgaaaaagctctaaaaatcttggtagaaatatagaatctcagaaggcagaacatttggtaattatcttttatatcaatttgcaagacaacttgttagggagccctatttctagtagttgaagttaataagtaacaaatcacagcaatcacgttttttatcatgcagagtgggcagtcttataaaaaagaaacgtcagtctttttggatatagggacacaagcaatcatagttttcctctgttatctttagtttgtaaaaatcaacctatctaccatcagcatttacccacaaggtttagtttggagttacctaaggggatggtagagaaacaataatttaacgttatgctgaaaacaatagtctctgaagatagagaaacctctgtcacttaccagttgtgtaaagttggaaaagttacttagcctccctgaaccactgcagcagtggtgtttacctgaatgttggcatagaggaaaaccaagggtcacgaggcaggtggacttgagtttaaataccaatcctgaacctgctggctgtggaatccagcagaagttagttatcttttcttagccttagttttccttatctgtagaatagggatagtattctccagggtttttgtaaaaattaaatgagattttatataaaggctctagtacagtggctgatgtaataagcaccccagaaatgatttctcttccctctaaaacacggatattttgctttttaaaagaagctaaagtagcttttactttgcaagcagttcttttccattgtatgaaaaattcttggaaagttttaaaaataagacaaaagggagccacagtggcccaggcctgtggtcctggcacataagcagccgaggctaggcgttcgaggttagcctgggcaatatagaaacctcttatctatataataaaaataagacaaaaaataaaatgtgccaacatatattagcaaggtttgtcagtactgattaatatttttacattctaatattctttgttagaattgtatttattttatgaagccccttttgaatctacagcagactacctgggaagtagttatagaggtcatcatcgtgtcttggtgattcactttgggaaattttgttgagtgaggctggtgaacctagaaagctgcttcttctgcctccccatttctgtccccaaggccctgctgtggttcaaaagcccatataaacctgcagtttccctttcttccacgatagggcgcgcacctacactgttagggtatggggccgactggctcctgccctgtgggaggtttgatccttgtccatttagaggcccttccttattcatggacactctactgagtgtctgttgcaaactccctggtataaaccccagacgtcatggatttaccacactaattattagagtggccattatttgcaataaaatagtgacccttgccactgtgttttcctaccaaataaacttactgacaagtatctgcattggctgggtcgaggtgtcatcaaatcagcctaggtttggatgtgctgttttgctagctgtagacccttgagcaattatgtaacttctctgagtgtcagatttgtcatctataaaatgtggttagtaacgtctccattgtaggatcgttcctaggattctgtgagtgtgatgtatattaaaatacctgattgatattagggcctcagtcatgttcctttctttgctttagactcatttctctgaaaaagtaatacgatgtttatagttggggaaaaaaacccaaagagcgttcataatctggatattaccactattgaaatttctattttgattcagtgttttttttgaaggtattcttatttttaagagagggaattataaaatatgccattttctaactcagtgtttaaaccttaaaaaaagagacatttcttgaaatgttaaacctatggctttgagcatggctgtgtgtggctgtatttgctcttggccatatttattgtggcagcgtggtaatgggtttatgcttgttttatcgcttgtggtttttataaaataaaaactgtgtttggctgtgtgactgtcgttcagaacaagattaaggaaactagatggagattaaacatagcacaatcttctgttgtaaataaccatagacaaacttgtgagcagctaccaaattccccagttggacaaaaagtgcttctttttagctttgaaaacctagtgatgatgatttgagaactggcataagtctctttaatcattcaggttcagcgtgattagaagaagagttgttttaaatgtttttgtgattagatttgaaacaaagcttagaaggatttatgattttgtttacaaccagctacgaaaaacaccaaggaaatgtgaaagctggtagtaattggtgagcttgctgggagtggatgttgtttccagtagtgtaacttaacaaagattgaaggaagctccgtgccattttatttcataccactggtttaggtgcattaattgatattttaaccaaaattttaatctaaatcaagtcttttaggttcaacctattccactgggttttaaatgatcatatatgcataccacagcacatctcacattgagaacgttacctcagtgggaaggttgtttcattcttggttgagtatagcattccagcttgtaattaagctgcaatacaaaaaatatacgcacttgctagaaggatattcttgctagcattctgtatgtatcatttgcttattcaagcatataaaacttcaacaagaggaggtaattttgcttagatctcttgatttgaattgttccgctatttggcactgggtggaaaagggaaaaaaatcatattgaaagcattgttctgttaatgaagttgcttgtccttttttgtgccaaatttggcaggtaaaattaccatttattctacttgctagagctggagaatagactgttgaggaaaagtagcaatttaagtaatgacactagatagaatgtgctacattatatacatctcccatacttttagatattgacatgcaatttttatttctctttagtaatgcactttgtctttaaccactacattacttcccgtaagctccatcaactacatgcaatttgcttcagttgtgaaatttaaaaatttactattaattataataaagtgaagcattttgattcaagaagaaattaaagattgctgtattttgttctggatatttcagaagtattgtattctttttaattctgaatatttaacataaaaaagatgaaatagacgcattggttaatttgaagaaatacaatcaaatttgaggtattcatggttttttccatgttaaatatgctttgcctatttatatttgccttaatttttgttttgtagagtataaaagagaaactttaaactcgtatacaaaaatgggaaaatatctaaaaatatgactaggtagttttaaaaattactcacgtattcaaatgaaatgcataagtttagcatttgctaaatttgagatattttatttcatattatttgtaaatatatttttgtttggcgtgaatttgtaattcactaagtttcttgtagattaaatttttcttagttgtaaaacttcaggcttaaaaaaagtattattattgttacaatttacactataatggctaaacttgcccctcctccttaaaagaaatataaactaatttgcaaaaatatattttttgaaaagccaattggtgaatttgtagacttgtaaatgttaattcaggaacagagttgagtattgctggaccttctaaccatcactcatttctttctgcccactaaactaactggtaggcaggtgcagatgttacaaaatctagcatcgcaattgacactaattggcatagttgttggcagtcttatcagaaagcaaagggctgaatggttgaatgggtttagagaacttgaatggtaataagcatttttatatgcatcttgaattacttttgtgacccagactaacaggaacactttattctgacctcattcttcaatgaatagaaattgtagaaagcataatatgcagtgtatgtgatgactgattgtttttcaggtaaccttttacagctatctgctctgttgcctacttcctccccccactacctcccttcccagtgctcagagaaaccaaagtactgtaaatgtgtggaataaaaaggagataacaatcattaatgaatattgaattaatttatttgagtggtttgttgccaaaagcttgaggatgtcataagagttaggctaaacttaagaaaaagtattcattgaatttatggatgaaacaaaaggacgactgggacttgcttcttaatagtcttggagcaggtgggtgaatcagtggggatatggataaaacaggattggctttgagtggataagttttgaacttgggtgatggatatatagaggtttattaaaccattctttctgtttctatatatgtttgcaattttccagaacagaaaggttgtttgtttagtatgcggggtgacttcaccctctgctgttgtcaggttttttcaatacctgccagttcctttccaggatctgccttttctcccccagttccttttatcaaaaagtacccatctaaagtgagaactacatcacctgacaagctgttctgtgcgcttatgtataaatgagttattttctaggcagtgtggattttaataggagttttctaaagacactgccttaattaaaggaatggctcttgggttgggaattatagtgttggggtgggtctttgtgtctatatgtgactatatgtagaccactcttcacacttacagaagtgttaggtgataattttaggtgtaatatgatgattgatcttagttctttttagttctttttttttttttttttgagagttttgctcttttgcccagtctggagtgaagtggcgtgatctcagctcactgcaacctccacccactgggttcaagcgattcttctgcctcagccccctgagtagctgggattgtaggtgcccgccaccatgcttggctaatttgtgtatttttagtagagacggggtttcaccatgttggccaggatggtttcgaactcctgatctcaggtgatccacctaccttggactcccaaagtgttaggattacaggcgtgagccaccggcatggcctcatcttagttctctatgttagaggtaatgatgtctttttcttctgtagaaagactttccaaaaagaaagtgcttttctttaggactttttagaatatgttcaaaatactgatctttgactaaggagaggaagagaaaccaagatcatatttcagactattgtttcttttcccatggttttggcttatcccgagaattgacttgacgtgttcccttttttatttcaaagtagcattgcttgaaatattttagattttttatagctttctaaggaattaaactctaaaaacactttaactgtttttttgttgttgttgcttgtttgtttgtttgttttgatacagagtctcactctgttgcccaggctagagtgaagtggcgtgatcttgactcaccacaacctctgcctcctgggttcaagcgattctcctgcttcagcctcccgagtagctgggactacaggcgtgcaccaccatgcctggctaatttttgtatttttagtagagatggggtttcactatgttggtcaggctgctttcgaactcgtgaccttgtgatccacccaccttggcctcccaaagtgctggaattacaggcgtgagccaccgtgcccagccaactgtttttttgtgttttttttatttttttttaattgtatcttgggaggccttcatgagtgaatgtagcttgctcattattttttgtaccattcccagtcattttctactcattcctttccttactagttttcagtttggccatgttctgtgtacaatttctggtaagtgctaccaaaaccaatatatattagacatgctgtttttcaagactcctgaaaaagtgccaatcttattctcctttcagtttgggagcacagtttcacaaataatagaatagtcttactttgtttgcagaattagaaggatttatctaacaacttgaatagataattttttttttgtagacgtgaaagtgaaaccttagtattgggatagaattttaagtagcattttaaatttgtttcaaaatcttttcttattgcctgcctttcattaaatgagctatggtaagtatgctggggtgtatacgtgtgcgtggtgatgagatgtttacctctgtgtggatcccttgtagattttgtattgtaaaagtgcataatagagtcctttatatagctggaataactgtaatctgctattgtaagcatatatggatttttaaatacaaccattataatactttataggacattacaactgaaaatattttgacttaaaagttgctttattagtcttacaaaagctatgttgaagagttttttgttttttgttttttgttttttttttaaagaaccatgttgtcagtggtcaacaatcaaatgtaaaaaacacttagctggaaaacatccattaagataatgaaagtgagccacgatgcttgtgtcagtttttatattttagtttaaaacatagttttttagcaatcctataattataaatataagttagattttctctctaatttaattagataatttttattttaatacaatagatacttatcaaggatctgtcgttcttcaagatcagggcactgtgctgagttcttcatgagggccatgaaggaataatgcccaccctcacgaacttccagcctagtttggaggtgttgagattaatacagtaatgattgtaatataaggcttactctgataagtacattgagatataaagtgttacagagattcagagcaaggaaagacccagccctatttagcagtgggcaaggggtggtatgggtgggtggtattggtaggggcaggggggatgaggcagaaaatcaagagcaaactgaacaaaatgaatagaataggtgtcaggtcatggaagatggatggtagaattctgttaggctgaattggctagtccaaatttaaaaaatagtaggactaaagtttaggatatagtgcctgtgcacatttgctgaatgtaagagaaagtgggaagaaaaattgaaatgatagttagattgtgaccattagtacagaagacccagaggaccatgtggagaacttaattttttttttttttttaattaagcaaccagaagccaagaaggattttgaactgagaaaacttgtaagacacagtaaagccacatttgtaactggtctatcgaagtgaatacaactgtagcaggttggagatggggctttgggaaggttttcttgtttgatgggattgtcagtagtaaaagaaatgggaaggaaaagagttcacattcagcttagaagttgagaacaaaatttggggagatagatgagagagatgtcaggtaatagttgggggttgggaagggccaaacaaacaacactcagttattggcatgtgtgttaggccgtttctcacactgctgtaaagacatacctgagactgagtaatttataagaaaagaggttttagttggcacatggttctgcaggctgtgtaggaagcatagcagcatctgcttctggggaggtctcagggagcttccaatcacggtggaaggccaaagaggagcaggtgcatcacatggtgagaaccacagtgagcgggggtggggatgtgccacacacttttaaatgaccagatttcactaaggagatggcccaagtcattcatgaggaatccacccccattgttgcaggactttttcttggtttagctaaggatggggttctttgtcccatggccatgaaaattcaggcccacagacaatttgaatggtgagtaagacagggttttattgggtgaaaaggaaaaaaaacgggggaacagggactcttcaaggccagagtcctgctacagtgcttcctgcctgcagcttgaatgtttggttccacacaggaagaggaggggccaggttcctccctgctgcaaacactgcgaacttcctgaggccccaccccagtgcgcagctggttggaatttttccaagaaccccctccctcccacctggctgtctcattctcccctctaaagaagtacatctaactgccattagaatacggataaggacaaagaccgatcttaactgcttcctgctgacaggggatgctgttttggggaaacagcagtcagagatccctcaaaggcctatctaagcgttcccggcagaaggggccgttgtcagagtctccagttgcatgaccatttggagtttgatggcctgaaggcaagaacagacaaaccgggttgttagaaaacatgtatcaaaaggaaaccagaggacgggtaaagatagctaaaaaattaggccttttaccagtttgcacagggagaaggaggccaaaagcccgactggtcaggaaaacttcacacttttgctggcatgttgggcttctgggttcccttcccctgagcccagtcctaagccaacccgtttaaggtttgggaaattaactctttccagcttggaggatgcatctgaggtgagtgtatcatagtatagagacacaattacctatttgcaaagagagaactgaggaggagaaagaagaaaagaaggcgttttttttcaaaggagtcctgggggtcccggatgcattcaaaaggcgtacaaactgaagatgaatggctacctatctagaaagaggggagcaggtgtccctggttcccttctcttcctagcagatactcagggttagtgagggagagaagagagagcatcctctttcctttcttctatccttgcatccctgaatcccagcaaccttggtaggtgctgccatggctgtcaaatcaacttgcaccggtgaagcagggggcctagggggtgagaatcatccactcttacccacgtaacgccctatctcccctgctgtcagtagctttgaattctgtatgccatggatactaatgtggcctttatccatgaaacaggaagccttggggttggcttaatcagcaggaatcagccactctcacctgtgctgtgccttttaaccttggtgttgtcatctgcctctggatcccttacatccagttttctttctagggctttgacccgaagcttggaattgagtcgggaacacaaatgtgtctcgaggggagttgtgtggactccttaccataagtggaatactaaggtgaaactgtggaactgagtcctcctccaacaagggagaggaaagcatgtcttgtgacacacccagataactggtgactgtagttatgcttgctaggatttgggtgcatggtgcttggctttggttcactcccttggtcttactttacccaaaggaaacctcggagtgatgggcatcctatttattcccatcccctggcaggatttacaggataattgctcagaactagaatattgatccagacttttacattacccatccctcttgttctttctgagctgcagccagagattgctggttggtttacaggaacaagcagggttagtctaaaatgtaggtgaaaacttaaaaacaactagtgagtttagaatttaatgacaaatgtatgataagttttggaacataatttctctccagtcctcatttttgttaaacaaaaaaaaattatgataggactgagtggtttgcaaagtagactttagtcttattctttgcctgaatatttgcataaaatgcaacaagaataattatttctacataggccttttggattggctttgatggatgtctattccacaaggaatctcagataagaccttttaagccgagcccagccatggctttctatcctcaaatacttgcgagttgggtggtcctctccttttaaggtcccaagctaaacttggagctcctggacctgttaggaagtgacattcttttttttttttttttttttgagatggagtcttgctctgttgccaggcaggagtgcagtaaatctcggcttactgcaacctccaactcctgggttcaagtgattctcctgcctcagcctcccgagtagctggaattaaaggtgtgcgccaccatgcccagctaatttttgtacttttagtagagacaagatttcaccatgttggccaggatggtctcgatctcttgacctcgtgatccacccgcctcggcctcccaaagtgctgggattacaggcatgagccactgcgccccaccagaaagtgacattacttactgaccacaggtcagtaaccctttacagggactgcgtagacaggggtatgaggccattttccccactgggctcttactggctctgcaagtcaagattcactcctttcacagtgaaagccttggtaaaataaccactttctccaattgtgtcctgttgcaaaagaaaaatggattcttactacactgatgcaaacaactattttgtcataagttaagaacactcacagatagtttccaaattctagaggaagcaggaagagagaaacaaacatgctccaaaccttcatcacagtagtgtataccttacttaattattaaagtccgtaaacagttcaaaattggccgggtgcggccgctcacgcctgtaatcccagcactttgggaggccaaggtgggcagatcacctgaggtcaggagttcgagaccagcctgaccaacacggagaaaccccatctctactaaaaatacaaaattagctgggtgtggtggcacatgcctataatcccagctactcaggaggctgaggtaggagaatcgcttgaaccgggaaggtggaggttgcagtgagctgagatcatgccattgcactccagcctggctgggcaacaagagtgaaactgtctccccacccaaaaaaagagaaaaatagttcaaaataagtttccttgactctgaaaaactaaacaaggatcagcaatattccaagcaaaagtcaaaaaggttgcttcaggtttctgagttcactccattaagttctcttgttttgcttgatatttgtgaacacttcagctctttatgagtcttgtactttttcctttattttaatgttacaatcttcaaagttattagaagcctgtatttgagaggacctgttaaaattctatagcttattataaaccatcttttgaaaaggattaaaacaagacaacaattgctgtgaatagctaaatatccagggtagttacagttagaaacacaactgacaaagaagttcggttatctccatggtttacaataacttaacataacaaccttaattatgattaatagcatatacttggacattagaattttagaaatcccatacaatttgggaacacatattagcattattcacaaaaatataacctaaagaagattgaacatcattttggcaatcccatgtaaactaaacatgttaaataatcctgtttacctctctttctggacattccaggggccctctggactatccgaaaagccagttgtcaggaaagacaattttgaaactgaagtttgattttgagaaggccgttaaacgttcaaggtttaaatactttgtgttataaaatagaattccagattaccataaattatttattttgccaaagtaatgactcagaagttttaaataagtaaaaaccttttatagccctttacgaattttgccaaagagcagattagcgccttacaaaaaccttgttgtgtttttatttcaatgctcaatctacagaaaaaccatattataccttttggaatttagtcaatatgttcacatagagaacctcttctgcaagattcatttccacaattcttccaccacttgtttgaaccttcagctttttcctaatttaaaactgtcctttaacctagacaaaaatttatatttccatgcctccttgtaaccttttgctaaaaaacacattttactgttcttacataccttgcatgtaaatctatttccagtagtcttaattacatgttataatagtaactcctagcaatttttaacttttttaaaacttggggctgggcatggtggttcatgcctgtaattccagcactttgggaggctgaggtgggtggattacctgaggtcaggaggtcaagaccagcctgaccaacatggtgagaccctgtctctactaaaaatacaaaaaattatctgggcatggtggcgggcgcctgttatcccagctactgtggaggctgaggcaggagaatttcttgaacccaggaggcaaagcttgcagtgagctaagattgcacgactgcactccagcctgggtgacagagtgagactccgtcttaaacaaacaaacaaacttgataagttgttttaattgtttaattgtgtgctaagtgctgccaaggtttgccttcttaattaagagcatggttatatgtccccagcccttaccagttgtgaagccagcaagtcaaatagttcttaaaactcaaaaagcagcttgtaacctcaaaatacttagcaaactttgtatctgacctgcattgtttagtccacctatttacattttgacaacatctgctctttaccaataatccttaaggctgtttttgtttctcaatgattaaagtcacgtgaactgaaaggtatcacagtttttatcttccctttaaaaaatattagatccaagtgcttgtctttgtttaggccaaattaattagagctctttttacagataccacacacagtatatacacagacaggcaaaagaaaacccagtcactgggtggggccctttaagagacagggctaggaagacatgcagatatggaaccagagagggctcatcccctaaggcaggattgctaaacaaagccttgccactggagttagaagccatgccctcaggatgtaaaacaagatggaagcctgatttcacaaccaacaccttgcagagaatacaaacagtgatagttccggggtgggggtctggcctagtaaagtgttttctaaaagagaaaaaacttaaaagttaactgttgacagggtaaagtaggaaaaaaacaacaacaaaacaacagcaggttaaaaaatgcctaggaaagaaccttttattctcatgcaagtggttctttcaccgaggagagaagcttaagcttaattactgtccgatggagttgaaacccttggctggggaaggggaaggctccagtggctcgtggcagaaaatgccagccagccaccccgggtgcccttggaccatgtgtccaagcctcagcagtggaggagggaggtagggagctgctgctctctggtccctcccaaaaaaggaagaaaagggctatggaaaggtcgggttggttctcaacccctgggagcagcaggcggtgggggcacagtttcctccaccctcagaaatctcaggataaaaaggcttaggagccacagtgaaaggttttgagtccccatttcactcactgcttcttgagccccacattgggcgccaaaaatggttcctggacttttccttagttcggctaaagatgaggttctttgtcccatggccagaagaattcaggcttgcagtttgaatgggagtaaggcagggttttatagggtgaaaagggaaaaaaagggggaacagggactcagcgaggccagagttcctgctagagtgcttctcacccacagcttaaattcctacttccacataggaagaggaggggccaaacggtgcagatggtgaggacttcctgaggctccaccccagtgcacaggccagttggagtttttccaggggccccttcccgcctggctatctcaccatgatcggaacacctcccactggtccctacctccagcagtggagattacagttcaacatgagatttgaacagggacaactgtccaaactatatcagtgtgtcttttagagttggccatttttgtcacccccactcgtttatttatttttttgagatggagtctcattctgtcgcccaggatggagtgcaatgacatgatctcagctcactgcaacctctgcctcctaggttcaagcaactgaacctgttgagtagctgttgggattacaggcatgccaccatgcccagctaatttttgtatttttagtagagacggggtttcaccatgttggtcaggctggtcttgaactcctgacctcaagtgatccacccacctcagcctcccaaagtgctgggattacaggcgtgagcaaccatgcccagcctgtcacccgtacttgtgatatgattcaacaaacccgtttctatggccaaattggtttgctaattaatgtactatatggactgggattctttggtacaaaacgtgactgtccaaatagcctgactaattatctattttccttaattttttgccagggaaattttttttgtttttgttgttgttttgttttgttttgtttttttgagacggagtctcgctctgtccccaggctggagtgcattggcatgatctgagctcactgcaacctccacctcctgggttcaagcaattctcctgccttagccctctgagtagctgcgactacaggtacatgccgtgatgcccagctaatttttgtatttttattagagacagggtttcactgtgttggccaggatagtcttgatcacttgacctcgtgatccacctgccttggcctcccaaagtgctgggattacaggcttgagccaccacgcccagcctgccaggaaaattgtaaagtctacacacagtggagctactagtgtagtgagcaccatgtgcagttcttgcggacctctccttgcacaccactgtttttattctgaagtattttatagcacgtattgcagtcctgtaaattgatgctattttttttaaagtttgttgaattgcagtatcctaaattcccaaacccatgtccactgacaacctagcacactcttttttttccccaagagaaactcgtttcttattaaattttgcattagtgtcaaatcggttgactgttttttttgttaaagcactgtcatatttttttctataatatatactctttgacctactgtgaaatatatttaaagtagaagatttatgtgtatgtcagacaaattgtgaaagaaaatagtagcaaacttgttagttagccagataatgtgaggcagtttctcactgtctgtctttgaagggagttgcaaatatagaataggggaaagttaaaataaatcctacattgttgaaatgtttggaatcagaggtatcaatgtgaagtcattttttttttaatcagtagacacagaaacagatttagatgtatttgcttagggcttaactttacaaacttggcagaaaccatcttaaccagtaataaagtaaccttactggtaatgggacaggtgtgcctcttgattttttttttttttttttgagacatggtcttgctctgttgcccaggctggagtgcagtggcacgatcttgactcactgttacctctgcctcccaggttcaagtgattctcatgcctcagcctcccaagtagctgggattgcaggtgtccaagccatgctaattttttgtatttttaatagagacagggttttgctatgttgaccaggctgtgcctcctgatttgatgctgaaaaaagcacaacattacttctgtggtattccagataaaaatacattaatcaagaggaaacattttcccaaattaactggtctatgccctgcaagtctggaaagtgtcttagtcaatttggactgctataataaatataccgtagaatgggtggcttaaacaacagtcatttattcctccagttctgtaggctgataagtccaaaatcaaggtgctggcagatccggtgtttggtaaggacccacttcctggtttgcagatggccatctttcttgctgtgttcattcatggctgagagcagagggagaggaagcagctcttgtgtctcttcttataagggcactgatgccatcaggagggctccacccccaccacctcattacctcccaaaggtcctgtctcctcatactgtcatattgagagttaggcttttatcatatgaattttgaggggacacaaccattcagtccatagcacaaggaaaatcatgaaggacaagcaaagttaaggaactattcaggttgagagagacaccaaagagacatgaaaactaaatgtatgaacctaaattagatcttagacataccataaaggacattattagggctattagaatttgaatagagtttgtggattagttggtaatattgggttaatagtaaattcctgttttgttgactgcactgtgctgtcgacaaaatgttagtgacagcaaaatgttgttgatagcacagtgcagtcaacaacatcaggaagttactattactccagtattgccatctagttcacagactctgttcacattcactaaggagagggtccttgtacttgggaataaatgcggaagtattaaagggtaatgggacatcataaaatgtattctttactgctcagaaatgttagcagctagggaatctgggtgaagggtgtaagggaactccgtgtactattgctataacttttatgtatatctgaaattgttttacaagaaacaaacaagatacaaagaaatacctccccaggatgtttattagaacaatagaggctaactataccatttttctatttcttattaggtgcaataaaaggacactggtaactgtaaatttaacagttaaaagtaaggtcatggcggtggcttacagctgatagtgccctgtatactctgtacaagtgcatgctttattatgatcaacctaatggatagttagttttgtttttttttaaaccagggtcttccttgagatgtaatgggcacagagtaaacggctgattgttagcttattctgtggatgtatgtgatgagtgggtctggggcatcagtttctatatctcacctttacctatcaaagaaattggacaaaccatgatagcaaacaaatgaaaagaaaaaggagttttattgttcatgcttacaaaagaatcctgttaatcaatttgtaatccaccaattattttgggaataaaattgtagcaaataaatttaagatagaaacataaaactattaaacatgttatttgtattataatgtaaaatataattaatattttagtatgtacatattaggaataatgtcactggtggccccagaggctaaaaaacagaatgcaaacctgctggaaaatccttggtagataggagcatagaaaacagaatatcaaatgcatttattgttggccaggagacatggactactaggggaaattctgagtgtctaaggatagtactagaatgctaaacagtcacagataataatataaagtaggtaggattaacaagaaacagcacatcacagtcacaatgtgtgggaattaggcaaaggaaatacgtagccatttttatggacgtcttatagtccacttagacaatagatgtattctgtggtggtaaaccaccagcttaggtaatgggatttattggaggacatcagtggtagcaaaatacatatgaaaagcaaaagcatactaataggaatctgatgaaattaagagaataaataatggaggagatattagtgaagaacaagaaaaattgaagaacagtaaaagtaggcatgcttggaaaaggagaaaaatagatctctaataatcatttttggggaggagtatagagcgtcactaagttgaactaccaccaacagccagcattcattgagggcttattatgtactaggtgctgttctaagggcttgacttcattcctcacaaccactccttgaatatgcattttacatatgagaaaatggacacatgaacaattaggttacttgtggaactgaggttcaaacacaagcattgcgaccattcacggcaatactgcatagaaacacaggattccaccataatcaggtaggggagcgaaaggcagtttcaattgttctttatgtaaagaactcatctacctggagttattcattaagctgatataatttacagtgtgatctgcagagaatgaccttatcacaccaatccaaaagaaactactactataattaaactgtgggcaaaataatgtaggatatttttgtagaccgtaaaactgaaattaaagttgttactgatcaattaatgaggtgataattaaacagaaactagccaacctgactgattgtagaccaatacctaaaatttgtttttgcaattcacatcctttgagatatatttaattacatttataacacatggatatttaatataatcttttgtgacagattgacagatcttcactatcattatgtgtaattcctcttgatgtttttgtcattattacatatatatttgggagagaaataaaaggctgtttccaaggtgatggtgataaagagcaaacttataaaaatggttgcctccttttgtttgtataaaacaaccatctcatttccctctgggaggtcactagaggtatgatagctctgttttgaaataatattttagtaaataggaaagcagggtaaagaaagcctcccctttttgtgttatgttaaggtttaaaactgtgttacagtttatactaaaacattaagaatcaattattataagagcattaaattgtttgagttttgtcatgctttgcctagaaatcagcactgaagcgagtgacttagcaacgttattagatctattaaataattggaaatttatgtgcttattgtcagcatcttggctttttagaattttaaagtatgtttgtgcttcacatctctagttgcagtttatgtagaatttagtgaactataataacgttggatggtggtaatgtcacagtgtaattaactgcatagcatacaaagttctttgttaatggggaatgggatatacatcatctatttgatatataagttaataatcatactttttgttagcagtagttaaatgataagaactaaaaagaagcaataaacatctccatctctaaaacagtcttgcaaatatgcagtgagcatctactgtatacaagcactatatcttcatatttagattacatttgctattttgcttttcacatgtgaacttaagtgaaatactctaaggagtattgcaaggtaattgcccctataaattacataatttatatggctctttaacttttttagatgtaaaatgggaggaggagagcgttgagttggagtgtattatttctaggattctttctagcccacaagtcgaatcagaaaacagtggctcatgcctgtaatctcagcactttggaaggctcaggtgagaggattgcttgaggccaggagatcgagaccagcctgggcacatagtgagaccacacctctacaaaaaaaaaaaaaaaaaattagccaggcatgatggcaaacatctgtaaccccagctactcaacccgctgatgtgggcaaattgcttgagcccagggggttgaggctgcagtgagctggatcccaccactgctttccagcctgggtgacagagtgagaccctgtctccaaaacaaaacaaagcaatcagaaatgtacagatctttttccacagtttgtgcagaacagtcacttctaagatatactatgaaagtctattacaggagcaggaactagttattcctttctgagaattagatataacttgaccaacaaatcggttttttatccttcatatcatcttcagaagtagaagcaagatatatgatcaaagtctttttaaaaatagcagaataccggggtttttattttatattttcactctgcacaatgctaatctccttaacatttgatgacaaagaaaaaacttggaatttgtgtatgacaaaaagaatgacttatgaggtgaatcgaaaacactttttacagcctctgtcttcctaaagtttattgtttttggaaatagttttttggcaaatattttgttttgtaagttttacatttctaaagttgaataaaattaaatgtttagcaggtgcttgttgtaatagaagctataatattttaactatgtcatgaggtatctctgaggaagtgtttcttttttgttttttaatggtaaaggatgtcagtaatatctctcaaatgtcaaattaatttagggtgtgtactttctttttccctatgatgacgtagataggaaaatcgaatgttccaaacaactcatggaaaatgttccacttcagcgttatttgtaccacaaatgcagtgaaatgcttttaatggaatccagagtgataggtggattatgacatgtggggagatgccttcttgaaataggacataaatcatggttttttttttttttctgagacggagtctcgctctgtcgcccaggctggagtgcagtggcatgatctcagctcactgcaacctccacctcccaggttcaagcagttctcagcctcttgagtagctgggattacaggtgcccacgaccatgcccatctaatttttatatttttagtagagagaaagtttcaccatgttggccaggctagtctcgaactgttgacctcaagtactccgcccgcctcggcctcccaaaattctgggattagaggcgtgagccaccgtgcccagccaaatcatgtttttgaacttgttttaaatatctgtgtgtgtgtgtgtgtgtgtgtgtatgtatttttttttttatggagtcttgctctgttgcccagggtagagtgcaatggcacgatctcagctcactgcaacctccacctgccgggttccagtgacctcagccgcctgagtaactgggattacagacactcgccaccacgcccaactaatttttgtatttttagtagagacggggtttcaccatcttggccaggctggtctcaaactcctggccccataatctacccgccttggccttccaaagtgctgggattacaggtgcgtgagccaccgcgcccgaccagtattatgtatattctttttgtttgtttgttttttgagatggagttttgctcttgttgtccaggctgcagtgcaatggcgcgatctcggctcactgcaacctctgcctcccaggttcaagcaattctcctgcttcagcctcccgagtagctgggattacaggcatgtgccaccacgcctggctaattttgtatttttagtagagacggggtttctccattttgggcaggctagtctcgaactcccaacctcaggtgatccccccgccttggcctcccaaagtgctgggattacaggcgtgagccaccgtgcccggcctgtcatgtgtattctaattataaataattttcaaccaaactgatatgtttggttaagctggggaaagttttcagaaaatagagtacactgagatgaatttcatgaactgtacccaccaaagccttgtcctggttaattcaaatttataatgccaatagtttaaattagcatttagcctttaagtgacggtggaatggtgaggcatatgatgtttttataccaaacactccgtgctccatgtcttttttggagtttacacttttcaaaaacaggcggcacttccatgtgtttatttccccttcatctctgtttagtgaatgattggtttcatctttacaaagattattctggctgtagtggggagaaccagttggagatatggaagatgtatgtggggaggccagagtatcgtggcagtctgcctgagagatgcagtggccggggtttggtctaagatgttattggtggagacggagagaatttgcggtatttgagagccactccagcctccattatttctaattctatgtcctctacccttctctgtcatctctccactgcctcccagccccttccactgtgccccctgtattgcccactttcagaccaacagccttttgtatcagccttttctggaatgttccactaattacttaccctaactaaaaccttagggtagttttgttctcataccacacgcacctccaagacaggaggtgggattactttcctccttgtgtcattcaggacgactgctccgctctttcttgtaagccctttcttttttgaaatcacatcatcagtcttcactacctcatcttcctcttggcaaccttcagctccccttccctgtatccctctccctgcacgtgaagaccagcagccagttcctggtctgtctgtctgtctccatacaatcattattccctgtattttctctccatccacagacaccactcctgtttttacatcctttatccaatccctggcctggcattatagtcactcactcatgaatacccttaactgctcactccttcattcttccatcagtctcaaacttagaggaactctgcctccaccttccctatgcctgcgcatgagcaccttaccatggctggtgaacgtcccataccaagggcacagttaacatgcgtctgctggtcagggccagctgagcatcctacactgggcagaagggttgctgtttctctgataacttctcctcccttatcctcagtgattccttcctgtcttcaccactgtattcacatgtcccacgctcctgctgcagctgacactacttctgaatgtccctcttctctataccaccagggctctagatctgatcaccatgacttttagttttatttcctctaattcattgtccaagctatagcctgcatgatctttcaaaaatggacagtgtggctcacacctgtaatcgcagcactttgggaggccgaggtgggcagagatcaggagttcgagaccagcctggccaacatggtgaaaccccgtctctactaaaaatacaaaatattagccgggcatggtggtgtacacctgtaatcccaactactcgggaggctgaggtgggagaatcattggaacccaggcagtggaggttgtagtgagccaagatcatgccatcgtacttcagcctgggcaagagagtgagactccacctcaaaaaaaaaaaagaaaaaagaagaaaaaaaaggacagcagacaatggcactctgcaggtggaactgcttcatgtttcccactcctgtccctgttcttcaagagccggcctccccttctctctgctccatccacatgggtttcaaagaagcttagctctttctcaccccagggtttttttctttctttttttttttaaatatgatattccttctagaatattcccacacacccatcactagcatacttaattcctactcacccttccagtctttgctcaagatcacctcctcagagaggtccttcttcctgctgacaagtaaagaataatgagaattcagaagaggctatagaaattggctgggtgtgatggctcacgcctgtaatcccagcactttgggaggccgaggtgggtggatcacttgaggtcagaagttcgagaccagcctggccaacatggtgaaaccccatctctactaaaaatacaaaaattagccaggtgtggtggtgggcgcctgtaatcccagctacttgggaggctgaggtaggagaattgcgtgaacctgggaggcggaggctgcagtgggccaagattgtaccactgtactctagcctgggcaacagagcgagactttgtctcaaaaaaaaaaaaaagaaaagaaaagaaattgctgaagatttgtgatttttcacaatacagttttagtagtcagattatagaaggttatggggaaaggtgtatggtaagaaaatagctgcagagaacttgttttagaacctgtcagagaaaggaagagacacagttagggagctatggagtcgtgcatgtgtttgaaagcagaggcgagacgccagtgtagactgaaagctggagaacagcgaagttaaaaggattaactaagaagcagagagggcatgagatgggagtgaaggaaagagcatggctggttaggcgagaaaataaggacttgggcctatggcttcgattttggtaaagagaagaagtcatctgctgagagtagggggcagggttataattaatgtaagtttggtgcacttgagtccttggtcaatttcagggcaaattatataatctttgtttacattagcatggctgctaaacacctctagcgttgtgtctttggatagtttatgaaatacagagttttttgcataatttaaactactccagtgttttcacagtgctaagacattttgataatattgtctgccttgaaaggagcagattttacttgtgcctcaggatattatgtcatttatcacttcacttttggcttatttttctttttatccccacactgaatttgatttaatttgttagcttttattgtcaattaaaggcaaaatgtcaaaaagttctaacctcaaacagaggtatgtgagcaaaacactcactttataatattggaaatagccatattagaaattaaatgtctgaggtcagatatggtggctcacgtctgtaatctcagcactttgggagaccaaggtgggaggactgcttgagcccaggaattcgggaccagccctggcaacacagtgagaacctgtctctccaaaataaattaataaatatataaatctggaggtggtagctcgtgcctgtagtcccagctacacgggaggctgaggtgggaggattacttgagcctgggaggtcaaggctcagtgagccatgatcatgccactgcactccagcctgggtgatggagtgatgccctatctcaaaaaaacaaagacattaaccatctaaatacatctgaaataaaagggctttgtaaccacagaattatagatgtagcagagatatttgaccttgttagttcaggtctctttcagatgaggaagagagattatctgaaacacattgtaaaatttggtgttgtagttgaagtctgtaaatctacaaccagagaaatagaaattagtatccacctgttaactcaaatgcagtttaaaaaaaacagctacgatttattgtgtgcctactagtgaaaggtctgaagtggttgttgattgcatattgtaatgacagagaaaatgagcacacttcacttgaaaaaaaaactttagagtggatgtagtggctcatgcctgtaatcccagtactttgggaggccgtggcgggccaatcatctgaggtcaggagtttgcaaccagcctggccaacatggtgaaacaccgtctctactaacaatgcaaaaattagccgggcctggtggcaggcgcctgtaattccagctactcaggaggctgagacaggagaatcgcttgaacccgggaggtggacggaggttgcagtgagctgagattgcgagactgtgctgcagcctggtccacagagtgaggcttaaaaaaaaaaaaaattaatgtactgtatgtatatatggtacaaagttcaaaaagtccaaatggatttgtggggaaaaacaagcctccctttcatacctgttcctcagctattctgtcgctcttaagcatttgtccagagatactctttgcatttaaaaacacacatgtatagttatttttttcttaaaaaatgatagcacactgtatacactattctgtattttcttgaaaatggtttcaaatcaatatgtatagagatgactcatttttttaaagaaggggcactaagtttttacattctacagaatatgtatttatttgatatactttaaggaaatctttgctgggtgtaaaattgggggacaacatttccttttttttttagtacttagactatattgctgtgtggtcttctgtatctgtgttgcttttgagaaattagactgacctgagtttttttcctttcttgtacatgatttcttattttttattttttttgagatggagtcccgctctgtcgtgcaggctggagtgtggtggcgcgatctcagctcactgcaacctctgcctcccaggttcaagcgattctcctgcctcagcctcccgagtagctgggactacaggcacccactaccatgcccggctaatttttgtctttttagttgagacgaggtttcaccatgttggtcaggctggtctcaatctcctgaccttaggtgatccgcccgcctcggcctcccaaagtgctgggattacaggcgtgagccactgcacccaacccatgattttttatttctaacttaatacctccatactttctttttattctcttcttttctttcttttccttttctcttctcttttcttttctttctttctttctttctttctttctttctttctttctttctttcttttctttctttctttctttttttttttttttttgacagcattttgctctgtcgtccagcctggagtgcagtggcaaaatcatggttcagtgtagcttggaaggcctgggctcaagcaatctcccctgcctcagactcctgagtagctgagactacgggcactggccatcatgcctggctaagtaaaaaaaattttttttgtagagatggggtctcactttgttgcccaggctggtttcaaactcctggcttcaagcagtcctcctgcctgggcctcccaaagtgctgggcttacaggcgtgagccaccatgcctggccataattctttctctagccttaaagttctataaacataatcaatccacaaattccaggttttacttattttgacaagttttatcctgttatgtatctttgaatgtacatttgttctttttgctttgtgagcctctttggacagttacatattctttctaacccccttcctcctccatatctgttgtcttctcagtaaattggttttatattgttagtcttatctatttcattttatatgatttcttcagtccttatctttcttttagtcacatttattctatttttggttgcttcttaatgtggcttttatctcaataatgttatttttctctccattttttttctgagttctatcagcttgactttcatttccttctgttgttgtataatctcttctttgaacctttgtttttcttctttgagctctttttttatttttatttttttaagaggggtcacgtttcctatggttgcctttgagactttggagaactatttatctgaactcttcctgtgtttctttgagtagttcttgtgttatatgctactaatttacctttttctctgagttttttttttttttccaaattgtatgcagacatcgagtattggttgttttctgagtgttgtttatgttgaaataggccgggagggtaggtgaagcaggctacagccttttttttggacatgttacttagtcatttctcaccaaatctgttatttagtttgaaagggtaggctggttcttcgtgtcggagtctatcacgaaatgccacctccactccacatctgccccttcagtgacccttgactgaagggttgcatgtacacagtggatctggcatggtaacaaggattcttcggttcagccagcccacctttctctggtattaacccgtggttcaaagagacattctctacttctcctttggcctatacttccatctagattccctccttggatgctagcatcattagaatcactgtacctcttattcgggattatgtatctgtgtattgctagaagcctgagaaggcctgtgatggctttccacacatcccttgccccgcttatactggcagataggtttcagtttatgatttggagtcatgatagcttccttgtttcagttgtgtagggaagttgcaaatttctactcatgactcattgtgtagatgatgaaatgtagtgtattttctatcacctatcatctttgtcagaggccctctacctttagtagtggatggtgggaagaaaaatttgtgagtaaacaggatcttggcctctgttggtttaaacagtctctttggggtaatgtgtttcagttttcttctatccccagcttctgctgaggtgaggtctgggagcagtgagagaggcctttgggaatgatgcttagatctgcctcgcggcgctggcatggggagaacgtagactcacacgcagtcttcctgaggctttgctacgagggcctgggtgggtaaccactgagtaacatctctcgctgttgaggctttgaaagccttgaggaggcttctcctgtccttagacctactacagtcggcccatgggctctgcatctgtggatccaaccaactgcagatatttgggggagcggggaggaaaagatttggatctgtactgaataggtactgccttttttccccccatctttattccctaaacaatagaggataacaactatttagatagcatttacattgtattaggtattataattcaaaggtattataggtaatctagagatgattcaatatatggaagaatgtgcctgggttagatgcaaatactacaccattttatatcagggacttggagcatccccggattttggtatctgcagggcggggcgggggtggtgctcctggaacccgcctcccatggattccaaggatcacctgtatttgcctgcagtcatcatggagttccccatactgtgtggtcttcatcctgacccagaccttcactggtcagaacttcaggattcctatcacgatgtacttgggttatttgcccagcccctccctccagccatgctgcgctgttgctgccacgccatattcagaatgccacaaaactgagccctgggcttcactgcaagcctgcagcctcccctacactgtgtcccagaagcagacctcttgcctggatatttttagggcaccttatacttgtcagaatgttttcagcaatctttgtccactgccacccccgccctatccccaagggtccagcagaagaggaaatagtgaagtctctgataatctgattttaatgagtatcttttaagagaaataagtgatagtgggggaattgttagggatcatatatcatagttctgctgcaggtttatctggaaacttgagcaagattaagtatcaccttgttaggttgtctaccatataataataatgtcatctgtaagcctctcatattaaagagttagggaataagcatcagtgagtgaaaggaagaaaaccaatagttctttcattttaaattagctatgatttttaaatttccattacttttatatttatttggaaattattttttttcttttacgagtatccctgttttgaaagattatgggtctttttttgcatattcatgaaggatgactggatgaaatcagtcatttatgattgacagaaatatgacagaactttgcaaagtttgaatggacttttgatattcaacaccaaagaattttgtctaattaaagcttctgtttaattaagataacaatgcatagtccttcattaaaattaacacagaaaaagttcttccttggtccttggagaggatattatatgcaagccctgttgtgtgggttgcaagatgtcactggaatttatatgcattacttgtctaattgcagtaaatgtagcatgtccagataggtttcgagttagaaggctgtttgttacttacggaaatcacttgaagcctcagtacccggaggcagctgttcacaggtccttcacctctccccagagatgactgggaagacgctgttgttggaccctgtctttcttggctggagcagtaaacatgacaggttgtttgggagccatctgtttaaaatggctgctgctttgtatgcagcaatgaacttgagatcagttttctgtctttcttcatggtaatggtcttatttggtgtcacaacaggtggaagttgatgggtcgaaactaaatgtgaccagcacgtggaacctggcttcgcccttattgtctgtcagcgttgatggcactcagaggactgtccaggtgagtgttgtaaggatttccttagagggcctcctcaagtccagaatccttgtcagcacctgtgtggctaatacttagagctataggagggaaaagctgtattttattcaccttatactttttacagtcgaaaactttttcttttcttattttagaggatcttaagttttaacctgagcatttaatgttttcttttttcagacaatccaagaaggttcatgtattgtactttgttgtaaacaaggaattctgcaggcttttctaaaaatgctagattagctgtttttttttttcctctgtgggtttttagttgtaaaatacaacttactttgttacctttcttttctgtgcagttgaaattacgtagtgttaggctagtaaaacttgtgttattcaggttgactttccacagctcactgatgtcctttaaaaatttagtaatcttaacttattaatctttcttttcgcctcaatataaaatgtcctgccttgaggagatgccttggaacccagagtcgatagaacattttttgtaacctgtgacttccattttaaagtagaaagttatgaaaagagattctgccaaaattcttcaccttacctcatatttgaggtttagcgttttaggaaaaaaaaaaaaatcatggaacatgtggctatcacaggctaataaaaatctagccccacccatagcattaaatgctcattctttgttcttttttatgaaaatcatcttaacttgattttacacaggaaactggttttaaaaaccttgagaaatcaggataatcacagattaagactacttactccatacctgattcttatctacctctatgagagaccgggatagtggacatcagaatccacaaaaactatgtgatgactgaactgatttctaagtcagtttcaattgatatattatctctatggttccaagtaaccttgaactcttggtaataagccctatattttgactttggttttgtgacttgtcccagtatattttttctcatttttttaattttctaactcctgtcttttctcatattttataacttaactcatattatataactttatataatattatatcagtataaattatgagttgaaatagtttaagactcttgaaaaaaatatcactacataatttcacattacttagatccatgtattattatgtctttaaaaactgtggtgtctgggcacggtggctcacgcctgtaatcccagcactttgggaggccaaggcaggcggatcacctgaggtgaagcgttccagaccagcctggccaaagacagtgaaaccctgtctccactacaaatacaaaaattagccgggtgtggtggcgggcgcctgtattcctagctacttgggaggccagggcaggagaatcacttgaatctgggaagcagaggttgcagtgagccaggatcacgccattgcactgcagcctgggcaacagaacaagactctgtctccaaaacaaacaaacaaaacaaacaaacaaaaaactgtggttttgttatactggtttatgttcgatagactgtacagtgcatcgaatatgttatggctcaagtgtttgtcagagggacatagtgttaactctcagtagtcagaagaaagaggtacaaactcctattatgcaaattttttgtattgtgttactttcatcatccttttcagtgagtgcgcagatagttgtcttgatggcacttttacatgtagaatttatagctagattaatagggatacatatgtagaataatcaaaaatattttccctagtgtagggatcatgttcggtaaatccctttttaatcctgtaagtactttgctactaaaagaattaatgtgtctgaaataagtgaccccttaaagagagatcccttgactcttaggaagaggtcgttgcatcaagttaagtactctctaattggaaggaaataaactcagagaggtaaatggtgtactaggaaaaacagtcgtttacctaaaaaaaaaaaaaaggtaaggagagtttttccttgtgaaaggggatggattttatttactttctgtaggcattagcattatatcgactctttccaaaaatgtaatgtggcccctatgaagataataacaattgtagtaataataaataacacacagtgcttactgtgttatcaggtgtagttttaagcatagtacagatatgaacttctttgatcttcacaattgtatgaagtaggtgctatttatagttttataaatgagacaactgaggctcagagaaaagtaagtgacttactcaaggtcaccagctagtaagaggtaaagccatgattttttttttttctttttaaatgagacaggatctcgctctgtcacctaggctagagtgcaatggcacaatctgggttcaccgcagctttgacctcccaggctccagcgatcctcccacctgagccccccaggtagctgggactacaggtgtgcctgccaccacacccagctaattttgtttattttgtagagatgaggcctcactatgttgcccaggctggtttggaactcctgggctcaagcaaccctgcctcctccccgaccccccctaccccccacccccacccccaccccccccacaccctcagcctagatccatgatttaaatccgagcagtcttgctgtaggtaggatccttgccatcaagcattgcaggatgctgaggcaagctatgtaacttcctgggcatcacaaagctaggaagaagcagagcaaaaacttggtccgtggcagtcatgtgtgctttcccccactatgctatagtactttgcgatttttcctatcacattcttcttcaaattataattacctgtcattcatgctttaaaccagagatgcttaaactttaatatgcttcagaatcaactagaagccttgtggaaactcaagttgttggacccacccatagcttactctgatttagcaggtctgggctaggtctgcatttctggcaagcccccaggtaatgctgctggtctgggccacatttggacaccctctgctttaaacctttgtagtcagagaatgagctgaggagtggtgtgccccagcaaggtgggtaggaaccgagtcacatgagccttattaaggacataggagaggctctactttatccctaggtcagtagggacccgtggaagagctttcagtaaggaagtgatgattgaacagaattgtagcttacgaggtttttttggtttttggctgctttgtggagagtggcttgaagaagcatgaggtgaagattggaggcaaagagagaagtcagcagatgttagggattcggaggtaagaagtctcagcagctgtggggatgagggcactgtgtgcagaagggatctgcaagcgtgacaggagaaagaactggtggctttacagtcatctgctgatttctcttctgaccactgttagcatgggcaaacctccaaattctattcctgactcccccttttctctctctgcttgcttcctgggctgcattgctccaagagttccagcttaacacctccaagcagatagctacgaaatgcaattataagtgtttgtgtgtctctttgcaattgtttattctgagaaataagggatgaatattaccaaaggcatttttcaagtgattttacagtaatcacttgaaattgattactgtagtaattgattactatagtaactgtaggtactttaaagtaataactacaattcttttttctctggatttttgagcatacatataaactttatattcttaaatagtattaaatattactatttatcattaacttgtatcattaaattttattattaaacctcatttaatataaaataatatgtattattattattttgagacacagcctccctctgttgcccaggctggagtgcagtggtacgatcttggctcactgcaacctctgtctttcgggttcaagcgattctcttgcctcagcctctggagtagctgggattacagacacgcactaccatgcctcgctaatttttgtatttttagtagagatgaggtttcgccatgttggccaggctggtctcgaactcctgacctcaggtcatccacctgcctcagcctcctaaagtgctgggattacaggtgtgagccatcacacccagccaaaaatatttattatatctatataaaagctaaagaatgacccaatgaaaacctgtttacccactatctagattaaaaaaaagaaaacaggctggtcactgtggctcacgcctgtaatcctagcctttgggaggccgaagcaggcagatcacctgaggttcggagttcgagaccagcctgaccaacgtggagaaaccccgtctctactaaaaatacaaaattagccaggcatggtggcgcatgcctgtaatcccagctactcaggaggctgaggcaggagaatcccttgaacccgggttgtggtgagctgagatcgcgccattgcactccagcctgggcaacaagagtgaaactccgtctcaaaaacaaacaaacaaacaaaaaaccaaaacattatcagtgctatttgtatcattcttccttgattaaatcctcctttccagtgtccctgaagaacaccattatgagttttaaattgatcactaccttgcttttctttagggatatttatgaatacaccaacactgtgagcagtatcttgttgagctgctcttgtttttgaaccttgtaattgcccccatcctctctgtgttcctccaggagttgtcttctccccaccagcatgatgtttgtgagcctggcccatgttgctgcctatagctgcagtttatctacttccatacatcatattaatattaccaccaattacttattctcctctaaatagacatctgtgttattttccttattttgttgtcacagtgatgcttgtatgaacaccctacttcctgtttcctcttgacataggaggttctccaggtcatgtgccggtataacagccatgctgtggggcctgtgctttctcattcctgcatggcaaggccaggtgggtttctctgtgtggctgtaccagcttatgtgcccatcagtagtgaagatgatagtcacaatgagaacaatgaactaaccttattctgtacttattatgcccggcactgactgttctaagcactttgtatgtatgaatgcccccaaaaacccaataaagtacgtactagtgttatccctcattttgtatttgggaaaacagaagcttgtagaggctaaattgctttcccatctggtagtaaatgggagtgccagaatttgaaccaaggaatctgtgcccttaacattttttttcacatcctggtgaacccttggccttcccagactacttaggtttttcctgactggtgggtttagatggcatctcattatggttttaatgtatacttccctgattagtatgacaatgaacattgaaaatatatatttattggctctcttgttttctcttctgtaaaatatctgctcatgacttttgcccactttttaaattggattatctttttcttattgactcataaaagttcttcctgcgttatggctcctttttgtcgtatgtgttgataaagtagcttctgtttttattgttttaagttatccaagttaagttttaaggcaagatttaatgtcagaattttcaatattttcctttatggtttgtgtgttttgcgtttgtgtagataatcttgttctactcctaagctcacaaagatacctatattttcttttaaacctttttaaattgtgcttttcaaagttaactacttaatcctcatgggattgatttttgtacacggtatgagtggctcacgcctgtaatcccagcactttgagaggccgaggtgggtggatcacgaggtcaggagatcgagaccatcctggctaacacagtgaaaccccatctccactaaaaatacaaaaaattagctgggtgtggtggcgggcgcctgtagtcccagctgcgtgggaggctgaggcaggagaatggtgtgaacccaggaggcagaacttgcagtgagctgagatcgcgccactgcactccagcctgggtgacagagtgagactccatctcaaaaaaaataataataataaataaaataaaatacagataccaggccgggtgtggtggcttaagcctgtaatcccagcactttgggaggccgaggcgggtggatcacctgaggtaaggcgtttgataccagaccagtctgacctgtaacatggtgaaaccctgtctttactgaaaatacaaaatattaaccggggatggtggtgcacacctgcagtcccagctgctcaagaggctggacccctgcactccagcctgggcaacaaagcaagactccatctcaaaaataaataaataaataaataaataaacaaacaaacagataactcgttatgccagcacaatttaatgatagtcgtgcttctcttcccttactaccttgccaccacctcacctttccaaccccgaaattctttaaaagcggtttctgtgattctcaattaattgtaaataaaaagatgatttttcgcttaatacgatcctcagtatatttgcttctgtgagctctcagtcagttgcactcttttattttttgttaatcttctggaaacccttagccaagggcatcagatgatatttgagatacaccttagaaaaacgtgtttgtgaatcaacaggcaaattgggaagtattcatttagggaagtaatgagagctaaacatggaaaaataggttggaggaccagatagtgaatgagagcctgaagaatctatgcttttcagtcagcagtggagatattacaactttttgcagagtacagtaacgtccatcaaaatgccattgtagaatattaatgtgtcctcataatagaggaggggttaagggattgaagggtgaagtggagatggagttcatttagaagacaatcctattactgccttcatcctccactagggtgcaagcagtgtagagaaaaagggggttgagtttgagagaaacctatgtttccatgcatagaaaccactttctgtttctatgaatttgactactgtgggtatgggtaccgcctataaatgaaatggtatagtatttgtcttttgtgactggcttatttcacttagcatactgtcttcaaggttcatccaggttatagcatgtgacaggatgtctttcctttttatggctgaataatattccattgtgtgaatatactacatgttgtttatccattcctctgtcaacggacatttgggttgtttctaccttttggctgctgtgaattatgcttccatgagcatgggtgtacaaatatctgtttgagtaccccattcttttgggcatatgcccagaagtggaattgctggatcacgtggtaattgtatgtttaattttttgaggaacctccatagttgctgcaccattttacattcccattagcagtgcacaataatttcagtttcgtgccatctttgttaacacttgttattttctgttttgttttgttttttaataatagccatcctattgggggtgaagtggtatctcattgtggagcaggacttatctagatagtaactgaagaaaaagcattccgaatacttctaggatgtgtccttcctatattggtattactctgtaaccagttcactgcacaagtggcacttttttcagtccaagtagaagcaagtttcttagagctgtttttttttttaaaccctttatttcaacttctttccttcccatatataaaaccacataccattctaacagtctgtaatgttgctaccaggtaataaacaagccatactgtatttgggagaggagggtgtgtttcaaagtctagttcattgtaatatcaaaactggtaaaacctctcctctctaaactcagtttgacctcacactgagaaacctttactagtgcagaggagaatgttgctttcttcttgcttgctttatattgtaggggcaaaagggtgtgatcccactcctccccatcataagggtgtccatggcagacactcctataacaaaagacaggttaacaagagaaaagtataactgatttatttaatcaaagttttatgtgacatgagagtcttcagaacagagatccaaagatacaaggaaagctgtccattttaatgcttaggtttaatgaagaatgggcagccgtgtaaaactgatgggacaaagaatgtaagtgaatgctagtaggctgagaggaacccagcaaggcctatgttcagatcttcctggcctctcttgtactatttcttcctcccaggtatgggacaagacccatctgggatgacggtcttatgacctgctactgttgtagagaagggtaggccagagaatttctttatgagcagctcttagaaaggcagggaggggttagagtcctctttctggtttcatagttgtctttgcgggagaggaattctgatgtctgtgactcatctcaggagagaatgaggggtgagagacaggaaggcagaaggtcagagatcttagttctgaggttacttctgaggccttctctttggggtatcattttctgagcctcaacaatacccttttctacttcagagctgctatattgggtctctcagaatttgcagtatggggtaaagatgagaagagcatggcaggaagaaccaggttttctggggcagaggcaacctggcattcactctcttggggcatggcagatgtccaaagctggccggtagccctgggatactttcatgtggatttgggggaacttctcacctgcagaacacttaatgcctcctgtcttttccagttgcctttggtctcctgagcaactactgtgttgactctgaatgttctcactgggcatggtccctcataatgaccccgcctgcttttctcctgcacaatccacgtctggccacaggaaatagtaataagtccttgcctcaccaaaccaacaaagtacaagcttctcttcttggtctgtctctaagaattcgcatgaataagtgattctcatgaagtcgctttcacgtagcttaagcagagttcagccttaaattctaagcttaagaattcgacctcctcaaattaattttcctcttttattcttttaaggtgggagatggacagtcactggtcccacagcttcctagcacattctaccaggtagccttggctagcatctgacttaaagatgtatgggtacttggcgtctacttctttttgttgctgaacccctgtgattccatgaaaagtagtgcgttcatctgttcttatattgctataaagaaaaacctgagactgcataatttatcaagaaaacgggtttaaatggctcatggttctgccagctgtacaggaagtatggtgccagcatctgctcagcttctggggagggaggcctcagggagctttcagtcatggtggaggcaaagcaggaggaggagcatcacagggcaagagcaggaatgagggtgagagagaacggggaggtgccccactcttttaaacaaccaagatctacctctgtgatccaaacacctcccaccaggccccacctgccatgtcgagaatcacatttcagcaagagatttggagcggacacatccaaaccatattaaggagcatttaacttctttatctgattagatgagtaagtagttgggaaggcaacttacctttgcttcaggaattagctcccgattcatccagtccgatcacgtgtattcatgttcctggttttcattggtaaacttcataagtttaatattacccattaaattcctttaaaagtaagttgtattttggtgtatactgtcactggtagagggtcatgattgcaagttatccaggttcttggcgttttgaacaaagaattggacaacatgtccagcaaagcaaacaatgaagcaacaacagaacaaaaacagggatttattgaaaacaaaagtataggcggccaggtgtggtggctcatgcctgtaatcccagcactttgggaggccgaggcaggtggatcacctaaggtcaggagtttgaaaccagtctggccaacatcgtgaaaccccgtctctactaaaaatacaaaattagcctagtgtggtggtgcatgcctgtaatcccatctacttgggaggcaaagacaggagaattgcttgaacccaggaggtggaggttgcagtgagctgagatcgagccattgcactccagcttaggcaacaagagcgaaactctgtctcaaataaaaaaaaaaagagagagagagaaagaaaatgaaactgtactccacagtgtgggagcgagcctgagcagtggctcaagggcccggataccgaatcttcttggttccaaatacctgctagaagttttccattgattactttatactcacctcatgtaaatgaagttgcagcctataaggttgcagaaagcagccaaccagaggctgaagtgaagttacaaaggtcacactcctgtgcaaacatgttgcaaagttatactcttatgcaaatgaagacttggctggcaatcagtctgattggttttggacagcaaccattcagagactggagtgaagttacaaagttgcaaagactggacccacagtcaatctgattttctgatttgttattggatgggaaattgactgtccgatttcccatctgccacacagaaaaggtgggtggtttgcaaagggagtagcccctggtccttttattacttaggtgtggaaagctaggattttcctttcaatttagttctaggaagttggcgtgaaacagccttgggttccctgcctccagaccctattctcctgcctcagtgctatcattagaataataaatttcataggttattaacctcttttaattgatctaaatcacctgtttccttttggatttgacttttaattcccactgccctgctgacttctcggcgcatataaatgctcaataattggatgaataggtgtgggtgggtgaatgggtaagtggacagtcatcttacattatagaatgttttgctgattctttttagttcctgacctcccaacatttgcgaaatccatactccattagtgtggctggtggacctctcttgatacagaataaccatggtttctgtgagagcaaaaagaaacaagagggctcccaaggacttgcccacagaggcgctttgctcaccaagcatggttctttcctgttggcctctgtttgctctgggtagcacctcggctgttttaggcccacagtatcacctattgacaagtgtagatagctattgatagtatcaataggtgtaggaaagggtctgcctcctgctattcctggttttctctttctcaaaggcttgtgcatgccctaggctttctcactgtccgttgctgggtgaggtcatatcagctcttactcccacagaaccacccgcacctgctttaagtacgctgcctttctgacttcaagaaaatcatactctcggaaaaagtctaatcattgtggataactttgaatatggagctagtgatatattacctaagggaggaggaaatcacatattttgaaatgataaagaaccaggggcataaacattgagaactcttgaaaataattaaaagttctcttcagaattttaaagtctttttctattaatttctctaataatttagccaacttttcttcaaatatcatcatttaaggaaaatgaaataactattttatatttatttgtttatttgtttttttttttaccagtgtttctgttttcattgccgaagtagtcagttggtaatgacgtttattaaatagccttatctaatagaaggctaacacaagccatatttaaaatttctttgttttaattaattagctctttgttttgttttgtgtttgagacggagtccgttgcccaggctggagttcagtggcacaatctcagttcactgcaacctccgcctcccagactcaagcaattcttctgccccagcctcccaagtagctgggactacaggcacctgccaccatgcccagctaattttttgtatttttagtagagagggggttttaccatgttggccaggctggtcttgaactcccgacttcaagttatctgcccgcctcagcctcccaaagtgctgcaattacaggtgtgagccattgttcccaactgtcatttaaaatttcttagtagtcatattaaaaaagatgaaacaagtggaattaattttactaatacattttatttaaaccagtgtacctgtggagacaaaagtgattccatcttaattgctaatgcaccatgttgttttttttttcttgaaggcaaaccttgttgttttaatgtaatttattttttattttactttttttttaatgatagggtcttgctctgttgcccaggctagagtgcagtggtgcagtatggctcactgcagcctcaacctcccagactcaactgatcctcctgcctctgccttctgagtaggtgggactgcaggcctgtgccaccacatgcaattaattttgttgattttttgtagagatgagggcacactatgttgcccagaactcctggactccagtgatcatcccgcctctgcttcccaaagtgctgggattataggcctgagccaccactcccagcaaagccatgttgatttctcattagccccagtctcgtgaatgcctcctgattctgattttatttactgtttttagtgtaagaacaaagcagccttgatcttaccacacaaattataggcagtgacgcacatagcattcccacctgttctggaggatgcctttaattgcctctgtagagcacgtacaccctttccctgtggcatataagctctgggtctggccagtaacagagtgggttatacctgtcttgcagccatccgagatcacgcttctgtctgtaagttcccccaagaaaacaccctttaccaacaaattgagtttctttgccttattctttggtttcttggctccctccgcatttgggggctgctttgcatttatggccctttcacagaataataccccaaatgttgtcatttcaacatgaaagacttttaaaaattactaatgtgataccagaaacaacatagacattggcattaatacaacagtatcttaaacaatggaacggtcagagtggaatgtagtcctaccaaaacaatggagttgggtttaacagaaaattacactgcttcagttttaaaattaacattaaatacaattgaaaatttaactcctcagtcacaccagtcatatttcaagttctcagtagctacgtgtagctagtggttactgggttagaccactcacaggcaaaattttttgtaaaccagagagtgtttacagatagagaaaactctacataatggtttttaaagtattcccccttaatgtcaaccacagttttggtttttatctcttaaaatttggaatagatgagttgaatttatttttaaacagaagatgaatttatcatctagctgacaaactttttaaatttcccattagaagatttaaaaaattacaaccatttttaaaacgtggaatgatttcctgcctgtggcatataattaaagtgatgaaacaaacagaagattcgctgtgtcctggccatggtgagctcactctctgttttcctcacaaaccccagaacctttgtagtgtggaacctgctggatgaatagaagttttttattttattttatttttttactatgtctatattcctgtgaagtaatttttttgaccttgaaagaagttcttcaattttgctgttctctatttcttacagtgtagtttgtgtaccgggatttaatgtattgtttgtcgttagcgttttacatactagattttcatcgtgcatagtcacgttgtttgaacatttgcaagcagagccgactaactgctgttggcctgtttctttgtatggcgtgatttcttctatccacctgctcacagcaggttgccttcaggcctgaggagtagctaaatacttttgaaaatatcttgagatcctgctaaggtctaacaatttctgcatttgtgtgatgtgaagctattcatgctgtacctttgaagacttttttctttctatttctcatattcttgctcaaatattttcaaaagaagataaatttattataaataacagtgcagagctgattgtagcaccactgcattctatattgaataggtctttgatattcagctaagtggaactaattttctatgttaaagcagacaaatttggaatagtgtcacatgaatctcatgttatttactgaagaataccagattaaatggattagttgtgaaatgactagagtattaaattatatatatatatatatatatatatatatatatatatatatatatatatatataaaacgtgataacttaaaatgcccagtgggcctatgtaatataaaatattacacaagcacatgaatatgatggacgagatgttattctgtttgcagattgtgaaactatctgtagtatatatacaaatggttgtccacacagaatttgaatcaattttaaaattgtaaccttaaatttcagttttgaagaaaataaattgttgattttcatatctacttgagaggaagttaaaaatgttattttcttttcagttttttttagattaaaatagctcccacaccctccaagaataaactttagttttaatcctaataactgtttatagatagtaaaattaatattttaattagaaaaataaagcggcatacatttttgcctgtactttgctggtacacaaatgaattgggaagtaattgtcttatgttttcagtcctaaagtgttttacaggttttaaaaatgttccccccacccccatctgtttgaagtcattattattttgtactttacacatgtgatttctctagaatcattgcatgtgacatgacactctcaggatatataggatatataaatatataacttagaataagtagaggttggtatttttcgaatgaagtaggaaatgaaagagtaattattaaccatatcctttttacattcctgacatatcaatacagctacacatcttagaaacaagctcaccagtagaacagaaataactctgttgactctgctttaaaatatttcaaggcagtttaacagctgggatgtatttacagctatggtataaagtattaattttgatgcaaggctacctgcttttgtaatgtagtcctagaagcttagcagttttctgggttttataatttggagttgcttttaaaatttaaccgaatgggaaaatgtctttctgaacttccccttcccacacccccacacatacaagcttttctcctcttctgttaactagaaaattatattttcgttgctgcctgaggaagagaattttgagtagtataaacactgattgtagtaaatgtggaaaataatacaaacagctgcactgcagaccgataagacaaatcccacagtaatggcctttaaaacatattaccaagttggaaatcagtgaggggaaaaagaaaactattactatttcttcctcttactgttcagtgacattatttttaaaggtgaaattacctctggttttattatcctaggaaggtatttttggaacatttgatttattgttttgcaaatgtttttgcctttgtgtgaataactttgctaattttgtatgaatttgattctaacaaatgttgaagtcattttgttaacaaaatcttctaaagtattttttaaagaaataaaaaggaatatattatgtaaacattggagcagactatcaaaataagaaaaggagaacatttttatctggctttggagtgccatttaaaataggaaaagggatgaaatatttgcagaaaatattttaataagcgtggatatgtttcatcaaatacaagtcttaatttttatgaagaattttgctattagcatatcaagtggtcagttcatatttgttttggcatgcattagactcatgataggcattgaatactttgttttttgtggattctaaaactgaattatcttaatcctaggctctaggaaaagtatatcttactgctagggaagattgaaataaattccagttctgagtgaaattttatttctgtttttctttacatcaatcttttctttttccttttttcttttttttttttttttatttttgagacagagtcttgctctgtcactcaggctgtagtgcaatggcatgatctcagctcactgcaacctccgcctcccaggtttaagcgattctcctgccttagcctcctgagtggctgggattacaggcgcgtgccaccatgcccggccaatttttgtatttttagtagaggcaggatttcaccatgttggccaggctggcctcaaactcctgggctcaagtgatccgccttccttgacctcccaaagtgttgggattacaggcgtgagccaccacgcctggcctgtccttccttccttccttcctttacaaactgtgggagagtggtgaaaaaaaggtgacagtcattatatatgtaattgtgacctgctttaaattgaatgcaatgttaaggacagcttattggtacttatacctatggtcacacattcattgatacagtttgtttttaatgtgaaaatttgtttccattttacataatacaaaattacttctatttgcctgggaatgaatctaacctttgtagtgtcagccaaaggaatgataatattgttttagtgtctcctacatagaagggaacgcccagtatggcctaggcagtgttctagactctgcagatagaacaaggaacaagacttaccttccagcagggggaagtagatactaaacatgtaaatacctaaataaggtgattttagtactaagaagttggatgaagactatgaaattgatagaaagtcactagagaaggcagctttagcaaggatggctaggaagtcctctctgaatagctaacactgagctgagacctacgaagaggagggggcaaacgtgcagaagtctgggggaaggaagtcccaggtagcagaaggggcaaagcagaggctctgaaacgggacaagcttgttttgtgtgaaggccagttggggagagtggaacgaggaagacagaaccagatcatctaggggccaaagaactgttttgttttgtgttgtttctttctattcatgttgtggagcgtttggagggtttgggtaggagagtgatgtgatgtgattttttaaatcattgcaggccttggggtagagacagagaaatcattgatttgaccattgcagacctcaggtgagaggtactggtggcttagaccaggaggcaccgtctgtttctatggggctcacaacttgagtggttattacatttttaaatagttgggggaaaaaattaaagaagaatgtttcatccagcctgggcaacatagtgagaccttgtctctacaaataatttttttaaaaattggctgggtacaatggtgcatgcctgtgggtccagctgcttgggaggttgaggtgggagaatcgctggagtccaggcagttgctgtggagagctgtgaccatgccactgcactccagcctgggtgacagcatgagacactgtcaaaaaaaaaaaaaatcaataatgtttcatgacccatgagaagtatgatgtcacattcagatcttattgatgataagcagttaactagaacatagccacattcattcatttttgtctgccatgtatagctgcttttgcagtttttgtcgtatgaagctgaatgcacagactttcttgccacgcagcagttcagtgggttattgtgatttttttttttttaatctcaggaccaagattaaagttttttgtgcagagttgcaggtagccaaattactttttgtattcctgtgccttagattcctcatctgtagagcaaaattgagatcgtctttcaggtctgtttgctctccacatcctaaggtcctaggtctgaatcagacttagttcttctgttgtggctgcttagcacatcaggctcctaactgaatgattgtagtggtgttttactcggtctcctagcctcgtccttccccattctatgtatcttcagcatgacctcagaccaccgtctttctaaaacatgagcatgtcacactccagttcttaactgtaagaactttgtcaggtatgagctctctttgtacaagatctgacctgggtttataattccttcctggtttcctttcttgccacttccaccttcatccaaccctatttctggccacgctgaactgcttaacattccctaaacttgccatgccatcgtgccatcccttaatctgaaatttttgttaactgtctcatcagcccacaatttttttttttttttttgagacggtgtctcgctctgtctcccaggctgaagtgcagtggtggtgcaatcttggctcactgcaacctccacctcccaggttcaagtgattctcctgcctcagcctcttgagtagctcggattacaggtgccaccaccacgcccggctaatttttatatttttagaagagacgggatttcaccatgttggccaggctggttttgaacaacctttttttttttttttttttttttttttttgagacggagtctcgccctgtcacccaggctggagtgcagtgatgcaatcttggctcactgcaagctctgcctcccgggttcacgccattctcctgcctcagcctcccgagtagctgggactacaggtgcccgccaccatgcccagctaatttttgtatttttagtagagatggagtttcaccatgttagccaggatggtctcaatctcctgacctggtgatccgcccaccttggcctcccaaagtgctgggattacaggcgtgagccactgcacccggtggttttgaacttctgacctcaagcaatctgcccgcctcggtctcccaaagtgctgggattataggtgtgagccaccgttcccagctgtttttcagttttcttttggaaaattcctgctcatttttaaaatttgtaattggtttttaattgataaattaaagttgcatatatttgtcatcctgtcttagtagtgtcttttgtgttgctacaaaggaatacccgagactggataatttataaagagaaaaagtttatttggctcgtgattctgatgtctggaaaagttgaggattaggcatctgatgaggacctcaggctgcttttattcatggtagaaggcaaaggggagctggtgtgtgtggaggtcacagagtgagagagaagggagggaggtgccaggctcttttaaacaaccagctttctcaggaactaagagcttgaactcgccctcaaagagggcattaatctattcatgagggatccttcccaatgatccacacacccccattatgccccacctccaacactggggatcacatttcaacatgaggtttggaggagataaactttcaaactttcacacatgtacaacatgttttgaagtacacacttcaaacagtggatacactgtggaatggctacattgagctaattaacatatatgtattacctcatatacttattctgtatgtgaggtacacttaaatatactcagaaaatttcaagaatatattaataatacgtcgtcattaactgtggtttctatattgtataatagctttctcgtacctatttctcctttataactgaaattttgtgggttttgattaatatttcctcaacaccccctccccaaccaccattctattttctactctatgagtttgacgtttccagattcttcatgtaagtgaggtcatatggtatgtctttctgtatgtacctggcttattttacttaatgtaatgtcttccgggttcatccatgttgttgcaaatggtaggattttcttttttaagtctaaataatattccattttgcatattataccacattctctgtatccgttggtccatggatggacacttaggctgattccctgtcttggccatcatgaatagtgctgcaagaaacatggggatgccagtatctccttgacataactgatttctttcctttggatatatatgcagtagtgggattgttggatcatatggtagttctatttttaatgttttgagaaacctccgtactgttttccataatggctgaatcttgttcatgttttttttctttcttttcttttctttgtttttttgaaacagagtcacgctgtggtgcccaggctggagtgctttggcacagtcggctcactgcaacctccaactcccaggttcaagtgattctcctgcctcaggctcctgagtagctgggactgcaggcacctgccaccacgcccggctactttttatatttttagtagagccaccgtgttgggcaggctggtctcaaactcctgacctcaaatgatccacccaccttagcctcccaaagtgctgggattacaggcatgagccaccgcaccctgcccctgtttgtttttaaatatccagctttaatgtctgtcttaacctatctaatgtcttccttattaacctttctgctcatttagtcggtctgtcctcttatcccataatactttgtacattttgtactatgcatttatcgtattgaattatacttatttttccaataattctgctgtcttttccttagtctcttggaaggtgggtcttaattcagccagcagtgcccaacacagttgagaggtagatggatgattagatggatgaccaacgtagaaatgccagtgtcaaaacctaggaatcaaccctccgttcttaactgagtctccctaagacacaggaaaggagtctattttattccattttgttttctgtctttttttgcctttattaagttcaacatgtgtgtataaaagaataggaaaaacagataagtgaaaacgagagtcaactaatatttttgcctagaaataagttttatgtgcactaattctagaatttttctgtaacataattttttacaaggcttattctgaacatattgttttgttcttcttgcccttagaaataaactgtaagcgtttttcatatcttgaaactttttaaatggcaggctggatatataccacaatttacttagctagtgtctttccccgtcatttacatttcttgccattgttcagttctataaactacactgtgatatttgttcagctttatttttctgcctatccttacattttttcctcaggataaattcttagaagtaaaatgggttggctgggcgcagtggctcacacctgtaatcccagcgctttgggaggttgagggagcgggttatgaggtcaggagttcgagaccagcctggccaacatggcaaaaccccatctctactaaaaatacaaaaaattagccgggcatggtgggagatgcctatagtcccagctacttgggaggctgaggccggagaatcgcttgaacccaggaggcagaggttgcagtgagccgagattgtgccactgcactccagcctgggtaacagagtgaaactttgtctcaaaaaaaaagatgtgaaatgggttggttgggcatggtggctcatacctgtaatcccagcacttttgggagctgaggccaggagttcgagaccagcctggccaacatggtgaaaccccgtctctactaaaaatacaaaaattaggcagatgtggtggcaggtgcctgtaatcccagctactcaggaagctgaggcaggagaaacacttgaacctgggaggcagaggttgctgtgagccgagatggtgccattgcgctccagcctgggtgacaagaatgaaactctgtctcaaaaaaaaaaaaagaaagaagtgacatgggtcaaaatgctcccatactgattttttttctactctataccacactgccttaagtatgctatctagattaccattgtgtcaatttacttggcaatatttgcaggtaggggaaaacattttgcattaaaccactgtctttcttattgatctaacctccctccgtcaaggaaccgaggactcagcttgatttctagaggttcactctgggttctattacttctgtgatcatagagatcagagttggtaaacctccacttctgtaaaaaggaatgaaattaggatacatctgtatcgtaatgctcatggcatgtagttgagtgaaagccactaatactctacatctgggaacttaaaaaaatgatgctggcttagttagaactgctttatttgtgtgtgtagtctttgaagtcactgagccctctctgattagccagaagaggaagaattctgaggaatacgttaggattaagtagagcaagttttttttgtttttgtttttgttttttgagacggagtctcactgtcatccaggctggagtgcagtggcaggatcttggcccaccacaacctcacctccgcctcctgggtccaagcaattcttctgccttggcctcccgagtagctgggactacaggtgtgcaccaccacgcctggctaatttttgtatttttagtaaagacggggtttcaccatattggccaggctggtcttgaattcctcacctcgtgatccgcctgcctcaacctcccagagtgctggaattacaggcatgagccaccgcgcctggcccaacagaccagttttgtaggtgagaattatctcacagtgtagtcagcttccagtgtactacttattcacccatttttagtagcagtagtagttacttttaactaaaattttaatagtcatagtatttacttttaattaaaattcaaacaagatatatgcaagtgatatatttgctgtaaacaaattttatttataaataaatgaataataaagaggttatttctttcactactctctggacatagaattgcattgttgttttaaacaaatgctaattcattttctataactattttattgagatataattcacacaccatacaattcacccatttaaagttacagtttagtggtttgtagtcaattcacaggggtgttccaccaccaccacagtcaattttagaccatgtttatacccttgagaaaccccacaccaattagcagtcatctccatgtcctcccagacctcctcttggaggcatctaccaatctaccttccatctccatggattttactattctggacatctcttattaagtggaatcatataatgcatgatccttggtgaccaacttctattgtagcatgtatcactacttcattcctttttatggccaaataatattccactgtatggctatactatattttgtttacccatccatcagttgatggacatttgggttttttggctatcgtgaacattacatacaagctgtgcagatatgagttcattttatatctcttgtttgttttttagtgtctttctcgagaagcaggtggaaacatgagcattcagtttcttggtacagtggtaagtatgaaatcattctttattctcttaatttacagagaaaaaatgttcaactagttgtagctcatgtgtttgaacttggcttcattactgctagatatttaaattacctctacttttttgcctttacaaatgatattctagggaacaacttcatatatttcactttattttagtgtttggaattattatcttttttgagacagagtctcactgtgttgcccatgctggagtataggggcacaatctcagctcactgcaacctctgcctcccgggttcaagcgattctcgtgcctcagccacccaaatagctgggattacaggtgcctgccaccaagctcggctaatttttgtgtgtttttttctaaagatgaggtttcaccatgttggccaggctggcctcaaactcctggcctcaagtgatccatccacctcggcttcccaaagtgcgggattacatgtgtgagccatgtccggcctggaattattttcaaatgtggataagatatttttaaacatgtatgatatattttctcccaaatagaatcaaagtcataaatagttttatggcttattatacatgttgcccattattttatgtccctttagaacaccacccatcatatattagaacacaactttgcattgtcacctagtgtgagttgtaattttcaagattagtaaacttgatctgctgaagagtttcaatttattattactattttacttataagtttataattagtattagttactataattttcaaactaatttgtttaaaaaggtaccttatttggcttggtgcggcagctcacgcctgtaatcccagcactttgggaggctgaggcaggtggattccaaggtcaggagtttgagaccagcctgaccaacatggtgaaaccctgtctctgctaaaaatacaaaaattagccgggttgtggtggtgggcgcctataatcccagctactcaggaggctgagggaggctgaggcaggagaatcgcctgaactgaggaggtggaggttgcagtgagccacgattgtgccactgccctctagcttgtgtgacagagcgagaccccgtctcaaaaaaaaaaaaagtaccttattttaattttcatttttctgtttattgctattgtatttgaatatttctccatgtattcattcaccagatatcatttctaatctgtgaaatgtctgttcatgtcctttgggtacctcattcaggatatggattcatattgggcatttcagataactctggagtttattaagaatatcagaggtattctgcaagaatatcaagaggtatttcaggcgagagagcttgcgtgaaaaagggttttgcagccattgagataggaaggatgttaataaaatgtgtgtttactgaatgctttatcgattatagagatgtatatataatttatgtatataaagtatatgtataggtacttggtcaatgtaacctaaattttaagtattggaactaagttttgtgattattcttgtttttctgattagtaaggtaatacatgcttattgtaaaacatttgaaatacaattcaaatgtatgtcataatatgttgcattagtcaagattctccagagaaatggaatcaacaagatgtgtgcgtatgtgtagagagaaagagaaagatagatctaaggaattggctcaagcaattgtggaggcttggcaagactaaaatctgcagggtagatgagcaggctggagacccaggggagcgttgcagttcaagtccaaagacagtccactggctgaagccctccttgcttggggaggtctgtctttttctcttaaggcctttaacgggttggatgaggcccacccactgtggagggtgatctgctaaactctaagtctactgatttcagtgttcgtctcatctaaaaatatcttcgatgatacatctcagtgtttgacctaacatctgggtaccatggcctcgtcaggttgacacataaaattaaccatcacagaagtatatatcctatccctagaggtttttaagttattagcaatagataattcttccagaaaattatgcatcttttcatgcaataatagatcttggacacctttctgtgtcagtccgtaagatggacctcagtcgccttaagggccacacagagctgcattacgtggatggagaggactgctttcactcctcagtgttcgtgctgggaagtccactcatgctgtctctgctacttagcatctctactgggtttctaatcggtttctcaacttcatgtatcggaaactgagctcgaaaagtttctccctcagtttttcctctctctgaaaatggcaacttgaactaatccttgattactttctctcctcttcctctctctcctcttcccctcctctcctctctcctctctctctctctctctctctcttctctccttcctctccctctctgtcctcttcctctcctctctgtcctcttcctctcctctctgtcctcttcctctcctctctctcctcttcctctcctctctctcctctctctcctcttcctctcctctctctcctcttcctctcctctctctcctcttcctctcctctctcctctccctctctctcctctccctctctctcctctccctctctctcctctccctctctctcctctccctctctctcttttctccctctctctctcctctccctctctccctcctctccctctctcctttcctcctcttcctctctcctcttcctcctctccctctctcctcttcctcctcttcctcctcttcctttctctctctcctcttcttcctctccctctctctcctcttcttcctctccctctctccttctcttttttctttctcctctttctcgctcctctttttcttctctctctctccttttctcttttccccatctgtctctccctgtctccctctcccctgtctctgtctctgtgtccccacgccccccactcctggccctgcctttagccatctcttgtttggaggatggcagtagctggcgtccacctcactgccatgctactccctagtccatcactaatagagcaggaaaaggagtcctttgaaaacatcccttggttggccttgttgctcttcttcagacctgctgggcacatgccttagggtctctgcccttgtttttcttctactaagaacatctgcccctacatgtctgctcaggggtttcctcactttcttccggtctttactcagtaggctccttctgaaggaaggcttccctggtcacgccgcttacagttctggtcactctttccaacatcttattccccctcgcccactttatttatttatttttttcattagcagttaccactgcttgacatactgcaattttccttttttgatgtatttgttgtctatcttcctcacctggaagtgataagctccttgagtgcagggtgatttgtctgttctgctcagcgtgctctgcccagtgccctgaacaaggcctggcttggaggaggtattcagtcagggttgggcaaatgaatgactgaaattggccaatgtaggacctgagtgttagacttgaaaagaaaactaaagaaaggaaatacaggcctggctcggtggctcgtgcctataaactcagccctttgggaggctgaggtaggaggatcacttgagcccaggagttcaagaccagccagggaaacaaagggagaccccatccttacaaaaaattagctgggtgtggtggtgcatgtctgtggtcccagctacccaggaacatcacttgagcccagggaggtcgaggctacagcgagccgtgatcacaccactgcactccagcctgggtgagagtgagaccctgtaccctgtctcaaagaaaaaagcaaatatgaaaacaaatggaggccgggcatggtggctcacacctgtaatcccagcgctttgggaggctgaggtgggaggatcacctgggtcaggagttcaagactagcctggccaacatggtgaaaccctgtttctactaaaaatacaaaaattagccaggcatggtggcaggagcctgcgatcccagctactacaggaggctgaggcaggagaatcgcttgaaccttggaggtggaggttgtagtgagctgacattgcaaccactacactctagtttaaaaaaaaaaaaagaagaagaagaaacaaatggagaaaaagaaagtgcagggagctttttgggactgtggagctgaactaagctgtcttccatggataaggaaactgtatcttagaaaaggtcacttgacttccccaaggtttcacgtctggctggtgtgtagagcactaaagggtatacagatttcctggctctcagttcagggcctgttccatcagcaggtgcccttcaatttcactcccttttatccacttcaggcacccaaaacatgctagcataaaaaaacacaagaaacaaaaacacaccacatgtacacacccctacttaaatggacaacaaaagtcaccggaaaaaagggaaaaaaagaatgtctttttgatttgttttgttttgtttttgtttttggagacagagtctcactcagttgcccaggctggagtgcagtggcgcgatctcgatatccgctcactgcaagctccgcctcctgggttcaggccattctcctgcctcagcctcctgagtagctgggactactggtgccggccactacacccggctaatttttttgtatttttagtagaggcagggtttcactgtgttagccaggatggtctcgatctcctgacctcatcatgatccacccgcctcagcttcccaaagtgctgggattacaggcgtgagccaccgcacctggccaaaaaaaaaaagaatttcatgtagctgacactttcctctgcccctaataaatcatagattccttgccaatgagttctaaaggggctgtgtccactctgtttatacagtttatacctagcaggaatgtcagtttcaggtacaatttctagagtaatttctaattactgtaaaattcacagtacagcatagcagtttggatggccaatgtgctttgttttactgaatttttctgtgtgtgttattagcaatagtagatcagtctgaaagggggaaagaaatagtttgaagatagtagtggtcctgttacaacaaatacagattgattcctagctagcatatgttgcttcagtcaaagatgtctaaagcaagtatagtttccaagacacacaggtcaggaatagcagcatgtcccatggcaaaggtgatgctttccaggtatagatttgtctttgtgagaatccttgtagaattttctatataagtttgtttttgtcaatattgataaacatgatcttcaatgttcaaaggagagttcaattttagactaagagaagtacttctgttgtgtaaataaggttcaaaaataaggttactgttcaacttagagaaaatacaaacttaaaaataattcatttcattttttattcactctgaacttttaaaaaaagctggtttgtgattttcattttcagtaaaacaaatctcattactttaaaaaaaatgcttgtattagatattatatatatgaaatattatactttacattcttataaaacatttataaagaatgatgatacaacagatttgcatacctaagtgtaagacttgaacaaaagactaaagacaggaaatacaggcctggcttggtgactcatgcctataaagccagcactttgggaggctgaggtgggaggatcaaatacatcaaaaaagtaaaatatgtagtatgtcaagcagtggtaactgctaatgaaaaaaagtaaataaagtgggcaaagggtggaataaaatgttggaaagagtgaccagaattgtaagtggtgtgaccagggaagccttccttgagaaggaggctactagcctgaagagtttttaaaaacgtaaccattagtttggaaggtctctgtgttactcccattctgtcactcattctctccctgcacaaggaactaacatcttcccgacttgtatctattattctttgcttttctttataattttcccacatttatatccctaagtgatatacatttttgttttacgcgtttttaaacttgatatacatagaattatattctggaatcatctgtgacttggtgattttgctttgtgtttgtgagactcgtatgttgcatggaggtataattcatttatgctcagcaatgcaggatgctgtggtgttgataaactagcctgctactcatggataattgggtagtttccagtgttttgtgctgtaattctcactactacccgaagcattttggtacgtgggtatatgtgtactgatggcacatatgcaatcgtttctttcttttttttttgagacagagtctccctctgtcacccaggctggtgtgcagtagtgcagtcttggctcactccaacctccacctcctgggttcaagcaattcttctgtctcagcctcccaagtagctgggactacaggtgcatgccaccacactcagctactttttctatttttagtagagatggggtttcactgtgttggccaggctggtctcaaactcctgacctcaaatgatccacccacctcagcctcccaaagtgctgggattacagatgtgagccaccatgcccggccatatgcaatagtttctttagggttttgtgcattgagtatgcagtgaatgagttcactttgttccacatcttcacttggatcttcttaatttttgccagtgtgaatagtgccctcattgttgtttcaatttgctttatcctgatattaatgaagtagaacatcttttcttatttattggctatttctcttcatcagccatttggtttccacctctgagaagtacctcttatagctttttgtgtgtttctctatgacatgggactgcaaaaatacatgaatttagtatgtgaatgatacaaattaagtatatgtcatttggcttttcaataaggcaagagggttaggtgtggacttttatgactcattcttgtagggcccaggcctttggggcttagcgggtgttctcccggtgtgcggagacgagagattgtaataaataaagacacaagacaaagagataaagagaaagcagctgggcctgggggaccactgccatcaagatgcggagaccggtagtggccccgaacggctgggcgcgctgagtacaagaccagggggcagggtaaggagggtgaatcttctaagtgattgacaaggtgaagcaagtcacgtgatcgtagaacaggggggcccttccctcttaggtagccgaagctgagagagagaaggcagcatacgtcagcgttttcttctatgcacttataagaaagatcaaagactttaagacttttactatttcttctaccgctatctactacgagcttcaaagaggaaccaggagttacgggaggaacatgaaagtggacaaggagcgtgaccgttgaagcacagcatcacagggaggggtttaggactccagatgactgcgggcagactgggataatatccagcctcccacaagaagctggtggagcagagtgttccctgactcctccaaggaaaagagactccgtttcgcggtctgctaagtaatgggtgtcttcgcagacactggcattaccgcttgaccaaggtgccctcatgcgggcgtgacagagggctcacctcttgccttctaggtcacttctcacaatgtcccttcagcacctgaccctatgcccgccggttattcctaggttatattagtaatgcaacaaagagtaatattaaaagctaatgattcataatgtttataatgattgataatgtccatgatcatctctatatctaatttgtattatgactattcttattctaactattttctttaatatactgaaacagtttgtgccttcagtctcttgcctcggcacctagataatctttcacgcacacgttctgactatgagctatgaatggaagtgactgtcaatgactctgaaggttctgagatttatgctacttgctggctgacaaatcagcctgcgacatttcatagatgctgatagaaaacatgagactccaggatcagagatgaaggacagtttattacagcagcagcagtggtcaggataccattgtctttgtaccatttccctgaacccagattcctctagggcaatgcaaagagacatgatacctgcacacataatgggttgcattataggagaggagctctgagtttagagaacctgagtctttttatactgtgcagtaatcgcacctgccctttgatctggagggagacactctaccaaggccatttactgtacaagcatctttgaaaaggtagttcagagcaaagaacaatcagtgtcttgctcacaagaagtggaaaaatgcaagagacctgggggtgaattgtctcctggtagtgatgtgtgtcacttttggtcagagatagctaagagcaagtgtgagccctctagtccctgccatgccccccttggaggttgtgtgtgacgctgatgctcctgtcagcatgagttccttctgaagagtggcagtgagcactgctacttgcaagctgtagtagactgggatctcagtgttgacttattgctaatgcgtagcccagcttatcctgatacatagtctgggaacatgaaggaccaccttctgtttatagaaccccatgtctgcttatagatttcagattttatagagattcattaggtttattctgtctactttcagtcctttcgcttataaactttcaatccaagcataaggtctttttcctgttacgctgtttgaactttgtttaaaaattgtggccaagcatggtggctcatgcctgtaatcccagctactcaggaggattgcttgagcccaggagttcaagaccagcctgggcaacagtgggaccccatctctacacacacacacacacacacacacacacacacacacacacacacacacacagtgggaccccatctctacacacacacacacacacacacacacgcacatatacacacagtgggaccccatctctgcgcgcacacacacacacacatacacacacacacacacacacacacacacacacacacacacacacactagcggagtatggtgacgcccacctatagacccaggtactcagaaggctaaggagtaaagatggcttgagcccaagagttcaaggctatagtgaggtatgattactccacttcactccagcctggggaacagagtgagaccccacctcaaaaaaatcaaaaaagcgaagatttaaaaattaaaataagattgttagccagttttttgtttaatgaaggaaaagttttccaaattaacagaatgggacattcagataaaatttgtgcctttatgacccaggaggatggcctgggtgtacatacaagtactcaggacaccacattctcacctttggtatctatccgttttattactctgccactcccaaacagtaatacataggattccgtgttagtttcctagggctgatgcaacagattagcacaaaccgggtggcttaaaataacagaaatgtgttccttcacagttctgggagccaggaatctaaaatcaaggtgtgggcagggttggcgcctccctagaggctcttagggagggtctgttctgtgcctctctcctggcttctagtagctcctggcagtccttgccttccttggcttgtggctatgtaattccagggtcttctgctgctgtcacatggccttcttccctatgactgtgtgtgttcattcacataaatccagcaccaccagtcatcagatttaaggctcaccctaatccagtgaaacctcatttaactcattatgtctgcaaagaccctatttccaaataaggtcacattctgaggttctgagtagatatgaattttgggatgacactattcaacccagtatgctatatagatctgaaagcctacttgacacacatgtaaagctaaaaagtgactgaggcaacttacctgaaaatatattttacaaacagagcattacttcttaggtctcatttgagtactaccatttatttccctagtattttcatacatcacctgtatgactgcagttcgtaccccatactcaaaaatgcaggaacactgatgatggctatgcctaattttcagaagacaaaagtgagcatagaaaggttaaaataactatcctatggtaataactggtagaaacaggatgcaaaaccagccctcaccaactttgaagtcaggctgttgaacatcagaggaccttgagaacaaattgcttgactgtggaatccagggagctctctgcagtaactgctaagtacaactgctcaggctgccataatgaaacaccattgaccgggtggcttaaacaacagatgtttatttctcacagttctagagcctgggaagtctaagtaaggtgccagcagattcagttcctggtgagggccctcttcctaggctgcaggcaaatgcctattctcccgtagcagagagagagtgcaaactctgatcttccttcctgttaagggcgctaatcccatcatggggccccaccctcatgacctcctctaatgaactctgaaaggctgcgtctccaaatactgtcacattgagggttaggcattcagcatatgaatttggacgttcagtccctaacatacatttggttggtaagctgcagatcccagaatttttccaggatatctgtgcccatttcaaattgcaaattgtctgggttttgtttgttttgtttgcatgttttggtgaagctgtgagtctgtgtacatcagatagtgtaagctcacaaagaaatcgaagagagctggtgttttacttaaccagaattccttacttgaactgtgcttcacaataagaataaatattttgttattaaagaatgcagaagttaccattttattgcaaatttttattataattaggttttaaagtactataataaggcaaacatatctcagtgagactgactttttttcccttataaaaacaatgtttgtatgaaagagaaaataagcttagactccattgaacagcttcttcatggctgcagtattggcattcacccaaggactcttgagaaacgatcaaattttcagtatctttgaagcttagccagagatctaatgaaaccaaatgatgctaaagttcttaaagctaatttaaatctcaaattatacattttaaattaagtttttattgataataaatatactttatttcatattacccttgaaagcttgagtgataatattagtagaataaacatgttttacaaagatttaccattaagaatgctattaatatgacccttgatacaccagcacaattagatttcaaagtaagcacttatgaagtaacagcgattaatgacaaccatcgaaaacaattttgaactccatcagtttaactcaggagggtaaacttaatatgataattcatctagttgaattgtatcagcttagcaggaaggtatgtaaatatgtgacccttacctagcttctaaatggatgctgtgctgatagatttatcagttccattaaagaactttggggaactttggagtttcagcaattgttcccttggaggctgaaaacccaacctgatctcatactgggaccattctggtctgcatatttccataatttgcctttgctactaatatgacagcaagacacaaataactgtttctaataatatcagatggagttgtggaggacagcattttaatgtagtaaaagacctccccgtggggttgttattgctactatagaacagcagctacacagttgcaactgtagtctcttaattgattcgtttaattagcaagagctgaagcttgggctgtatcttgtcatctgatatcataggactcgaaatttgcatcattcatatttatagatatgtaaacatcatcaaaaaggtcttctgcttctgaaaattcacttacagatatcaaattttaatagagcagactcccatttgtttgaaatttaactaattaaaaaatgaaaagaattaagtttgttactgtttttctttatctgtactcttgagaaataagtgatgtcatacatttttggttgtggatcatctcctaaacataaacttccagagaacttcttcagtcttccgtatctcataattccataagcagtccctcaactgacatgtctgacttaagttgatctctcctctctgtcccatccctttctctgtgtcagtgtgatttcaggaatgacatgatggcttactggggtttcttgcacacgtgtgctgtaactttccacctgtccctgcctgcctttgcagctgctccaagtcctgctagggtaggctgtctgcttgtgctgtggtttggtgggtcatctggctgagttggctcttggcagttacctgcctacccaagctgcattggtccccactttctctggaggggaaaagagaaacggatagaaagtatctggcatagaaaccagagcctttctagtctgtttaccctcaactccacagggcttcctccctgctcggtcacactctttgtattcctgacccttttctagtccaacaataggaagcaggtggcggtcacagagcagacactttgtggaggggtgatgaagttttctgatgttcagatatattttacagtgctaagaaaatctatagcattccttcctgcatttgcccctaaatatacaaaatttcaggcaaaatatgggtagaataagattttatgaaatggaatataaatgtagtcttaatcttgaacattgtttctgtggtaatgtgtgttctgtgtgccatgtaaccaagctaagaatgaacttttggaatataactacgtttttattcttttgaaattggcatgctctatataatataaaagtttggttattagtattgcagtgtgatgcattctgaacaaaaatttaaaagaaatcattgcctgcctgctatactatgtgctaggaagtgggttagttgaacatgacttggtccctacccttaagtagcacactggctggtgaagacagacaaactgataccatgcaaacatggtatcagtgctgagatgggtaatgcataggcttatatagtagcagagcgaattgtagatctgttagctttattatttgtttcttttattgataaacagtacagtccatagggcgtaggtctctggttaagaatttgcattttatttgtcaagtacacctcaataaacacagggaaaagaagaactgtatttcatatcttattagacattactttttgaaaatgagcacaaaacctagcatttaatggtagtcatgagagtcagtcagtcatcttacactggtgacagacactgaattctggcaattcaaaggaaacaaatatccctgcagtcattgggcccattgtcacctaaggatagagaaatgtaaatgactgattaccgtgataagaacgctaacagaggtgtatacgaagtagagggattctggggctgaggtgaagaaagtggagaaattgtgaacagtttttcagtgtttatagctcatgctgtgactttaaggatgaattgagtttgcaggagaaggcatttcagatagagggaacagtgagcctggagatagcaggttgtagaaactgcactctgtactgatgatggagaaagaggacggaatgaaattaataaaggcgcagaggtattaagatgtcccaagtgtttaaggaagagcagattggcttatgagggtgatgggcagggcaacaaagatccctttggaagatgaaattagtctgttgggggcaagatgacacaagaccattccaaggaggttgggtggcattccctagattctgaggttcattgaaggagttgaaagaagaatcataatctcatcagaggtggttggttttattggtgtggtttttttttttttttttttttttgacaacttatgggagtaggcaaagaaagaagagggtacatttgagagccacttctttagaatccagtgtacaattctatgtattgggcagaattgaagataattctgagatttctagaggtgataactgatgcagttagggaggaaaaacaggaagaagagaagaattgtaccagagaaaaggtggactctattaaaaagatggatttaaccaatttaagtttgaaatgccaagagacatctatgatataagggaaatttctggtctggagagcaagaagaagattaagagtgagcacgtaagttgatgccccagcagaggtgaggtcctaagccatgcagtagatgaacctgccaaagggacaatggcaaagcagaggccaggcccagaatggagctccaggaaatgcccacagctaaggtggaggcttgtcctctctaatggagtcacttacaaaatgatgacatgtttattattgaaatcatttatatatactattagaagccagttcattgtaacctcagttatgatttcacagtatcctagggtatcactaagttatttcaaagtatctcaggatctgttgccacctgccaaagatcttcaaagtaaaattaatatttataaataatgccttacgcgtgtatggtgctttagggctttagaatgattctacatatgtcagcttacttgattccattcaattgctaagatgaataagccatagcacaccttagagtgagtggtaaaaattagacatggaatacttcttgcagtgttttccatttaaaatatttgagattacaagttatgtgttcacaggaaattaccacgaaccactgccagattgctagtgaacaggatcgggcaggggtgggggaggaataagtagagtttgtcttcctgcatttgaatcgcagatcacctgtctcttagctttgtgaatttgaacaggttgcctaacctccctggtcctcaattttttcatcaacagaatagatattatctgcttttatggagatggcaagggctgaaaaagaaaacgtttgtaaaatgcctgaaaatagcaggcacttggcaaagaatagctcggtttttattgtagctccccactctccctttgcttcattttccctttcatttgtcttgcttggagacatgctatcatctgaagtgatagtctccaccgagtcttcaatttggtgcttggcctacagaaaaatccagagggaaaatattgttcccttttatttgaaaaaccaaatttgtgttaatcccctggttatgaccccttaacatagttaatgttttgtaagtgaatatggaatagaaagcacatacttaaatgtgtaccttgtggtggcagggtgcttaaaaacatctgtttccttgaagaatcttgcgaatcaccaacaccaaacttgaccagggaagaatttggtgccttgtgtttaaactgtgctgcttaaaatatattcagatggaaagaatggcaaaaccattctgatataggacattttatgacagtgcctatgagatgttctttcttctactggcctcacttttaaagggatatcattttaggtaggctgtttcagggcactgtcatatgttactgtggactatcgatctcttgtacctatgaattatttgattgtcactctttaatttatagtgagaaggaagtgggaatggcagctcttctcttatagaagaaaaatctgagtcagtggttctcaagttttatcatgcctgaggatgaccaggaaatcctggtgaaaatacagattcccagatctgttcctagaaaagctgaccccccatgtctgatgtcgaaatcggcttaaaatgcaccaggactagaatttgcaatatattttgaacattaatgtagaattactatctagtttggaaagtcaataccaaaagacacatgatattcctggccccatgagccaagcttaggagcagtgttctggatccttttcagaatgagaagataggacaaacatttgattatttgtgctaattaacatgtactttcataatacatacttttttaaaatcagggagtgacatgataggatctaaagtataattaggtccatagtgtcatcaactgtatcttttaagtttacttatcatctgtataattctttagattcagtctgagttatttcaagtcttatagacagtgataatttttatttttgccctagagcagggcagtgttatctgtttgggcagtattaacattttggacaattctctgttgtgggagactgccctatgcgtaataggatgtttagcagcatccttggcgtccaccaactagatgtcagaacatgtctccagatataacaactaaaattgtctccaaatattgccaaatggctgcacacagcttggttggggagagactccagaacagatgtgaaacttagtggctggaagcttacaaagtacacatgtcatgacctacttgaataccttatgcgaagaaaataaactttacccgtcctgatactggatttgctttaggaacatgtttagcgaatagctgtttggaagtgtgtaaggggtactttttctttatcttcctcatattggatcatgaaccaggtctaccatggacagccattcatggaatttagggcaaagtctagtttgtgtgattgcattgtgttcatttgggttctttttaccatttgagtagatgtactgttactgcttaccaaagacacattttgggtatacagtgcgtgtgcagctcaataccttattctagaagctgctgctcttcattttgtcttcagttttgtaaaagccccgtaatcctgctggtgagacatattagagtgtgataagcatcacttcacagtgacatctgtgaagttcttctgttctttttgcagctactatttaattgtttggctatttaatattttgtggcgcttccccccttgtgcaaggaagtatatggcaggatgcctgacaagacacgtaggaagccacacagtagtcagcatctcaagtgtgtgttcctgagaaatagccttcccaagccggcatatgttttgtatggtgtaaattctcaagattgtgaggggaacagctaaggtaattcctaaggtatccgtgttaattacctaaggtaattaccaagcatcagggaacatagcaacactgcaaagtcaaagtaccctcgtttgaaatagaatctctacctgatttaggggttagggaaagaattagtggataggttctaacaattacccttctgaggtcacgagtttgagaccagcctggccaacatggtgaaaccccatctctactaaaaatacaaaaattagctgggtgtggtggtttgtgcctgtagttccagctacttgggaggctgaggcaggagaattgcatgaacccaggaggcgggggttgcagtgagctgagattgcgccactgcactccagcctgggcgatagagggacagtccgtctcaaaaaacaaaacaaaacaaaacaaacacagttacctttacagttcaccatggccaaaagattgtaccactcctttcctgtctcagccactttttgagtgactgtaaagtaggttggccgggggacgatcgttgcttgctgagtgcctgtaggtacctagcaccgtatgtttgtcattctcattgaagtctcccctttgagatcaccagtagaatccccatgtttcagatgcagtaacacggacaggaagtaagggatttgctcagagtggtttatatcagaagagcagctgtaggaccaaacccagatctagtaacaaatgtggcttccttcacatgagcatctgggtggttgggagttagttattcctgactgttgggtggagagcaatttgatgggacaaaaccagttcttctgtgttgaggcttagacaccagccacttaacgggccagacagctgaggtccggatttctctgcttcctgagccagttactcttgtatagcgggggaggagtgggcacattctttttttgagatggagtcttgctctgttgcccaggctggagtgcagtggcacagtctcccctcactgcaagctctgcctcccgggttcaagctattcttctgcccagcctcttgagtagctgggactacaggtgcccgccaccattccagactaattttttgtatttttagtagacacggggtttcaccctgttagccaggatcgtcttgatctcctgacctcatgatccacccgccttggcctcccaaagtgctgggattacaggcgtgagccaccgcgcctggcatcaagtttgattgtgagagtgcagcaattcagtcacatgtccaagctccactcctagttcttttgctgttttccctacatctgcagttacttcttgaacccctcaaagtcacccatgagggttagaatccagttcttcaaactcttgttcatgttgataatttggcctcttcccatgtgaattcaacacaaatgttcttaatagcatctagagtggtgaagaaggttttcaatttactttgcccagatccatcagaggaaacactgtggcagctgtagtcttccaaatgtatttctgaaataataagacttaaaagctgaaacgactgcttgatccatgggctgcggaatggatgtcgtgttagcaggcacaaaaaccacattcatctccttgtatatctccgtcagagctcccaggtaacaaggtgcattgtcaatgagtagtaatatttttaaggaaatatttttttctgagcagtaggtctccacagcaggttttaaatattcagtaaaccatgccctaaacagatgtgctgtcatccaggctttgtttttgcgtcctagagtacaggtagggtagacttagcatcattcctaagggccctgggattttcagaatggtaagtgagcactggcttcaactaaaagtcagcagttgcattagcccttagcaagagagttggcctgtcctttgaagccagaggtttacttctcctctctagttgtgaaagttagatgacatcttcttccaacagaaggctgttttgtctacactgaaaatctgtagtttagtgtggccaccttcatcggtgatcttaactagaccttctgcgtgacttactgcagcttcttcatcagcacttggtactttgccttgcacttttatattatggagatagtttctttaaacctcatgaatcaacttctgctagcttcacacttttcttttgcagcttcctcgcctctctcatcctgtgtagaattgaagagagctagggccttgctctggagtaggctttggcttaagtgaatgttgtggctggtttgattgtctatggagaccactaaaacttaggctgggcacagtggttcacacctataatcccagcactttgggaggccgagaggggcggatcacttgaggtcaggagttcgagaccagcctggccaacatggtgaaactccatctctactaaaaatacaaaaattgagctgcaacaatagaaagatggtggagcaagaacaaagaaacaatccctttgactgggcgcggtggttcatgcctgtaatctcagcactttgggaggctgaggcgggtggatcacctgaggtcgggagttcgagagcagcctgaccaacatggagaaaccccgtctctactaaaaatacaaaactagccggacgtggtggcacattcctgtaatcccagctactagggaggctgaggcaggagaatcgcttgaacccaggagacggaggttgtggtgagcaaagattgcgccattgcactccagcctgggcaacaagagtgaaactccgtctcaaaaaaaaaaaaaaaagaatccctttggttccagaaaatctcctgaaaaagaggaaggcttattaagccttcagagctacccaggcaaagcaggtacttttggcaaagaggaacaaaggaaaggaaaagggctcaggtttaagggactggaatcctacatgattcctggcggcagaaacatgacaaggtgggtctcagacgactagaagtgaaacctcatgctttggaattgccagataaacattccttggcctttcttgtacgtatcaaaaggattgatggtgtggccgggcacggtggctcatgcttctaatatcagcactttgggaggccgaggcgggcggatcacaaggtgaagagttcaagaccagcctggccaacacagtgaaaccccatctctactaaaaatacagtattagctgggcgtggtggcaggcgcctgtagtctcagctactcactcgggaggttgaggcaggagaatcgcttgaaacccggaggctgaggttgcagtaagccgagatctcaccactgcactccagcctgggcgacagagttaggctctgtctcaaaaaaaaacaaacaaaacaaaacaaaacaaaaaaagtttgatggcgtgtgagtttactggtgcagaaaaccattgcaagattttgcctaaagaaagtttttagtggtgtctttgtaaaagtcaccccctgctgcatgtaatgggatcttatgtgacctggggatttccaaatctgaattttctctgggaactgattttgaaacgtggtcaaggtcaagaataagaccatccctctgacagacaacacagtggttgcggagcacctggggaagtatttccaggagacttcatggttcttgcgtcgtttccacctctcagtggcccatcatgctaccaaaaatagagtgggcttcctcgagatgggcacacctggctatcggggtgaacacgtcaatcagctcatccgccagctgaactagacccaggtgccaaactgcagtacatttttatcagtgaagtggaagcgtgtgttttgggtttttttggggaatttttatcaagtatcttcagagaagattatttcctgcttaatcttcaaaaactggaaaggaagggtcaaagaaaagacagtagcttatgtttatggcgggcacctctcatcacagtcattcccaaggaaaaattccagagttttctacattggcagctgcctcgtctaaatcaacacattccatgtgcatcttctatccttgggtttaatgttgctaaatgagtaactctagcatttgtacaagaccccctaagactctggcagcagtcgaccaagcccagggacataattgaatctggagattcctgaggccttgttttgaaaaagacttgaaatacacataggaagaaaggcccaaaaataaatgttcacttgtctctgcaaaaaaataaaaataaaaaataaaattaaattaaaaaataaaaatatgaaaactagctgggcatggtggcttacgcttgtagtcccagccactctactcgggaggctgaggcgggagaatcgcttgaacccgggaggcggaggttgcagtgagccaaggtcacaacactgcactccagcctgggcgacagagtgagactctgtctcaaaaaataaaaataaaaaaacttttcatatcagcaacaaggctatttcactttcctatcatccatgtgttcactggagcagcacttttaattttcttcaagacatttttcctttgcatttacaacttgagtaactgcacaagagacctagcttttggcctgtttcagctttccacatgctttctcagtaagcttaatcatttctagcttttgatttaaagtgagagacatgtgactcttcctttcacttgaacacttagaggccactgtagggttattaattggcttaatttcaatactgttgtgtcttggggaatagggaggcccaaggagagggagagagatgggggattggccagatagtggagcagtcagaacacacacaacgtttattatagtttaccatcgtacatgggcacagtttgtggttccccaaaacaatttcaatggtaacatcaaagatcagcgatgacagatcaccacaacagataacgacgaaaatgggtttcctaataatgcagaggtttgaaatactgcaagaattaccaaaatgagacacacagatgtgaagtaagcacatgctgttggaaaaaatggtggcaatagataaagggttgccacaaacctttaaattgtaaaaagtgcattatccttgaaacacaatagagtgaagcctaataaaatgaggtaggcctggattttttggatacttgatagtatctaagtttcttctcaaacacagcaaacatttcacagttcaaatttgcccatcggtagagttttctctgtggatcttctctgttaatgccacatctgtctagagtaaaagttcaattcaatattgtgctatcaacttagcaacttgttgaagatgaactaacataagtacatgctgtgtgtgtgttctgtgtgcagacacaacacaggtgagctttccgtaagcctggatcttcccaatggcggtgcttctcgtgtgcaggccaactagggagaaggggacactggggcccacccggagctctgtgggccttgtctcttgtgacaaggatattttgctccttagctcagcagagtccaggttcttgtctcaggactgggaagaagtaggcaggcggacacttggagagtgagtggagtagaatgcactaagggaaaggaaaacttaaaggaagggtcttgaaagcagattgtggttctcccttcacagtggaatacaagggcttttatatacctgctgatggggctgcgttccctatttctgtaagcgcgaattcctggcggctccacccgtccttccaatgcagacgtgggcccttagtctgagccactctacattgatttatttcccttactgcgcatgtgttaagggacagaacttttccaccgcaagcatgtttgggcaaggtccctgggcacgacgaccttggtgggtcagaggttctccggggaccctcccctgtctaccggggagagttctctgcttcctgcctccatctactccccagtctgcagtctggccctcggtggtcctgcagatctggtgttgattttgcagggtgtttggaaaggtacctgcgtattttcatttatggaagtgactgagtgccgacgaggagaggttaatgcccttgagaggagaatttattacttcatcacctaagagaagggggcacacccctccatgcagggcacaggggaaccaccagtgtgggtcaggaggcagaaaggagccagagaaaagtgtgggtgggaaccttagtggggcttcctcgggaaaggcagtgcgtggctggtttgaataatgatggtgggctttggggtggtctctatttgcctggtatctggccctgggatgttttaaggcagggaaaatactggcttggtgtgtgttagagaaaatgggcagctggcttacttccaagttctttactaaattgaggaattagctggtcttgggagaggcagtgtctttctgggtctgtaagtccctggaaaatgttaaagtatcataagataaaaaaaaaaaaaatttaaacctgattaatacactgtgaacctagaagtaaccagattttaggaaactgacctatagtgagcaaactcacagggattgatagctaagccagaatatgcatttattagcttgaggggaggaatgtttcttccagtgaccaaatctttaagtctgccctccagaatattgactaaatattctgccatctagaatggaataattaggaaactcattagtcaccttaatttcaaactagtttggtttatgtggtaatcagagcaaacggtgacgtggtgtacctgtgccgcgcagggacttggtgaattaatctcttctcccagaacgccccacaagggccaccgccgtgccttcccttttctttgcctctgcgctgctgttatcttcccacagaaaggccccctgcagtcgattaggcttcagctacctaaacaataggcacagacccaaacgatgtcaaactacagttttctcctgcccttagggtggcactcaggccactttgattggaattttgagtgtccccaaactctggttgtactctttcacagatgggcaattacagtactgctctgtggagttttaccagtatagctctcagaaattcctaagaattttctatttcttaggttacactctctatagtacatacactcagacagaaaaatatatttcacgaagagagccttgaaaaatctcatctctagtcccagtgatgccttaaactggttgtgtgaccttcgtaaacctcagttttctttgttgtaaaatgaaaggtcggggtcggtgacctctagagtctatcccacccctagcctgctccgagagtgattgcatttggcacaatatgcagtttgcttcgcagcagtagcaaaatgacacatgcaacttattatcatcattgtctatcttttgatttccttgagttttccagtctcattaggggagacatctctggcttatcgcacaatgacatcgtgtcttgtaacttaatttctggggacaacacattgtgctgccacaggcacagtgctaataatcaaggttgtctgttctgcttactgtgacttttttgtggtttctggagaaaaaatgcagatgcttttcaattattctaagggaattttgatgaaccccctgggtagagttccctgtgccacctgccatgagaagtgagttttatcgaacagaaggtagggaattgaattgctcatatttgttttctttctggtacctatagtattatttcaagctcaagcattttaataaatatttaataaatacctgtctaaaataggccaaaactgtcataaactaaacctcttttcttcttcaattttaaatgcaaatgagttaatttgacttttagtggaatttccaagataaaggcccatgtttttcctttatgtatccgaaagttatttttgatggtatagtgaacgtcctgcttactacacattttatgtattagcctttggaagcaaattccttaagtttattgcaacgttgctgcttttgttgccattcttataattttatgtatttactgtttctctctctctctctctctctctctctctgtctctgtctctgtctctgtctctctctcatattgagacaggatctcactctgtggcccaggctggagtgcagtggtacagtcatggctcactgcagcctcgacctcctgggctcaagtgatgctcccacctcagcttcccaggtagctgggactacaggaatgcgccaccatgcctggttaattttttaggtattttttgtagagaagggattttaccacgttgcccaggctggtctcgaactcctagtctcaagcgatcctcccaccttggcctcccaaagtgctaggtgtgagccactgtgcctggccgtatatgtccattttgcaggccagaattctttgactgtttgatttacagagaattttcaaatatctgcctctaaggacttttgtagcaattttattgagatacaattaacgtataattcacccacttaaaatgtaggatccagtgggttttgtttcttgtttttgttgtttcttttgttaagagataagcagcaaatacatttttagtataattatgtttcattcaatatttgggacatatgctaacacttgttattattagcattattattagcattattattcaagctgaggtctcattctgttgcccaggctggagtgcagtggcttggtcacagctcattgcagccttgaactcttgggctcaagtggtcctcctgcttcagcctcccaagtaagtgggattataggtgcaagccacagcacccagcgattcactggtttttagactgtccacagagctgtgctgccatcactgtaatattttaaaacattttcatcaccccaaaaagaagccccctacccattagcattcactcctcaccccttccacccctcccgcctgtggtagccactgatctactttctgtctgtgtatagcttattctggacatttcttaggaaaggaatcatacagtatgtcgtcttttgtggctttcacttacatactggtatccacattgtagcacatgccagtacatcattcctgtgtatgggcaaataacatcccattgtatggatataccttaacattttatttacctgtcagttggtgggtgttggttcctgtcttttcggctactgtgaataatgctgttatgaacattcatgtacgagtttttggggcgacaaggttttaatttttcttgggtgtatacctagaagtggaatttccaggtggtgtagtaactctatgtttaactttatgaggaattctcacactgttttccaaagtggctgcaccattttaccctcccaccagcaatgggagcgatccagttcttcccacatcctcactgacactcgttattgtcttttttattatggtcatcatagtggctatgaagacaggcttgtttttaaatattctctatgtagtattctgctttcttccctagaaatcataattaatgcagaagtagcccaaattgtgtatgttaatttgttttatttttttaaaacaaacttgaccccccaaaagcaacaaagcacatacatttcagttaatatatattttctaggacgttattgtctcttctcaaatgagatgatttcgatatgaagcacagagttcctttcattttcctatgctcattctctctctttttaatggtatcacatactgtgcaggaaggtcattatataaggagaggaaaaaagaataatcagcatagaagagaaaattaatgctgtttgtgtaatttttaataggaatgttgtaaaattttgagatttaaaccaactactaatattttttatacattactgggcagtttcctcttgttgcctgtgaactgatactttgccttggaaactcagatagtaaaaatatttgtcaaagcttcaaataccagtgttttaattccttagtcatttagatattaatcctgttctggagaccacctacatgtgtttgtaagggatgtgataactgacactgtatttaattagcactaatattgtgaaaaaagcaaaacatattaagtatctttccaagtcactagtttgaaattagcagaagtgaggaagagaaagtcctgtccaccccccacccttagtttgcatacccatggaagtttgtgatccatttactcattcatttatccaagtatttgataggtacatattttgtggtggacaacattccaggtattgtggaaatggaccaatttcaataggacagaaatctgaatcacaaataagcatccagtggcaaccagctggtgtacacactgcacctaaatacaaattcataggtatcaaaatcaccttcatgtgtcacacagtcacctttcttagttcctcatagcaaaactgggggactctgaggtcagtccccagagtacctggttgaggggtggggcagggcagttgaataagggagtagaatgaatgaaaactttagactctgaagctcgtcactttattctgccatattttagttttgtggtattaaatctctacagaaattaattatcttgcttcctttcttgaattccttttcaaatgttatagttactacttcagtaattctatcccatctgtttatatacaaaaggtaatttaccgggtaatgaccgagggcacctgctttaaagtcaagtgcatactaatttactggctatttgcttggcctcatttacgctctctcggcacagtttctgggtctgtaaaatgagagtgattgtaccatctacctcattggcgacagtgagaattaaatgagttggtgcatgcataacacttagtacagttcctggcacaatgttaccactcaataactagcagtgtggaaatatttcacacctaagagtaaagttttatttacctttaggagacaggatcctgggaactttctggttgccatagctgcttcctcaaggcaactaagttagatgtggagtttctaattcctgttggaaattcagtgaataagaaaatactactgaaagttatactattttctgcatgttaatgatttgatattatacagctttaagttctcagtgctcattcgggtagtgcaggtgagagacggcggctttaggggcaaggcagtgaccctgtggatgatgggaagagagttgttaagaaataattgtttaaatcatccagagagtactgtagcaaggattgttcctaaaaagaactgtggtaatccttgttgaatagcaagtttggacagtatacggtagggaaatctcaggaatactataaacaaataaaatgatggggtgagccctatgaagcgtgtgttctcctgtgggcagtggcagagttacccttcacccctgagtcctgatttctcagcctcttcatgtgactgtctccttggctcctgggaaagaaagaagcctctaccttccctggattgaatgcagcccttcttgtcccgtctgcagagcatgaggaacagctggccacctgcacctgacaaggcctgtggccgcgggcagtacccagccctgcgctgacggccgctccaggttgttgctggatgtggcgagctcgagctaatcgggccttttaggcttttgtttcttagcaaatgatcagctgtgaactgcccttggcctaacttggccttgttagctcagaagcccgcaattcattgcattttaccctgaagaggaatggtaggtctgaggacatatttatttttctgtggattttttttccccttgatccaggaaattgtctgtcttcaacaacctagtcttgtctcctccagagaaaagttttgaatcctctgaggagcggtctgtcgccattgtggcctgtggtcagtgggtcagaccagagccctgacaactgtctcccttcctgggcccaagtggacaccagaggagtttggggctctgggatcagcctgctctggcgagtgtcctttccctcccactctggaactgtagcttctcagccctcttcttgatgctgggcgggtgcctgggaggccccaccccttccctgggtacctggggaggtccccgactgagaggtgggaagacctgtgtcccctcccccagcacactctcagcctctgacttagttctcataggaggaggcaacagcttccaggagctgctgctgttaccctcgacgccatgatgaggaggaaattgcctggtcaggagggctcgcctgcctcttcacagccaggcgtactgtagcggcctcaggagcggtcaccctgggagtgactcctcacctcctaagcagccctggggcatgaacactcgtcctggaaatcctgctaggctggcttaagggagttgcttctagcatgcctttctggataagcctagtagaattgctttttctactataaaaaggaaagaatggggctcctcatattatagtaacagaattcttggtactagaactggtaagccaagagaaatggaagctgaccaacttttctctctgcacagggttcagagggatagaaacacacaatttgactctgcatgcaccagaaccttctcactcagggtaagggacagccacagtttctgggacgttacctaaaaacacaataatcccacttattctctgacagataatcatcagtcatagccccactactcacttttattaaagaaatagctgggcccttttaggtaaagccctttatatactgggaaaaaaggtcatgttatccattcctcaaatcccaggtaaactcctgctggttactcaaaaataaaaaccaaaatgaaagcccattcatcacagggatgcctaatcttgtaatgagggaatcactgagtgtggcacagggaagactcctgagagattctgatggggtacaagtgtgctgaccaacgtcctagatacagtgggcccttgaacaatatgggggctagggatatcaaccctgtgcagtcagaaatctacggataccttctgactctcccagaatgtaactgctagtagcctactgctgaccagaagtcctaccaataacatacagtcatttagcacgtatttggtatgttacatgattatatactgtattcctgcaataaagtaagctagagaaagtgttaggaaaatcataacgacaaaatatatttattattcattaagtggaagtggatcatcttaaagatcttgatcttcattgtcttcacgttgagttggctgaggaggagggggcttgatcttgctgtctcaagagcagcggagtcataagaaaatgcacatttaagtggccccatgcagttcaaatccatgttgctcaaggctcaactgtacaccgaactgaaaaatgattccatttttagtaggaaatggcctactctaagtcctactgcttccctttgcacttgatggcaagggtctttaactgtgtcagtggagctggtttggctccactgatagagactccctgaccatctgataggccacttttgttagaggagaaggtacccccttgcctacctgttcttttcttacttcatgggtcttgattcctgactcaggagcacccattacagaaaagccctgggactagatctaattttatttaatgaaaaacctatggagcatttactcttgcttctaataaattaacaagtcagggctttcttctgaataggagggtctcttgactctttgatatttgacttttgaaccagactagatgaggcagagcttcagcacatattttaccagtgtcttcagcaaatgcctttctctttgcaaagctccatattactaccaaaaattaacccaactaaattgtaatttctactcacccacatttattgagtactgtgtttccttgaaagatctcaaacaaggcaccttcttgcaagatcttcaccaccagaccttcatgatagtcacctcctcattaggctgagacgcatacacagtgattacgttcagacacagggactcctgtgtcttaagaccttgtgtgacccttgtaattaaagcattacactttgcaaaggctgacagtggtataggggctgtctgaaactattcagccatagcctggtctctgctttctttttacaaatgggaggttggctaaggcagacacagggatggctaagagggataaaggacgtgacttccatagaaccttttgttcctagaggaacctctccatgaaacacacagtgaaactagattaaaccaaaaaacgccctcagctccagcagatcctgagctacaaagcacctcttccctaccgagccttctcacccatgcgcactgagtttctgagtatcagaaagtcaggtttctgaatccctagagaaagtaaaaatttccttggacacaatgggttttctttgcttcctgcatgacagtcacgaaggggaatctgaaatagagaacttgaatatgcggcttgctgaagggaagtgtactgtacagtagccccccttctccacgggggatccatgtcaaaatccccaggggatgcctaagactgcggatgggaccgaaccctgtatacgcttgcctttaatgccttttccatttcagctcggcacttagcccacactgtggctgtaacttttgtagttttaggtacagcagcaaaactagcacaaatttctttgtcctttttcacaatttcatggatagaagattgattcttactgtagatcttagcaatctcagcatacttttttttttcttgagaactttcaccttttaactaaaggaaggacttcatggctggtttttggcatatccagattgccagcatcatactcttggaactttgaggccattgtgaagtcaaataatagttcctgccaggcacagtggctcacacctgtaatcccagcattttgggagtccaaggcaggtggatcacttgagctcgggagtttgagactagcctgggcaacatggcaaaactctgcctctacaaaaaacacaaaaattcaccggtcacggtggcacatacctgtagtcccagctactcggcaggctgaggtgggagcatggcttaagcccaggaggtggaggttacagcgagccaagatcatgccactgcactccagcctgggcgacagagccagcctctgtctcaaaaataaaaaaggaacctaagcactgagaccccctgacagtagatctggtaactgagatggccactaagtgactggttggtggtgggggtgtctacagcgtggagatgctggaccccgagagagagggtttatgacccaggcaggatggagcaggacagcacaagatctcctcacactactcagaatgactcacaatttaaaacttatacattgtttatttctggaattttccatataatgtttctggaccatggttgaccacaggtaaatgaaaccttggaaagctaaaaccttggataaggggggactactgtaatataaagtttacagttcctggggtgaaagctcaggcagaccctatctatgcattattacaacgtaccatcaattcaaaaccataaatttgcagaaacatcgttgctttaattcctaaaatattgaatatgaataataaaaataatatatgctttgtcttagaagcacctttttaatatgattgatgtgtattgatctgtttcttcattctaacatgaacatttctgtaacagtcatttcccctgaaatatctaacctgtgggtacctgagacagcttgtcagttaggaagaacagtggtggcgatagccacgtagggctggtttggtcgtgagtgcaagtgtggttgcagcagctagagcagaggactgtgtggagaacatgggtcaggtcagaaggcagtagccaggagggatgcagagtcgagagagaatttgttgattggaatgactcaggttgactttcaggatgaagagaaggggccaatagagagggaagagaggacagttgatgaggcaggctccaagagaggagggcaaagcgagatcaggggctccagtgaaatgcctgagtgtgatgagaagagcgctgtcttgtgaggctagagagggaaccaaggatgggtgggcctgggaaggctggagaggtagcctgtcagggagctgctaacccacttagaaatactcttattgacataacaaggttttttgttttggttttttgtttgtttgttttgagagagcgttcgctcgttccccaagctgaaatgcaatggtgcagtctcagctcactgaaacctccacctcctgggttcaagcgattctcctgcctcagcctcccgagttgctgggattacaggtgcatgccacgggtgcagtggctcacgcctgtaatcccagcactttgggaggtcggggcgggcggatcatttgaggtcaggagttcaagaccagcctggctaacatggatataacaaaattttctatttcaaaagttcagtcgtgggcacaagttgattttgccttacagtcttgatagtgaaggtgcatactatttttaaagctgtattccttagatactaccatattatctaatgtttctaataatggaattagcaaaaaatgactacatcatccaaatttgactttgtactaacatacttggcgtactccatatccctgaaggttaacaagagataaatttggcctagactggtcttttcctgaattcatcacttaaaaaaggaaaaaaagaatggggaggaaaagccacgttttacttttataatttttattccatcattaaaagtacaacttgctttatgatctgaagaaataccatctaagtctttctattaggaacaaaagtgagcctttcagggaaaaaaaaaaaaggagctgggcttaatctgcattagccctttgatgtattcccagattttaaaaagcttcccactgttctcagccacgttgaaacagacccagccatgtgtccggcgctgtccttttctcctctcagcacacacttagccggagacaccttttggccaatgggccaggattcttccattgcatcttcagcatgtgaccgtttgtgctggctcattgggagttctgctgctcagtactccttccccaggcaaagactcttaagttaataattggttcagaagaataaactataccgccctcttggtcttcttttggacatttctttaagatgaggctcttactggtatatctggggtactttattgagaaatagaaagtgctagctgaaataaggcgtatcagtctagagttaggaagtgagaaatgcaatcggtaaattttgcttttaaataaaaatggaagccccattttaattgttgccatttctagtcattttatcatttttaacagcctggttttctattttagagaagttgctgaccaatatttagagagcacctccctaatctgcacatcctcttgtgtgtgatggtgaagtgatgggttggaatcgtttttaatgctgtttccattgatgggacattattaccagaaggagtgctttgtgccagctggtttcatggatggaggaaaacaatctgggtttcagtttcacaaatagaaaaacaaaacctgagaggaaaaggaagtaattcgttagcagtggccactgtgcagagtaggataacctgccttcaaagatttttgtttcatgcactataatataatgtttaataaatactttacttcaaagaacctcactacaagaaaactggccgctttcctgctattcttgttctccggctcagtatgactataagtagctcatatccggtcctctgtggtctcaggtggtcgtttgtgtttatgatccttaagctgaaactgtaaggactgtgtccctattttaagtctttagcagatccaccgtgttctgcaggaattgacagaggctctcgtgaaacccttgacactttgacccatcttgaggaaaatgcttagatgctaaaagcagtgtgcatagggattacgtcctccaaaaatagaaaactctaaatttactaagcagggagtagagaaactcatcagactgcacctcaagtttttgatgtgttctggtcgcctctgcactcccattctagacttctaaacaacacgttcaggatctctgagataaaagctggactgaagttacagaaagagcattagagatgtttgaatttttcttttttcccccctgtagatatatttggcatatgtagaatttgagagtccactattgataccagtttcttccagatattaacacatatcaaatagacagctagaactcagaagaaactaatggagctctgaaagaaaccattgttttttccactataaatcttaactcaacagcatttagggtctgggtggagccagtcacctgggcagctgcttcacacccattttgaattagctgcccagtgcttctggtgagcacctcggtaggagccactgctgtgaactcttttgcaagttctggtggtgactggtttggtttttattgctccctgtttgatgcactgataggacctagggctgttcttagaaatataggcctgagacgacttaaatttcacactggttttgtcttccgtttccacattcctctcactgactctccctcccttcctgccctctctctctctctcatatgaaatgagtttaaaatcagaggggaaggattgctttaatatttagcagtctaaacagagggggacagggctgaagaggaggaagggagtgaatgggtgtagaagagaaaagctgttcccaccccattgctttaatgacagtggaaagggtgcatggattgggcctgtgtttctctatcagctactttgttctttaaagcactggctagctaagccatctctttctctcccatattttgcctctttgagtgtttgcctagaaccacttagctgtggcagccctgctgatggggcaaggtgctctgcaagtttctaggcaaggtttctggatccatgttgaaattgaacgcagatagcacaaccatattataacagctacttacaaaccagtcagcacatgtgtggtgagcatttctagagttgagttattgcttaggtcaattgtaagaggagtttctctgaaagagttctgctctttgaactggcaaccccaactctagaacttacagaattgtttttgttaatttttctggcaagagattcatccaagtttcctaaacgtactacaagggtatatgtatacagagaccttaaggaatggccagccatgcaaaccctagggaacatcttatctgacagttcttgggatccacagtggcttgggtcataatgataatactgtaactgggagagctgatgtatatggagcactcagtatgtgtgaggcaccatagattctctcttcatttaatcttctcatgagaaatacagacgttaaataattttcccagggtcacataagctggtactaggaatgaggcttaaagcagggctctctaagaacaaaagctgtgatgccttagcatcattgacagcagctcccaggtcttactcatcctagtgcagtcccgttagtctacctgagctccccctaacacaggagttggcctctgcccactggggctttcattcccactaccacccacagtttctgcatatggcaggtcggagcccatcgtagtgtcatgagccattctctaaaccaccgtctgcctgaaaactgcctcattctctgtcattcctgaaggaaggactctggctggcccatctcatctttactcacctaggtgttcaatggatcactgggtaatctgagggttgatgttcttctttagtctatcaaccaatcccagagatgggaggcagggcttacataacactgtaaatactgccacctgggatgacttctgcgggagaagtactgagacccaagtccaccatgggaactaactggataagtttccgaagatttatgtcagtaacattcaccaccgtgtcctttgtattcacaaaataattagaaactacctgactgtccatcaataggagtttagttaaagaagttttgttgttccatatggcagaatattcatatgcagccattaaaatagtgatcaggtaaatgtttacaaacatggaaagatgcaatatgaactatattgtaacatgaaaaaataaagttaaaatggcccgtgtaggatattgctttgttttacaaacacaaagttgaggctgggtgcagtggcttatgcctataatcccagcactttgggaggccaaggcaggatgatcacttgagcccaggagtttgcgactagactgggcaacctagtgagacctcatctctgcaaaaaattcaaaaagtacaataagccaggtgtgatgatacatgcccatgaccccagctactcaagaggccgtggtggcaggatcgcttgagcccaggaagtcaaggctgcagtgagctgtgatcgtaccactgcactccagcttgggtgacagagcagagagactctgtttcaaaaacaaaaagcccccacaaacatgaaaggcttaatccaggactagtaatagttgccgaacttgagcggaattgtcttcatgctcttatgttagcatctgatattttataatgagcatatcccttatagattcagcaatatatttgaaaaatacaccaaggtaaaggagttgtgctaattaaaagtagctgaaatgaaaaatattgattattgaggaagaaaaacaatgaaagtaagacatagaggcctcagcagtattactgataactcaatcattgttacctgtataatagaacaaattaagggcagaggttctgaactgaagcagtgttattactaaggtgcttgaaggggggaacccacatttctttaatagcaacactccaggtttctaacatctggaagtatcacaccatgaattttttttaacccagaaaaactgggaaaaacttcaaatcactgaatgacgtgttaaccaagtttctgactttaagactttaagattattgactctgaatttacatagaattctaagaatttcagttagttgattgtgtgtgtggtgtgatgtttaaaataagtttgggaaatgctgggttaaattaatattttttatttcaggatgtctcaaaatctttactaagtggatgtctgttttgaatctccaagatggaatatagaatgcagcatttctcaaatggaatttgaccactgagtccttgttttctttgggcatgtactaagtagcctttcccagagctcattttgtgggataccataggaaatgctgcgatgggaccttttaattaatttattttttgagacagggtctccctctgtcacccaggctggagtgcagtggcaggatcatagctcactacagcctcaaaactcctgggctcaagcgatcctcctatctcagttcactaagcagctgggactaccgaagcacaccaccacagcctgctaattaaaataaaaaaaaaatgtagaaacaaggtgccactatgttgcctgggctggtgttgaactcctaggctcaagtgatcctcctgcctctgtctcccaaagtgctgggattacaggtatggccactgtgcccagccatatatgtatatatatatattttttaatgaagccacaagcattctgcctctgtgctttttatttatttatttatttatttttgagacggaggttcgctctggttgcccaggcaggagtgcaatggcacaatctcggctcaccgcaacctctgccccccaggttcaagtgattctcatgtctcagcctcccgagtagctgggattacaggcatgcgccaccatgcacggctaattttgcatttttagtagagacagggtttctccatgttggttgggctggtcttgaagtcccgacctcaggtgatccacccgcctcggcttcccaaagtgctaggatttacaggtgtgagccggccgaccctatatattttttaaaagcttttaagaaacacagtaatctttgagttgagattttgaaaaaaattgcaaaaatattgcacattagcattttaaagttagtggaggctgggcatagtggctcacacctgtaatcccaataccttggaggctgaggctggagggtcgcatgagctcaggagtttgagaccagcctgggcaacaacatagtggtatcctgtatctacaagttttgtttttttgttttgttttttttttgttttttttttttaattagctggtgtggtggtgcatacctataatccagctactcaggaggctaaggcaggaggatcacttgagcccaggagtttgagcctgcagtgagctaggatcgcatcactgcactgcaatctgggcagcagagcgagaccctccctcacaaataaagttagtggaaagtgctatagtaaacttttcccagttttcccctaatctgttttaccatgggccactcccttacccccacttttattttttttcacattagctattaacatgccctgaaagtaatgttccttagaattccatcaggcaacactactctagatcagatctgcaaactacaccccaccaactgtttttgaaaataaagttttggctgggtgcggtggctcacgcctgtaatcccagcactttgggaggccgaggcaggcggatcaccaggtcaggagatcgagaccatcctggctaacatggtgaaaccccgtctctactaaaaatacaaaaaaaaattagccaggcgtggtggcgagcacctgtagtcccagctactcgggaggctgaggcaggagaatggcgtgaacccgggaggcggagcttgcagtgagccgagattgcaccactgcactccagcctgggcgacagagcgagactccgtctcaaaaaaaaaaaagttttatcggaacacagccatgctcattcctgtatgtactgtcagtggctgctttcacgtgactgaagcggaactgacagtgtaacatgcaaaacaggtaagaaaagattgaccatctagcccattgtagaagaaagtttgcccacctctgacctagatgattagtcataggtagttgcatttgcaaattgactaattttctttttacactccagcatgaatacatgcaattgaacagctaatataggtgtgtgtatgtgtgtgcacatatgtatactaaaatattgtaaaatgtcaagtgttgcaaataacattgttaactgaaagtgacggaatggccggccaaatttatatttattgtgtcaaaaacaaaatgtaccagacaattaagataattttacccaggccactgcagtaggggtaacgtttattaatgagaaatgtctcagagagaggaagaactagggttttataaatgcaggtgaacaagggaggggtccaagaattacggggttcatgaagaagagtggaagtctatggggaaggttgctttgcctccagccatttcctgggttaagaaagaggaggaagattctgtaactgtttctgtgttctaggagcacggggctcagggaaagttcagcattgtcagttgtcaacaaaatcagtaagtgttattaaataccccatggtgtgtggttctggcactgaaatggggctgtttcctaaggctctgtccatggccacctctgtctatttctgcattctgtcttgcattgcttctgttgcctatatcctggtcagcacagtttatggtgaatcattgcttattgaaatagagacggcaataatgaagccagctattataaattagagcaaatatacacatccaatacgttttaaacgcatgtgatctctggagtagtatcactaggtagcttccatttcagttcgcctttggtatattactgtactccaaagaatatcatttttccctctgtaaaattttcctcatgaaaatggtcaccataggtctgatttactttttggatcagtaacaggtcacagcataaatcccattcctgcatcaaggcggaacaagaccctcacactttggagggagctgagttcctgtttagaagaacatgcacagttagataaatctgttcacacggcttagatgatcagagccaacatctgatgactatgagcaaggcacttttctaaacatttttagtattttctgaacagttttgttgaggtatactttacagataacattcacctcttgagctgcagttcaatgagttctcgtaaactgagttgtgcagccatcaccacgttccagttttagcacatttccatcaccccaaaagttcctttctgcctgtttgcagccaatccctgctccctggccagccacaggcaagcgctgtcaatgtttggacagtgttggattacctaatggactcttcaagacagtcctttggggtgttactgtcattctctgttttacacggtgaagaagtgaggcactgagggcactcagggtggtttcaaatgaccgaggccaggtgctcagggcccagaaccctcttaccccctccaacttcagtgagcttcaaaatcacctgctgagcttgtttgaccacagacttgtgggctccacccttgaattcctgacgccctaggtctgggatggggcttgacaatttgcatttgtaaaaagttcctgaatgctgctgctgctgctggtcagggaaccctgctttaagacctcctggtttatgcaatttcaaacattgtaagaaatagtcactcatgtgattggtttgtgtgcttggtgtagactgtacgaggatttttcaaaagtaagtattgttcattctaaaggaaggaaatgtatgttatgagatagaattatataataaacagaaccattaaatgccatctgaaaagtggtgttttcaatggcaggaagtagcattgctgcgtattttgtgtgtgtgcgcaactcagctttgtgtcattgtgtaactttaatttgaaagaacatcacgtgactgctgttttcatttctgccttttaaaaagcagacagctattcagaacagcaagaagcagacccaaactttgtttgtatgcccctagtcataggcaaaaatggaaagggtaatttaccaaaaaagaagaaaatagataaaaaggaaaagaatggaaagaaagtactgactcactgcaaacagctgcaaaatgttgcccttgggatagaggttaactcggttgtgaaataatggccaaagcggtgcactcttaataacttttttgtagccctggagaaagcttctggattgactgtgagaagcttggcagaaggtgctgcggcctggtggctggctcagcaggaggcctgggattgaaagctctcggtttgtacaagctcttttggatttgtaacacttttattttaaatctccaataaatgtaaatattttggtcc

SEQ ID NO: 64 - DNA, 441342 bp, Homo sapiens; identical to SEQ ID NO: 56
  source 1..441342: mol_type = genomic DNA

SEQ ID NO: 65 - DNA, 441342 bp, Homo sapiens; identical to SEQ ID NO: 56
  source 1..441342: mol_type = genomic DNA

SEQ ID NO: 66 - DNA, 441342 bp, Homo sapiens; identical to SEQ ID NO: 56
  source 1..441342: mol_type = genomic DNA

SEQ ID NO: 67 - DNA, 441342 bp, Homo sapiens; identical to SEQ ID NO: 56
  source 1..441342: mol_type = genomic DNA

SEQ ID NO: 68 - DNA, 441342 bp, Homo sapiens; identical to SEQ ID NO: 56
  source 1..441342: mol_type = genomic DNA

SEQ ID NO: 69 - DNA, 441342 bp, Homo sapiens; identical to SEQ ID NO: 56
  source 1..441342: mol_type = genomic DNA

SEQ ID NO: 70 - DNA, 441342 bp, Homo sapiens; identical to SEQ ID NO: 56
  source 1..441342: mol_type = genomic DNA

SEQ ID NO: 71 - DNA, 441342 bp, Homo sapiens; identical to SEQ ID NO: 56
  source 1..441342: mol_type = genomic DNA

SEQ ID NO: 72 - DNA, 129995 bp, Homo sapiens
  source 1..129995: mol_type = genomic DNA
cattcctcgcggcacccgcggacaccaggcaggcccggccgggtgcgcggccaaggcccgctccccgcgtccccgggcgccgcccccgcccgcggctgggctccgagagacgagtgggagagcgagtgcagcgagggcgagaggcgagccgagcaggccgccctgcccgcggccctagcgccggcgcgaggagggggcgccgcggcccaccctccttcctgcctggccgcgggccggccgggccgccgcgccccgacccccatggccacccaggcctccgggccgcgaagtcgcagcgccagacccaaggcccccgagtgagcgcgggcgccgaggtgagcagcgagcgccggggcgcggggggcgcagtgtatcctgccccggggcgggggcggcgcgaggcgtcgggatcctaggccgggtgatgagccgaggcgggttcggacgccgagcgcgcgcgctgggtggagatgtggggtccgcggggtccttgctttgtgtggtgtggggggtgcgcgaggtcaccggatggacgtctggggagctgcagggtgggggcgccctgcgccgcggctgagggtcttctgggggatgtgcggccagctgaggtcgggtgggggcatgggggcgcgaggggcgagtgtggcaagggatctgcttgcgccgaggcgcggagtctttgcggagcgtggggtggggacgtggggtgcattcgcggggcgccgggggcggaggtgagctttgtgagtgcgtccgaggtgggggacggggagctgacttccccatgcgtgacccgggcccggcgtggccatcgcttgggagtcagggccggcgaaggccgtgcgtggcgagatgggtgctcgggctctctgcggtgtccctacccgggcagcggccccggggcctgtgcgcaggccccgaggccgggcaggaagcggcccccgcgacctggggagctctgtagcggccaggcccgggaggcacgggcccttcggggatgacgtcacgggcgggggccccggacacgcgagccttgcgccccacagacggcggcgcagcccgccgcccttttcgaggccggccccccctctcacgcgccttgaaggcagggaacccgggaggaggacatgggggccgagtgcggcggggacaaggggtggcaggacgcgagggtgacatttggagcctggtcgcgccaggggcctccgtggtggggcggaggggaagcgaaacaccagccaggccctaggccgtcgcggccccagcttcctggggcgcccgttttcccggctagcagttttctttcttggggctcttggtcgttatccagtccacgcaggggccggagtgcgggctgccgcggtgctctcctgcgcggagcccgggctggcgggggcgcggcgggcctcgggctctgaatggatgggagcgagtgtaacaatgcgccggtgggggctgggggaggggaggccgcgcgcctgaatggcggagccggccgggcgctgctccgcgcgccgcacactctcccgcgccgccttccccgcggtttcggcgggcccggattcagggacccactcgggatctgcacggttcctcccaccaatactgtcccccgccccccttttatgtctttccaatgcagtagtgtgttgagaattcaagggcattacatctggttgcaatccagtttcatgccgctgccgggctgttaagacctcgcgctgacgtcagagcaggggaattacttctttttattttatctttttttagttgtctgctgccctgggaggagaggcgggggtgggttaggctagctctgatgtggaggcgccagcgtgatgggagccccgagctgggggctctgcttctcttcctgcccctgcccccctccattctccatacagtcctcgctctgctcagggtcaggcccaccccaggtggggggcagccctcgctgcagactgaatggtggcccctccctgctgaccacacagctgggttttcagaggctttcctgggacgtggccctcgggatctagaaactggaaaggaatcttctagtttcccacccctccccctcttgacaggcaagccggtatattcggggcccaggagcaaggaaaagtggccttttgcgtgacacagaagtggacacatcattctgatctcagggcaggctcagccccataactctggcaaaagctctcacaagcaaaagccttggagaggaggagaatgtatcaaggtgagatccaggccccagaagccaactgtggagtgggcaaaataggacctttcccaccagcctagcatccctctggcttctgtggagataaagggaactcaggggtactggagctgcctttctcttccactagactgtggggctctcataggcagggaccctgtcttactcctctttgttttatttttgagacagggtcttgctgtgtggcccaggctggagtgccttggcacaaacacagctcacttcagcctcaacctccagggctcaagcgatcctccagcatcagtctcctgagtagctgggatcacaggcgcccgacaccacacgtagctaattttaaatttttttttttttctagagacaggggtcttgccatggctggtcttgaagtcctgggctcaagcgatcctccctctttggcctcccaaagtgctgggattacaggagtgagtcactgcacccagccttactcctctttagactcccaagcctagaccaattgctttcaaattcttgcccgtgacctatagtaagaaatacatcgtaggtaactacacaggtcacactgtatatagctgaaacaaaagtttactgaaataactcccttactgtgtctgctggtctgtaatcctttttgttcttgtgtatttgttttttttttaattactgattgctacccacgaaattaattttgcaatccactgatgggtcatacccagaatttgaaaaaaacaagcctaggaaatgaatttgccatctattcatgcaacaaatgttaattgcaaccctaataattcctctcatgttaaactactcaagtaacacttggatacttgggtgaaaaatgcaaataagccagaaatatatgtagtaaaagtaaaagttcccttggcaccctccctgcaggtaaccccagttaatagtttgaacgtatccttccagactttttgttactcacttaatgcatatatatatatatatatatatatatatatatatatgtatgtatgtatgtatattacatataccaatccatgcatagttttctttttccccaagtgaggacatactgtgggctcttcctcggcagcttcctttttcctctccgtttgtcttggagaggttggttgtgtggcgaagtccttcagggcaagttctgggttgactcctggctccaccacatactgaacaggccatttacctctctgtgcctcagtgtccccatctttacaatcaggagaataacagtacagacctcacggtactgaagtaaagatgcagtgagttaatccatatgaagtttagagcagtgcttttgccaataaatgctgattgctgccgtcattgttgtattgttattgctgttctatctccatggcagcccatgtttgaaatgcattgctttccacagctgcctgtggccatggcatgggtgtctttttcctcccctatccaacgtgtggctccacagggagggaggaggtgcaacagcaacggtgtgcgcagagcagcgtctctgcgggagaggcacctgggcactgggcccaagggaacagggattttccaaggacccactgtttccaaagttctgtgcttaatgtcggggtccaagcaggaagcatccctgcacttgaccacaagaaggtcacagcccagtgggtgattgggacccagctcatagccaaggcctcgaccagagctggaggcttcctggaggaggggcctttgagcaggtgcttcaggcacggcgaggtaagagtgagaggagcattcctggcagagggaacacagtgagcagagcgagtctttggaagctggaagggatgtggcctgtgtgctgtagccaaacaagaggggaggacttggctcagaaagaatggtggcggaagaggttgggctgttgctgggacctcctcactggcctccctgcctccatcctgtcccctcccaggtgctggccagcagcactgtcagagcgatcgttctaaacccagcagataacctccagtggctcctgctgccttatgaataaaggtcccatctgtagttcttcccatgctgtccagggccatttctggtgtcctctgcctgccctgtcctcattcagtcctgtcccctccagccacagctggcacctccttgttaaggtgcagccatgtgcatccttgcctctgtgcatcgggctgggctgttccttccacctgggatgcccctcaccttcctccctgccgccccagaccaaaacagacgtcctgtctcctcctcctctgacctccgaggcagaatgagtcatctccctttgtctatactcgtggcatagcgtttatcacggaattatcggcaattctgccagtgtctgtcctccccatgaggctgaagcatcgaggcctgaaagcacgtctccttgctctctccggcccagtgccaagggcgaggcctagaacacaggacgctcagaaatgcttcctggcaggagggccaggtgaggtggagagggtgagagccccaacattgtctcccgtgggcccctttgatctttagcaagggcatgctcaggtctgtgtggatcttgtgctgtcagcctttagatgagtggggtgaggggcttggtggggtcggggggcagggggaggtggcgggcagcttccccaggctgcttcctgagggggctgggagaaactggctcatcctgttccccagtgattgaggcagagctgtgccctgttcctggtgggtcactggggatctgagattggaatgtgacaccagggaaggggaggcagggtgggaggcagggcttggaggtacaggctggggcttggctggcaaaggacagatttcgctccactggttcttgaacccgtgtgtgtgtgtgtgtgtgtgtgtgtgtgtgtgtgtgtgtgcacgcgcgcgccggggaggggagagatggggaagagaaaaacatgagggcagagaggtggagtgggggtggaggacctggggagtggtgagcagggacagggagagatggaagtggggggacggcaaggagtgagggagaagttcctgctgctgctgctggagagtatgaagagtgtgcttagggccaggaaggaaagcagccaggcgcatcgtctcacaccaccatcagccatgccttccttcgtctgtccagcagacaaccctaagtgttctcttgcttggctccatgcttgcatggccccagacaggagcaagcctgtggtccaggcttcgcacccttgaagtctaggggccaggtgaacaatgagcatccggtttctttcttttttttgagatggagtcttgctctgtcgcccaggctggagtgcaatggtgcgatctcagctcactgcaacctctgcctcccgggttcaagcaattctctggctcagcctcccaagtagctgggattacaggcgcccaccaccacgcccggctagttgagcaacctctttctgcacaaagtgatcaggctgggggagagaaggtgcccagaatgctgtgcagaggcaggagaggagggtggagcaggcgagcatggggtagggggcagggaagccatgtgttaggcactatggtggggagccaggactgctggggagtcttcctttcctctctggcctcggtctcatctgtaaatgggggaagagtggactgctcttgcactgatggtctgtggacccaagtcacccactccttgggcatgagaaaccagggaccccgtggagacagctgatagaacagggacagcaggcatgctcagagcgtctgcaggcccatggtcagggggcttgagggagaacatgcagaatccagtggagcttgggttcgcctcctagagttcccttcttggagactgtgctcatctggaaggcgagatagggtcggggtaggggaaggagcactggattcggaatcaggaaaagtggttgagttttaactgcagcatccctcgggcaagtcactttccctctgtgagggtcagtttcctcttctgtcaaaaatgtgaacgggctttgttgtaagcattaaaggtgagctggggcgccgtggctcacgcttgtaatcccagcactttgggaggccgaggcaggcggatcacttgaggtcaggagtttgagactagcctgaccaacatggcaaaaccccatctccactaaaaatacaaaaattagccaggtgtggtggcccatgcctgtaattccagctacttgggaggctgaggcacgagaatcacttgaacccaggaaatggaggttgcagcgagccaagatagcaccactgcactccagcctgggtgaaggagactctgtctcaaaaaaaaaaaaaaaaaaaaagtgagtgttgctgtgttttgtcatctggaaagcaaggaggtcctatagcttggggccataaacaggctttggggtcacaccagcctgggttcaaatccaggtaccagctgctcactgtggggctccatttccctcccctttaaaatgaggataataggcagggcgcggtggcttacgtctataatcccagcactttgggaggccaaggcgggtggatcacttgaggtcaggagttcgagaccagcctggccaacatgatgaaacccatctctactaaaaatacaaaaattagtcaggcgtagtgtcacatgcctgtaatcccagctacttgggaggctgaggcaggaggatcacttgaaccccggggggtggaagttggaatgagccaagatcgtgcctctgcactccagcctgggtgacagagcaagattcagtctcaatgataaataaataaacaaaatgaggatagtaacaggcccctcctggttgctgctgcacagttcctcagctgggatatcattgctgggctgttaggcagttgttttttgttttgtttgtttgttttttgagatggagtctcgctctgtcgcccaggctggagttcagtggtgcgatcccggctcactgcaacctttgtctcctgagttcaagtgattgattctcctgcctcagcctcccgagtagctgggactacaggtgtgcgccaccatgcctggctaatgtttgtatttttagtagagacggggtttcaccatgctggtcaggctggtctcaaactcctgacctcatgatccgcctgcctcggcctcccaaagtgctgggattacaggcgtgagtcactgcgcccagccttgggcagttatttttattgctaaagtgctttgtatgtagaagagatcaccattatgattattattttttttttttgagccggagtgttgctctgtcgcccagactggagtgcagtggctcgacctcggctcactgcaacctctgccccctgggttcaagcatttctcctgcctcagcctccctagtagctgggattacaggtacgcactaccatgtctggctaatttttttttatttttagtagagatggtgtttcaccatgttggccaggcgggtctcaaactgctgacctcaggtgatccacccgcctcagcctcccaaagtgcagggattataggcgtgaggtgagccaccacgcccggccaattattcttcttccattcatgccaggtcacatctaacccttacctgtaataacattggccaaaatgaggagtttggtgcttatttcttttctagccaggtcaaggcagatggattgagtgggtctttttacacatggggcgggtgagaattactagttttctggccagagtttctgtatgtaaagggactttgccccagtggtgtaggtggaccccaggaaagcatccagcaacttgtgactttagtggcagtataaccacaaactctcattcattcgttcatttataaatcacgtgtagaacaccagggtactgagaaaacagccatgaatgagatgcagctctaatgtagcatagtgggtatgcatatgtattttggactttgcctgggttcagatccagggtctaccacttgcgaacttagccaagttatttatctcctttacttggttctgtcatctgtaaaatgggggaactgatagaatctacctcatagggtggtcgtttgttcaagtccagcatcaggtacatagaaagtgccagagcatggcccttcctccattgttgcttttatttctgccctgaaggatctcatggaccagcttggtgctggaggaggtcaccctggccaggcttctcagtgacggttggcatccagaaaggggtgccaaagccccccaactccttgaatcagacccttctatagtgatctaaagctgcttctctgcttgactgttggggcctgatgctggggaggtcctgtgaggccttattgacctgggaaagtccgcctttgtctggcgccaggtgtgcttgattttagaaggaatttcattcctagccgggcaccgtggctcacgcctgcaatcccagcattttgggaggccgaggtgagtggatcacctgagcccgggagttcgagaccagcctggccaaacatggtgaaaccccatctctactaaaaatacaaaaagatagctgggcgtggtggtgggcgcctgtaatcccagctactcaggaggctgaggcaggagaattgcctgaacctgggaggcagaggtggcagtgagccaagatgatcgtaccactgtactccagcctgggtgacagagcgagaccttgtctcaaaaaaaaaaaaaaaaggaatttcagtctcaagtatgaaagcagaaagtgtttcctgattgaggactcctcaccagccggaggcagcaggactgcctgcctctgtgtgtctttaggcaggttcctcaagctccctaagcccgtttcctccttcatcaaaggcgaaagtaatagtacctatttcatagttttgttaagaggatcaaatgagatagggcctctaaagcacttagccagtcctgggcacagaatagtgtgcttagtaaatattgtgcctattagtgataatcagaattctcagacaatgtaaagtaaaaaccacctgaaagatttcttaggagctacagcttcatagagatgtgaagttgtaaacctcccagagcccaagtggacaaagaattgttacagcagctggagagacaggagacccagagaagcttaactcctgtagcaaagtcacccagcattctggcttggggtgggcagggatggggaatcagagctggctttcagtctggtgctctctggtgctttgatagtgattccttcagcaaatagctatgggcaaacagcattgatgcacagctgaggtcatatgggcctgtcttctggaagcttctgttctgatagggaaaatgaaatttctacatgatcatgatgagaggtaaaataaaatcacatgttctattagaagggtaaagtcatcgggtattcactcattcaagggggctctgtgccaggctgtggagcagtgggtctcattcgggggcgatcttgtgtctcaggggacactgggccatgtcaggagacatttttggttgtctcagctggggaggtgctgctggcatctagtgggtaaaggccatggatgctgctaaacatcctaccgcacaaggcagcccccggaaccacacaccagctggcccctgatgtccatgtgccgagggttgagatccctgtcttgggaagcagcagtggccaagcagatggagcccctgcccgtttgaagcatagagcgtggtaggtgagcagacgttacagaaatgattgcctagatatggatttatttgtaatgtgagctatgaaggaaaaggtagcgggaagaaagagggatgcgagcccttctactcttttaagggagggcctttggggaggtctttccagctgagggcacagcccaggcaaaggctcagaggcagaaagtgcaggagtgtgttgtgggtggggaggctaccaggcacctggtgtgtgcccggggagaagtcagaaaaaggcctggcctcggggggcccaggaagtggcttccagaggtggggagaaggcaaaagagaggactaaaccctttagtctgtttgagggaactccagcccccagcatgttgctctctgggggatccagcagggccaggtgggcagtgggagcaccctagccccaggtgctaccttccagcctggggccaagccttttccctttctctcatttgcagctttctgataggtgggaaagagaagcaggaaaaaagagcagaggaaaaacaatattttcatttcaaacacagataggggtgagggaggcgggaagtaatctggtttatgatacctttgagacaagcacagaaaatccccaccgtggcccgaaatagcactaaaacagacgttttgccaaatcagacttaattgagtggctctcttcttgactccagcaggatgtggctggagctggctttgttcccttggggtgacactgtcccctggggcccctgccctggctaattaaacaaagaggacctggtctcctaggcaggacaggagcctggggagctgaacttgacagcccttggcctctgcctgagagggccagaaatggttacaggggttgggaaggtggggggttcctgacaggagggccaactgagtgaaagcattggtgggagaggcctggttcctctaatatgtgaatatctgtctctttggatgctgaaagggatggagaaaagccagcattgagtgcctactattgtgccaggcattgggtggtcctcgctaagtcttattaactgccctatatccattatcaaggaaactgaagcacagagaggttaagtgatctgcctgaggtcacacagcaaccaagtggcagagctaggattagaaatcacatccgcaggctccaaagccaggccctgcctgctgcttacccccttccccatgttagtcactcatccattcgggagctaattcctggctatgaaataatattgtgaccttgtgggaagtgaaggcttgcagtcagacagccatgagcttggcttctgaccaaagcagtttttcttttcatggttttctccctcagaacctcctctttcctcatctatcaagtgggcataatcatgcctttatcctggagttgctgtaagggttaaattcagcacagaaagggatggaaggggaaggaggaggtccttgggccacccagcttggcagggtgcaataaaagagtcctaggtagagggagccaggcaagattgcaatatctctgtgcctatcagtgttgggtttctttatttgaaaggggagagagggcagactccactctgcaggtagagaaggtggtgtggaatgcgggtatttatttttctttgcctgtgaaagccctgttttcgctcaggctgtgtagggcttcccgacactgccatgggtgcgcacatctgcacactctggggtgcctgccatgcagaggcatctgcccagggtgggcactgagggcatccaccatgtgacgcccccgtgcagcctgtaagctctcatcacagtgcctgggatacctgggagtccccagaaagagtgaggatgggtgagggccatgaaaccagggcatcattcctccacctcctctgatcaggccctcctggtcccattcatctccttatctcctggcagccagtgggttgctgggaaggcaggggcagccttcctgattgacaaacaaaacaagcttgatcacaaaaggagaggggagactggctgggcctctccagctcccctccccgtgccccaggcatctttcttgctccacccaactggcaccctacattctaagatgctgcgagggggctccaaagccattgtcgaaggtcaggccacccaggctaggagccccttgcactggggaggtggattcaaggagtgatggggttgccatgaggcggcgcttgctgcaatggccgcccctccttcccttcagctggctgggcaggcagcttggagaggaagccaggcggcaggtagctgagaaagacatcggatccagggggagcagcagagaaagcaaacaaacagggctttgtgtggctgcagattggcggctcagaagggaagccaggcctgtggtagggggaagggagaggaaggaacgggagaccaggccattgctctgggccagagatcggcggctggaccagcccgggctgggcggccgggaagtagcgagtgccactacgtgtggacaggcatctggagtcacagcctggccgagtcccagctctgccacttcactccttaacagatctgggcttgtttgcccacctaatctgggcagtcattcacacgtaggactcgctggcttaggaggagagtcacctgtcctggcccagtcagtgtctgctctcatcctacccttgtcccgtcattgctggcaggacacagaatcaaagggattcagggtctcctgggagctgctagccttgccgggtctcctgggagggcagcgacttctgcttagatctgtgggcactttggagtctttgaccggggaggcagccgtgctgaggggaaacgggttctctgcccaataacggatgcctggggtgtaggtgggcagaggctggcatcaggcctgaggaaccaaactgccccctcctcgtcgcggtggagacgcacgaggtgcggggaggaacatagccaggaagacgggccttcctgtggggagggaggggcatcttttctggggtgtgagtcacattctggatcccagcgagggcagcccccaacctggcccacctctcagagggctgggagggcccgggcctcgaggaaaggcataggtaggagctgtcaggccagacgcccgggcagctccacgctcgcctccgaggccatttcctttcctctctccccgacctcgagaaggggcggcgagagggcaaatgcccgcgcttcctgccggtcccgcccctccccgcccgcggcgcccaccatcttggccgcgccggagcctcctccgcggtggcgtcccacaggccgcggtcggggcccgcgacgccgacgccgggagggggcccgggaccttcggggcgctgaggccaggcggggggcgaggcggggcgggccgctcgcgtcgccatggcagcgcccggcccggcatgcttcgcggggccgcggggcggggcggggtgctgaggccccgccccctggcggatcccgggtctttttccgggaacgcgggggcttccagtcccagcgttgcggccggcgcttgcgggttaccgggccaggcggcgcgcatctctgggcctcgttctcccactccctggatgtttggggataatgaaagagagtctgtgcgggttagcctcgggacgggctctgcttaccgagcccggcaaccccacggcaggggcctcgggaagccgcttccgagggccaggataatggggagactggacccctaccgcttgggggctattaaaagtggaggccaggcggcctctcagctgcagtctctgggtctcgagctcttccccggaactgtccatgggtcagtgaggacctaccctttgccctagggcaggagaaagaagggggccgggactgcacacctcacccggtccaggcctggaccctgcaacctcggccggcctccctccagcccaggagcacaggcctcccctagttggcagtcgttggactgtctggctgggaggcacattcctacctcctgagctcgggcaccccgcctgccctgggggagcctcttccagaactttgctgccaacactgccctgtccccacccggccttctcgtgccctaagtccctagttactactccacagccgccttctttcccctggtctttctctctctctttttttttttttgagctagagtctccctttgtcgcccaggctgtagtgcagtggcgtaatctccgctcactgcaacctccggttcccaagttcaagcgattctcctgcctcagcctcccgagtagctgagattacaggcacttaccacggctaatttttttgtatttttagtagagacgaggtttcacctcgttggccaggctggttccaaactcctgacctcaagtaatcctcccaccttcgcctccctaagtactgggattgcaggtgtgagccactatgcccggcctcccctagtctcttaagaggcaccgattcagctaccctttgtcacctcctacctgtactgagtaggcagctaaattgaatgtcggcctttgggtctccgaagggaggctgtatgctggttgagaggctgtcctcgcgcctttctccctcctcacccagggcacatgcacaaagaggctgagaatcggctacagttgcagcagaagagactcagggttgccatcggaaagaacttcccagtcctaagcattttgttcttagtgaaattgtcagattattgatatgttggttgtagagatatccaaaaatacaagaaaaaagtaaaaactttataattccaccagcagtatataactactgtcaacatactttctgtagatgtatgataaaccacttatgatacatctacggagtcatgctgtatatttggttttgtaaggcacttggtggttttaatagcttttttctcactataaaaggaggacaggcttattatagacttttggaaaatatgacaaattaaaaaaaaattcacccgtactctcagtctccaaaggcagccacagttgtcttccctcaacccccccaccacccgttcatggggtttttcgctttgtgttttttgtctgtttaggtatgccatcattacttctgtatatagcagttgatattccgcttttcttacttaatgctgtttaagatgctcctgaaccacgttcttgggagaacttccgagatgaggcagacatttctgggggtgatttgttggactggctgttcactttctgagtttgtcctctccctacctgtagccccccgacagagcccttctccattgccagtaaccaatgatatgcagcttgggtcagggggtcctgcttgctgggggcccaggaggctgcctagtgtggacagggacatgcaagactcatggcccgatgctgagatctgggctccaatagtaaggggctttactctggcccagatatgccaggtttcagggaggtctcagaccttggcctcatcctcattcggggcctcctttgcctgggcacactcagacccgaggccccttgtcgatcctgtgacccaccttctgctttgacttcctaggagttggtttctgctgcccttggctcctcagcccctcttctctagcctctctctggaggcatgcaggcttggcaccagcacagcctccctctgcccagctgccccttggccctagctacaagctgcccttgccctgacctatccctactgccaggcctgtctcttctcccctattccagaacggttcaattctaacacatccaagccctgcgtgaaacaggccttgggaaatcacagttgccagggacggtttggcatttaaaaggcatccaaggctttggggaaaaagctgaagagacaagaggatgcagggccctgtatcagaacagcatctggatttactggatggaaaaatcacagaatgcccctttcctcgggaataacagtcctggccgaggggcagcgggtgtggcatgggcacgccatgccctgcctggccaccacctgccatcaccgctgtgtactctcagaaatgaaaagattagggaaaagattagggagggacattgtcagcctgcagccaacggcccgctctaacaggtttattcagttgtaaaatatttaagacctgtttcactttacctgtatccaggaggcagccaggctggggccgagattgatgtgctgaacatgatttatttatctggatttgctcttgtggtctgggtgttacctgggtgtggaatttaaccaaatgacaagatgggtttgcgtgtgttcctgagcttggggattgtgtgtgtgtaaaaagtgagttggggtttgtgtacatggcagggggttgctgttaggtggcttgtgtgtctgtttgtcactgggaccaacgtgtggttgtgtgtgtgtctgatttggggaaatgagctgagggtatgggtgcttacacaccaggcagtatccacagcaggtcacacgttctttgtgtgttgggggcacctctgtgtgtggccgagtagctgtttgtgtgcatgtcctgtggtgtgagacctggatctctctcacccacttttcatcagtggtggggcattgcgcactgactgagttgctggggcatctgcttttccatccggccctgggtgagcactgacaacacctgactgtcttccagtagaactgggccttcctgccctgcagtccagagactagagggagttcggtggtcaaggtggtccaggcccacagccatagccctaatgcaaagcatggctcctactccagtgcgctgctgtggggtgaccctgctcctcctccctggacctcagtttcctcttctgctgcagagggcaggcgcccaggtccctgtggctgctctcacacacgggcttctgggtggctcatggcaggcttagggcattgggctggggtttgtctcctgccactcaagagttgagtcccaccagtactcaagaacagcaaggaatgatgggaaaatccctgctttggggcccaactctggattctgggcgttgtctctgtcccccatctaggcccagccctggcccagtagtcaggaaagcggcagacaaccctgtaacagccctcggtctccccctccccccacacccctttatattgaatgtgtctgtcactactttcctaatgaggctgctgagggcccccctggggcagatacctttgcagaccggaggtgagggggtgggccagcctcagggtcaggacaggaaggggagctgagcccttcccctgcctgcacccccaggccagctcagctgtggaggcattgaggcccctctcagcccctgagccagctgtgagtgggcatgagagcttggggaggtaggaaagctcaccccaggcactgagttttctttggcgctgtgactctgtagtaataatacttccacctggtcgatatctatgtttggaggcctactgtgtgccaggcactgagatcagccatgatctggatggacacacaaaatccctgcccttgagggaggtgtggccaaaggaagaaagacattaatcaaagaatcaagtgatctgagtcgtgcattcatgcatgggaatgccggctgatcacaagccaagacagaggccaggcagagcttctctgatggagacagggagtcctgtgcttagactgggggctgatccaggcactgggtaaaggctcagccgggattgaaggaatcaggagacccagattcttgctgtgtggcctcaggcaactgcccaccttctctgggctcctagaggctggtggcttccttctggctcccgtcacctctgagtggaactcaggcagtatatgtctcctcttcagtgctttttgcgctccctgccagggccctcaagacatctgtcggcaacatccttgactttggaatgctggaggcactgccccaggggacgcctggagccaagcacagcaccgctgcctcaggccccacctgccagttcctctgggcccttttgctctcacagagccacctggatcgaagaaagcctggaaaacattaaattgaagaattagtcccctattttgccccaaaattgcagagaaaagcatttattcatgcattcactcattcatttgcttgactagtgtttcctgaacacctagtaattgctgggcacactgcactccatgttggactgagatggcaaagtggtggtcctcctgccacgtcctgaccacagacctgttttgaaagcccatccattgtcggggggccgggggggggggaatcaaatgaattgccagtgagtaatcgttgagtgacttcatttccaatttccagtttacatttcttctggattattctaccctgcttcccccggccacagttggtggagatggctactgtctgccgggtaggatggcccacccagcccaccagctggtcacggtcccatcccccaccactccaccccaccctgtgcctctcctggtcatgtcacacatgatagtgtggcttcctagttatgagcccagcctcaggagccagactgtcgaggttcaaagctcactgtggcttgtgggaccttgggtgtccccctccaagcctcagattcctcttgtgtaaaatgggatcacaagagcaagtatccactactcctggggctcttggggagattaagtgagaaaatttatgctaaatccttaaaactcacataagccttggctgctatcgttgttgaataaatgaaccacttgcaggctgagaccggggctgtgtgtcacatggcacctctaggcctcagtttcctcagctgcttctttgggaaagcacatctgctctctaggttgggcctcctccctcgtccttcaaagacctattcttggggcctgggccctgtgaaacctctggctctcggacgcagcctggaacccctgagacgaggtcaagctccgcggcccgcctcctgtcgcccggccccaggcgggactgccttggcaggactcgggccgcgagctggaggcgcggctcccggctcggggctccagcggccgcgccccgccgcccctcggcgttcgcgcgcagcccctgcgggggtggccgccatcaaagcgtcttctcgttcttatgctaatgagccccattaaagcttaatggctgcgaacgcgcgggtttaattgcacctgcccgggcctgaggcgcggccggccgcggaagcagctgcgcgccggccgggacggccttaattacctggaaaacgacgcccggcggggaggggaggggatgggagagaagaggagagcagcggggcctccgcgaggccgggcctcgtccgccgaggccgcagtccggcccctctcgtcctcggggcgcggcgcgttcgtttcattaatttatcgccctgcctcggcggagatccgctcgcccgctccccggcgttcaaccgcgccggcttcgtgctcccccgcgccgtcccccggccatcttgggcttggcattcaaggcccttcgggaccgctgctgccactgacccagtgccaccctgctctgcacgaacaataataatggtggttgcacattacgtgccaggcgctcttgagggttgaatgtgacctcgcagagaccccagatgcctcatctcggccttactcccctcgtctttagaagctggtacctctgcctgcaacaaagacccctctccctcctcgctcatcctccctgaaacccacccctgcgcctccaacaagatgagcccctgtcctcctgggatgggattggggatgggtctgggccctttgttgaggggtgggctagcccatggtgaaggttgtctgggtgtgtcctccctctggactgacatttcactgaggccagtctgcctgactgccctatctctgcatgcccctgccatctccctggggatggccctggggttgtgggggctgcactgctgccctgagccttctgcctaggcagggggctgtgagactgatgggaacctcagggaaaccttgagacctaatggtattctctgtgggacttccctgtgctcctccccaccccatcaagtgatcctgggataggcgcctgcccctcctctctccctcattcccttctctcactcttctctttttgcagagggaaggaaaacggaagagggaatagacagaccgctcatgcagtttttagatggtcccctttccctcccctctctcttccatgtccccttgtacccagcccctcttttttctttctttgaagaccgcatcttgctttgttgcccaggctggagtgcagtggtgcgatcatggctcactgtagccctcaacccgtgggctcaaacaaccctcccacctcagcctcccaagtagctgagactacaaggtgtgcaccaccatgcctggttgcccctcctttctgccccttccagtcccatccctcctccctttgtgcgtctcagagaccaaagcctgaagcattgcacagtgcccactgggaggccacccagccctggtcctgcctgtgtcaggcaatgctgagagcacagaggggagtcagacttgggctctgccctccaaggactccagtcggggaggcagcgctcgaaaggaatacttgtcctctaatggaaaaaggaccaatttaaaggaagcagagaacagtctttgagctcaaactgggaaggctgggagaggcttctaagctcagcctggaaggaaggataagtgtgagctaattggcaggaatagcattccaggtagggaaacaattggagttcagccctggctagggcagaacactggctgacatgaggggagagggagtaagggacaaccacagaaaaactgagctcactccaaagtgtggaggcatgaggctggagaggtgggcagagggtcctctgttgcctagcaaccttcactgcctccctattgccaagaggaccaaattcagacccttcagttggcacaaaagcttgtaccacccacctcatcccaggatgcagcctattatcttcagctgggttcctcactaccaggccaagcctcggatgatgattgtgagcctactgtatatgggaaggggggataagcagtgaccccatcagggctaatagcagtggggcctgctgcccaactccatgccccttctcccattcttgtccccagatgtccttgcagacaaaatggaggtgaatgggcaggctgccaggagcgtcaggtggcatcacagccgggtagacagtcgtcactgattaatgaggtggtagaaacctagagggaggtccctactggcatgcctcggggttctgcccttgctctggtcaaggcaaggaatgaggctcacaggggtttagcacctccctgccaggctatgtgaaactcttggtatccagtagtttatcaccagccatgaggtggcttctcttaatatctcattttgcagatgcagacactgaggccagtcggggtgaggagtgagctcaaagtcactcatctccgaggtggcaaaattaagcctcaaacccagggctgtgtgacttcaaagcctgtgtttgtaactgcggagctgtgcggcatcagtaatgcatctgctgctgctgccagacgtgaggaggtggggccctgcctttcaacttcatctctctgacagtggttagcactgtactttacgtgtagtaagtgctcaataaatgcttgtggactggatgattggggcagtaagcagtgagcagggctcagaagcagtggagaggctccatcactcttcctcccaacctgcacctccacccccaggagttggacagcggctgtaaggggacttggagactcaaggcttccaggcagggagtgggctcacaggaggctagggaggatccaacttcctgtccaggtcagggtcaggaggacagccgcgccccctactgccccgctgggaggccaggctgacgtaggaaggctgcactgcaagtcagaatcatcagcaaaacctggggaatagagcgtgtgagggtttccatgcagggtggggactgctttctgatcaagcccctaggccaaaaacctttggaagggactctctgagggcagtgcattcttgtagcgtcgggagcaggagttctcccataacctttttggggtggggacccacctgtggctctggaaaggtgttggctccggctctggggctcagggggagggggccattggtgggcaaaacaagcatagtgaaaactgaggctcatagaggttaaggtcacagagcagagctgggtctgttttctttttgtttctgttttagttgcaacaggggcttgctctgtttgccgaggctggagtgcagtggtatgatcataaatcactgtagcctcgatctcctgagctcaaacgatccttccgccttggcctcccaaagtgctaagattacaggcatgagccttcatgcctagctgggactgttttcaaactccaccaaccccttttcttttgttccattccactctgcccagaaccttcgtctggcttcccagagggcccaagtccttgtcttcagaggtcctggctggggagccttagagcatggtcttccctcactccaggcttctcgggtctccctattggggactgaccgtgggagcagtgagccactgtgcaccagggcagcccggctcctcggggggtggcccaagcagtcagggcggcaggcttgatgggccagggcctggggactctgccatggtggaccattgtgcccttgcctggcttgccaggaaagtggagtgcgtgtgctcacccttgcttctgaggggccttcctgaggcagaggctgtccctggacacccagtgctgttgaggcagctggggacactcagaccatggtggacaaagacttgaagtctcgtttcagccctgcacaaggtgtgaccttggctccagcactgctccctctgggcctgtctctttctcagcagaatctgggactggccacatcatctccaggggttctagcattggacgcctgaaagtggacaacatggcagtgtgagggggctctttgtggtggggtggtcagaatggccctccatgtggggggctctttgtctccccagggcagtccttaaccaccagccagcctccccaggcacccgtgccgggcagtggggtgtgtaaaggcctggcacacacagacaggagttccgatctcaactccatcctcatgagctctgtgaccttggtgagtcccttttctgtgtagcctttaactctcatctggaacgcaggatatgcatagtcctgacatcaggacgttaccatgagtagtaagtgaaactcccacttcaggtccttcgcctggtgtccagggcatgggaggagctaatacgtggcctctgctgcttgtgttgttattggtggtggtgtttgagatgtccttagagatgttggccaaagtttccagttccccaccctcccaagcccgtggggaaattgtgcttcctggtggtttttgggtgggggggccgggggagggtcatgtgaccagttatggcccgtgaggtgtgagcagaagtgacatgtcccttctaggccagagcctttcatggccatgaggatccacagaactcactttcctctggtagaccaaagtcaaggtggcaactgctcagtgagagggagcctccctgctaccccagtggatggtagtgtgaaggataaaccaacttttgttgttgtgagcccttgagatttgagagttttgttacagcaacatggctagcacatcctgactgattcttcatcatcatcatcatcatcactcaagcctgtcccccggccaggggtccatccaggagaacaacagccatggaggagacccgtcaaaaaatagaactttattaccaatctgtttctataattgtttgactcattttctcactcatttgtttgctttatcaccaatttctttacatcatttattccttcaaaaacatttcttggctgggtgcagtgggtcacgcctgtaatccgagcactctgggagcccaaggcaggcagatcacctgaggtcaggagtttgagaccagcctggccatcatatagtgaaaccccatctctactaaaaaatacaaaaattcggtgagctgagatcgtgccattgcactccagcctgggcaacaagaacgaaactccgtctcaaaaaacaaaaacaaaaacaaaaacaaaaacgagccaggtgtggtagcacacacttgcagtcccagctacttgcaaggctgaggcaggagaatcgcttatacccagcgggcagaggttgcagtgagctgagatcgcaccactctactctggcctgggcgacagtgcaagactccctctctcaaaaaacaaacaaaaaggctgggcacggtggctcacgcctgtaatcccagcactttgagaggccgaggtgggcagatcacgaggtcaagagatggagaccatcctggccaacatggtgaaaccccctctctactaaaaatacaaaaattagctgggcatggtggcgcgtgcctgtagtcccagctactcgggaggctgaggcaggagaatctcctgaatccgggaggcagaagttgcagtgagttgagatcgcaccactgcactccagcctggcaacagagcgagactctgtctcaaaaaaaaaaaaaaaaaaaaaaaaaggcaacaaaaaccaaacgccacttgaccacctgtttcataggccctgaggtagcgcacaggccagcagggagctatggatcattctgcagagccacggtgcttgcccagaggtcagcagccctatgggatgcttggggtggggcgtcagatttgcagagctggggcgagggaaggaatggcacttgggggagtgggtctgctggagaaaggcctacaggtaacaggaagcactaggcagttgggtccggccagcagggatgggaccgtgtagtggccaagctggagggggactttggtccctgggtcatggggtgtgcagtgctctgcactgaatgatgagagggcatgcataggtgaaacaagaggccagctgctgaagggaggaagaccaggtaggcagctgggccaaggatccaggtggacaagggctggcatgggtctgaagaggaagagcagggccagggaaagcccagggctggatggccagtggttgtgagctgcaccagcagccagagggagccggggactggatgggggtggccctgtgcagtgacggggaaagtttgagggatcagagtagagttggggcacccgagcggcatccaggggagatgtccaggatgtagggtggtgaatggacaggacattgaagtgagaatcacccctcctgcccatagacaaaccattggtttgagggtggggcctgccctgggagccgggaagcacacatttcttctctgtgtgggctcaggggaaaaaaagaattgaaactcccacaggggaaaagtttttaaagattccaccattggaatgctggtcttgtgtaacaggaatgttttaatccatgcatttgaaacacagttattgagatcctactgtgagctgggctctgccctaggtgcccatgggtgagcagacagacagcgatctctgccctggtgagctccttcctgtcttagtgggagacaggcagctaatgacgagcaatctggggcatgctccttagtcctaagctactcaggaggctgaggcaggcagatcgcttgagttcaggagttcgaggccagcctgggctacatagcagaaccccgcctctacaaaaaatacataaattagctgggcatggtggtgtgtacctgtattctcagctactcaggaggctgaggtgggaagatcgcttgagccccggagtttgaatccagcctgggtaacatagcaagaccttgtctctgaaaataactaaatacttttaaaaagaagatagatgtagtgagaaaaaaaagtaggtggggaaggggctcagggatgggggagatgcgtgcagttttaaattggagtgccaggaaaggcctccctgagaaggtgacaggtgagcaaagactcgagggaggtcagtgaaccttgcaatgtcaaagggaagggcattgcaggcagagggaatagcagtgcaaaggtcctgaggcaggaacgtgtttccatgttgcaagaacagcaggggagccactgtggctggaggggactgagagaggggagagggttcctggaagactgtttgtttatttgagacagggtctcactctgtcacccaggttggagtgcagtggcatgatctcagctcactgcaacctccacctcccaggctctagtggtcctcccacctcagcctcctgagtagctgggaccacagatgcgtgccaccatgccctactaattttttgtatttttggtagagacgggtttttgccatgttgcccaggctggtctcaaactcctaagctcaggcaatccacctgcctcagcttcccaaagtgctgggatcataggtgtgagccaccgtgcaggccagactctagctttcattctgagtgagctggagactgcaagaggcaggctccaagctgacttactatctcacaggctccctcaggagttgagggggccagacagagcttgaaggggagtagaaggctcctggaggctctggcagacctcagaagctgcagccacatcgaccaagctgaccccacccaccatctccaaggaatgggttaatgggcaccccaggcctctcaggtctctgcctctgccttgctcctcctccttcctcctgctgccaccctctgatggtgcttcagcctgtgccatttttctgggtcctctccaagtgtatattgaccctgaggtggcagcaggaggggaggcaggccccctccccaggaggagacccccttgatgaactctgagaagctggttgcttagcaagcccttttttctccaacaatacttgtgctaatcagcctagattgaatgagcaaggaattggcttttgcaccttcctgtcctctcttctcatatatatatatacacacacacacacacatatatatatatgtacatttttttcccttagagacagagtctcactatgttgcccaatctggattcaaagtcctaggctcaagcaatcctcctaccttagcttcctgagtagctggaactacaggtgtgtgctagagtgcctggctagggactccattctagaatcatggaatcttaggggtcccctgggttgcatcttgactcagtgagtgagtgggttactttttcacatccctccttgtacacctcctgtgactcctggcagctcactctctttctagcgactgagggcctctggacaaggtgagggggacagagcaatggtccagaagttagaagactgtggtcccagtcacaggctgggcaccataagtggacaccataactgacccatcctccttttgtgctcaaatgctgcagttcatccggaaacaaccaaaacattccagcttcacagctgccagggtttggagttgaaccctgtgtcccgtgctcctgccacccctgctccaggcacaaagggaacagttcgtcagtccaccacgggcctttcctatcctcagttgcagagtgggccaggacatgccgctttacagatgggaagactgaggcccagagagtggaagggaaggagaggagcccattccaggctcccggcctgggatttttcccatatgctccagcagccacccggggaccatcattatgacaatgatgactgatggagggcctagtgtgccgggcactgtgctgagagaccccaaggagggcgtagcatctgtgtccacaggaggaggctgtgaggctgagagtacctagggagagcagagctggagctggctgggctctggccatgcggctttgctgtttgctgtctgctgtttgccgtatcaaggggcgatactcaggcgggctcctctcagtctctcttctttggtctcacctctactcagaaaagccctttgctggcccccaaatactcctaccccgactctcttctccacccctccaggctcccaaggcccctgcctgcctcggcctccctgctgggttgaccacagtcagtcctggctggaagctgaccctctccacagctgccccaaaatacatgtcacagtggggcatttgcagttccagcctgggcagctgcccactaggtctctttccttcccttccctgggtctgcccccaggcccctggcctcattctggtcctgagctcccttctctgggccaaggagctgctgggcctcggggagggggaaccccagcactaggtccaaagtgatgtagcagggccactgtctgtgccggggcctggagctttcctctgaaccttaaggggcccccagatcagctccgtgcgggcctggggtgcagcttccagaatcttggaaacctgtttttcatggagccagatagaatgagcacccaggaggaggcagttccaagagctggtgcttcaggaggaaacctgcacagcagacaggcgtgcgcacattcctagatgctagccctgtggcggcgcacctcacgctcattcacagtacacggacatgctcacctgcccaccatgggtggtcaacccttggacacccacactcttctcacaccctcacacacacactctgcaccactcgcctagccccggccacgctcatgtcaggattctgaagacctcgagcacacacagacacgcacctggtcacgtgcactttcacacatacacttggcaccagggtggcagcagcggaggtgactgagaagcctgcttttcacagagaatcagaacccagcgggggctttagccacaaaaaaagagcatttcaaggagaagggctgcctgcatgccaagcacacgcccctcacctacccaggaccccttgtgggagctgagccccatggagaccccggggtacccatcccaccctccaacatccatccctacgtggatatacggccacagttgcagctgcggccatgaggaggggtttttgctcctttttagcagtgctccatcccccaccccagagtacagggggctgcccagagaccctcctggccctgggggcctgtgagtcagaggctgccagtggtggcctttcggctgttgctggggaaatggcagcacagtggccaccaagactaggactccctggggaggccctgctggccctggcactggtggcttggcctcacccagccccacctggcagatgtgccccttgtggctacccaaggactggccccctcctcatttcagaggtggagaaactgaggtaaaaaagtggagacagccagggcacccctcccacaaggccctgcctcatttgagacagagccctctgggaagcctgtgcattctgtaggtggggacctttggggccattttttccagaggcccagagagggccgtcttcttgcccaaggtcacacagcaagttcatggcataagctagccagcctcgtactccagagctctcctgagggcccccatgtgtctgtgcgggggtgttgatggggggcaggtgggagggaggaggtaaggctgatttgtttcccagcctcctccccctcccctgctcccttctctccctcacacggtttgtttggagaatgactcacaggaatgcagcaaaatcctgatggatgggaaggcagggccgcagtacccggaaaacctctccagggtagggaggcggggctgagccttggggcctgagaggctggtgataggggagccctgcatgcaggtggggcgactgaggccctggaagaactctggtcacgtcctggctgggggttgtccctcctcgacagaaacacacaggccctggctgccgcagcacccctggagcacccgtcccccatgatttccatctttgtgtccccgaggcatctggtgcactgtagctgacaaacacatgcattttggcactgagtgtgacccaagtcagaccctcctgtgtgtgccctgtcccccaggtcctcccagctccccggagttggggggcgggtgcttgccattcagtcctttcagaggcagccaagggcctacggcatgctggacactgccaggggctggggaggctgggatggagctggagggaagtgggaggtgtacacgggatggacacctcctgtgtatgttccaaatgtgctggaggcctcaacaggtcttggtacaaggtgaggcaaaccttagaggacctaggatgaagtttcacgtaaaggaacagtggctgtaagggctcccagaaagtgtagggaccctgggaaggtcccagtctttgaataaaggtgggtgggaccttattggtagcttggggcattagggcccagatatcaggcagcagcatgaggtgaggcccgggctctgtcccagggcaagccctcctcctgcgcaccacatctggggcctccgaggagggacaaagcattcaactcccgggacctgtgggtgggaatgtccccaggcccagccctttagtgcctgctgatggctgtcacgcggtgtccggccctgatgaccagatatgtgttttcaagagaagctggaatttggatttttatgtgaactctcctgattctcaaatgctggctccgttaacaaaaggcacagtgtggtttaaaccacacatgtccgcaggcagaggaccaccagtttctaatgtctgcgctgtggggcgcttgggtttttgcatttggttcttttacattccttattttattggaaacagcccaaatagtcactgagctgcaactctgtgctaggtgccggggctctatcagcgaataaaacaacatgtgacggagctgccattttagtgggagaagacagtgaataaacatatatcaggtgatatgtgttaggaagcaaatggaagcagggctccagaacagagagcggctgcaaggccaagcccacatttgggtggaaggggcagctagtgcaaaggccctgaggtggggctatgctaggtgtgttagaggcctgtgtggctgcagcgggagtgggtggggaagtgggaggaggtgaggtcagaaggtagcataggtcaaatggcataggagactgtgggctgtggtataagcttggttttaagtcttatgtgaggtgggagccatggaggattcctagggagggagggtcaggatcagacttggtttaacaggctctgtctgggtgttgtaatggctgagtggggcaaggatgggcctaggaggcccagaaggggctattgcacttgtctggctgagtgatgatgcggcctgaacaggaagggggtagtcaccagagggtgacctgaggaaactgtggtcaagcctctccatggtgtaaacagtaaacacgatactgattctaaggacttggtagtaacatggaaatggtgactgtgtataatgctatgtgaaaataggattagaaaattgtacattaaaaacacaccagcccagatgcaaaaggctgcagatcatatgattccattcatacgaaatgcccaggacaggcgaatccagagagacagacaggaggtgagcaattgccaggggctgggggtggggaaatggggggtgactgcctatgggaacaggtttctttttgggagggggatgaaaatgttctgaaattaggtagcagtgatagttgcacaacttcatgaatataccaaaaccctgagttgtcccctttaaaagggtgaattttatagtgagtgaattatacctcaaaaaaaaaattttttttaaggcatgtccagatttctaaccaaaattggatgcacatagaaaacattgcaaggagctgggcgtgatggtgcctgtggtccccactgcttgggaggccaaggcaggtgaatcacctaagcccaggagttcaagactagagcctgggtgatatagtgagatcctgtctctaaataataataataggccagctgcagtggctcatgcctgtaatcccagtactttgggaggccgaggtgcacggatcacctgaggtcaggggttcgagaccagcctggccaacatggtaaaaccccatctctactgaaaatacaaaaatttagctgggcgtggtgatacacgcctgtagtcccagctactcaagaggctgaggcaggagaatcgcttgaacccaggaggtggaggttgcagtgagccaagatcttgctactgtactgcagcctgggcaacgagagcaaaactccatctcaaaaaataaataaataataaaattttaaaaagattgtaaggaaatattcacagtaattgtcatagggtgaaggggattctggattttgtttgttttctgtgtacttttcaatttttaaaacttaaaagtaggcatttctctctaaaatcataaagactttgtgactagggccagagatgggggatccacttggaggggctcagcctctctctccagctcttgtggatccattcagctgcatggctttcacttgggaggttgggagcaggagcttgctctggtccgcgtctctgaccttctggaattccattcctgctcacatggccttggtcaagtcacaggaccagagatcccagcggccctcccctggagagtgtcccagccgcccacgatgcctccacccagaggctgccctgttctgcttgcatgccttcagccgcaggttgctcaccacctcccgagcagctccctccttccatttctgggcagccctgcctgctagcaagctcttccttatatggaggtgaaatctgtcttcctgttgcttcctcagctccctctctgaaccccagtttctgggtctgcagaagggggctcccaggcctctccctgcctaccttggccactgggaggttctgaagagactggaggaccagcagcccagagcctgtgtcggtggtcattcagctctcgggacaaagcgtgggtgggcctgtgccctggtggcataaccaagtaggatttccacattcagtgtctaggccatcgctgtgaaattggaatttgatactaatcctggagattgaaaactcaaacctctccataggccaggagggaatgataatcatcagtgctaacatttacggagggcttgtggcgtggccaactctgagtgacgtttatgcactcatttctatttatcaccagcaaatcccgggccctgctgttcttccccattttaaaggtgaaaaacctgaggctcagaaacgtaacgggaagcagctgggtgcgagcctcctggcacacattgtgggagtgctgtgggtcgaataaggaagctgagcagcaggcagcctctcccctgcagaagggcacagaagcaggactggaaggaaatcctggttgtgggctgagctcgggccatccacttgtcgtggtgggtgaagggtctggtccgcaggtctgctctccaagctgcctcgttgcaggtgctgactttgggaggattctccttgtctcggcctaggagctttcttgctcagcttggggagagaggtagtaatgtcgccttccacctcatggacttcccagtttagaatgctgcttcccatcccacccacatcaccctctgttaggtaagcaggagcagaaatgcagtccttcatctcagctctggaaacgggttcagagagggtgtagaactgcccaggggcacacagccaggacaggcccaagccaggaattgcactgggggtgagcaggggatggctttcctggcttaaggtatgtgggaggccaagagccatcatttttcccaatcctctcctggagagccaggggacatctgaagccaggggctctgcctgtttcctctgcactgtccctgtgctgggctgctctgagctgggcactggtgtggaaggtaaataagcagccccatgacaagctgtgagaccgggcagtggtttgggctccacccaggcccatgcctctctcttctgcttgcagagcctcagtgtctgcatctctcaaatgggctaaggacactcacctcagaggatggctgagaggattccatgtggggtgcttggcagagttagctccagctctgcatgccaccccctcccatggtgcagccacctgggttccaccagggcattctgggatgacaccagaccgggaggagaagtgcgaggagtggtgtggtcattggcgtctttcctctgcctctgcctcccccggccccttccattcacatggtagaaattcagatagcacagcagcaagtgtccctcccgctcctgaccttccagcagtttcttctccatccttccaggagtgatctccacagattcagatgccccccggaaagggctttccattcaaagtttcccctggactcattctggccccagagaggctgtgcccgatccgatcctcgcccctttgcgggtgtgaacttggaggctgtgagagggccaagttgcccctgggaatcgtacatattctgttccacatcctcctcctgttgtccgttccgtgccctcctatgtcaggagtggaggagtgctggaaggctgtgcaacacactgttacccattttgcagatgacaaactatggcggggggaatgggtttcccttagcagagagggaattgtccaagtcatgccaaagacttaagggcatgtcatagccagcttgagtccaggcaggagctgtagccaccagtcgggacaaagtcaggggacttgagaggtcttcacccagctgcggccaggagaaggcctggaaggagcatccctgctgccatcaagtccagggagggcagaagcccatggagctctgagctgagttgggaagtggctggaggggtcacttgtggggtggttaagccacccagagatacccatgagccctggggccagggaacaaaagatgtgtgaaggcaggtgactgacacttgggtgtgtgtggacttctacatagagaaatctccgtgttcttgcatgtgcatgtgtcatttatatgtatacatgtgtatatgtgtatacatctctgcatgtagctgtgtgtgtatgtctatatgattgcatgagtgtgtgtacacacagatgtatatgcccatgtttctggatgtgtgtgcccagcctgagggggggacagggttctgtacgtgtgtgtgtacacgtgtctgtgtgcatgtgtatgtggttttgtgtcttttcatgtgtgtggtgcctgtgtgtctgagtgcacattgtatggagggtctgggggctgcgtatgaggtaactgtgtgattctgtctgactctgggtgtgttttgtgttgggtgtgtctacgtgtgtgtctggcccacatgtgtctggcccacatatgctggcccagggcaggatggaggggcctcctgtgtggtgctgctggactctgttgtggtcaccacggccccgtgggcttagcgtggggcactggtggggctgatgttgccacttaacctcagggtgggatggcatggagcaggcccatcccgatgtccctgggtggcctggtggaatgtgcccacgggatgcccaccactgggggaccccaccagcgttggggctgaggcttaggctgtagcaggctaagaggtccgtctatagcagtggctagatgtctgtggctggggcctgtgcctgaggtcagaagtccatttgtggaagaggctgggagtcagtctgttgctgggattggggagggatcacagggaccagggtcaagagtcagaatgtggctgctgccatggctaagggtcagtctgtggctgcagttgcagatcagtctgtatggcacagaagacaggttaggcctcagccacaccactgtccccagccccttggtggcttcctggcccaggggtaagtttgagccctgggaacaaggggcagagagaagaaagcgcctgtgagtcctgctaccaagcaggcctgggcccagctgttcccatggccatggcagagaaccccagccagcccaacgtgtccagagtgtgtggcttcattgtagccaggaaccaagggtgcccaggaccgtgccagggtgagcagggcagtgcttcccaagtgagactgagagaagacccctgcctgcctctcagtgcatttcctcaggcaccctctggtgcctaaccctgtggctctataaccctccttctctcttctcctacccttctttcccctctcctttatctgctgtcatcctccccactccccaatctgtcttcctttgcagctgccctgtcctctctttcccccagccagcctcctgccccccacctgggccctctgaaccccagggccttgcctcttttaagttcagcagatttgacttcactcagacgctggcgctgaggaaggaagatgaatacccatagtctggatgccccaggagaaggaggctgcatggaggcccagtcacacgcctgcaggcgggggccgtcttcctggagcccatgtccagtgaagggtccacagcaggggtcaaggggggcttagactcggattctgccctgtttgagcctgaagctgcactgacctcatgggatggcctcctgcagtcaagtagggaaggatggacagacacacagatgacagggaaaactacagacagaaaagatcaaaggtcgttcagatcaaaagcaggcagaagacgcctcggtcttggcccagcaccagcattcctgtgcagaccccagcccagggcagagactgagatgtactccctctcccctctccccctgcttcccctggtcgggaggtggccaccaaggcaagccttctgccgtcactccagccagaacctgcatgggtcggggtgggtgggccagattagcctccatcctggaatcaggggagttgggacactgaggggacattcaaatgtttggaacatttgaaaatgttccaaaaatgtaagagaacttggatctctgtactcccgatgctctccacccccatcagctaaaatatcaagctctttgctttcaaagaaaagcattttctcgagtgttttgctctcagtttcacatggtagccccagcttgctcaggaagtgcttggcgttagagggttttgatggggagaaaagggaacagggctgtagttgttgaaggaccatgccagccccatgtgggcagggatgcctgttctgttccctgctgtcccacagtgccctgaacaacgcctggaacatggtgggttccataaacgtataccaaaggagatatgtgtgggcagttggtctgggagacaaaaccggatccatgggggcaggagggctggcagctgcagacctggatcaacatgctcataaaaaggggatattaaggctgggaaactgggaaggtgactggggtagatgaccccctgctgactcagacagggcacagctcctggtacagtcattaaaaatggggcctcttcagcagttttctaagctaccacattggcatgaagggcattaatgtgttggagcaggtacagtggaggctgaggaggggcagggttccttcctgaggcatttgctctcccaccagccccactagcatgaatggcagatcccagcagccgtatccatccttcttgcaagttgctcaggcaagatacatcagtgaatcctgctaaccctgccttcataataaatccaaaatccgaccccttctcatcggccccaccctggccaggcctcatcattgcccacctggactagtgtaggatgcaggcttctgtgctcctgccctggccccacatctgccctcttcacagggagaaactctgaccacccaagggaaagcgtgtcccatccctgctcaaaacactgcagaaatgcctcatctcgttcagtctaagagccaaagtccctacaatggtgtgtgtgcaagcccctgtaggtgtggccccccgtcctctctgcccacatctctttctgctcactcccctcaagccacactaacctcttggccattcctcaaaaatcccagcctggctgctgcctcagggtctttgcacttgttcttccttctgcctgcacagctttgcccccagacagctgcatgcctcactacctttgtctgtcaagtgtgttctcaaatgctcttaagtatgagctctgaccactcagtgtagaaaaacagcccctgcagatgctcccagcccgcttccttggctttatttatttttccatagcacgcttcacctaaggtaacatactacatcatttacttattcattctgtttcttgtctgtcaagactagaatgaaagctttgtctcattccttgctctgaatcctcaacacatagaatggagcctggcatctagtaggtgctcagtaaatatgtaccaagccaatggatgcatacttttgccaccttcaagttacgtgactgggagcaagtgcatttcctggacctcagtgatccagtctctcaaatgaggctgactgatggggcggggggagatacatagagatttgaagttgctgccccactactcaataaacatgtggaatagatgttaaaacctggcccacatctgacctcaggcctgcaggcttccagcgtgaggcttaccagaccagggctgagcttgaatgcgacttctgggtcttagtgtaccagcctggcctgatgggcctccccgtcccttgtttccacctgggtgtccctggtggcctgtcagtgagccttgtccttggctggctccactgcctgcattccctaggaccctgcttagagtccccagccctctacccaccctgcctctctggtcaacagctcctgtttactatttagctctggaatggcatctggacacacacttgcatgaaagcagctattgagatagtgcttggcaaacaaaagggctgacatgtccagacctaggttctccagaacacagcctcacctcaccaggaaggactgggccctttaaaacctgtgagcacccctaccatcccagcgaggagggaggatcctaattcccctggggcagactcttggtgaaaggtgaaatcagaacctagggagcaggaagcctgccagccaggcagcctcctctgctggtgttccagcaacatttgtgggtgctgggtgctggttgctggcaccatgatcccatggaatcctgccagtagggtctgatggagtaagcaaggctttggggtccatgcacacttaggtttgaattgtgaggttgccactccattctgctgcactgccacacgccatgcactgtgcttggtggaggtgagcaaagaatcttgaaattgagagtcggatgggatccgattgtgttgctgtggtcttggcaagttctttgcaggctctcagcctgggtttctcctctaggggatggtcagatcctgaccttggggtactgtcttgtgactctccatgataccacttgtggaagggccctggccaggtcagggtttccatcaccctctggcagatgtgaatggcagccctgctgaatcaagatccctccgtaccactgccccaggagctccagggagtccccagggagccagggaacaagagaggcccctggaacaaatgacaggctctgcccttttttgagataagccacccaccaccatcccatccctctacacccatccccagaatctggaatctgtgaagggtactcactgagcgacctggaatctgtgaagggtactcactgagcgacctggaatctgtgaagggtactcactgagcgacctcaggtgagtcttccgacatgtcctggccctgatgttctccatgctccaccccacccccattttatccaggggaactgttggctcaaagaagagaaaacttgggcttggtcaggcttatgggaggagggcttggtttaacttcattgttccatgcattcactcactcattcattgaacaagtgcttatggaatgtataccaggaaccattccaaatacggaagatacaccaaggaacaaacagacaaaaatacctaccagatacctaaatatgtaaattacatggtatattagaaggtagggaacagcattccaggcagatggatcaacaagtgcaaaggtcctaaggtgagagtgtgcctgctgaattcaggaactgcaaggggcaatgtgagtggggcaacaggctgggactgagggcaggagttggtggggacctgattgtgtgggctgtcatcaaccacctgggggactttctcctcctcatcactcagaaactgaggaggggagggaagacattccagccaggttggtgatccccagcgggcatttgggcttttccgttgccaccttaatggtatacacaatgcgcatctcctggttcactcagcagcctcaggactgagtgaccctggtccccaagacagatattgaagacagagactaagcagtctgacattttaaatatggggagccccgagtggggcggggctgcccaggaccttagggattcacttctggtagggagggctgctaccaggcttcagggaatgccagaaaaaaggtgcccgaggcccacctggcatgtaatgatgggcaggattggctgtaggatgtatagagactttagtatgggcagggttgggggttagtaggtggagaagggagattgggacatcattgagcagcaaaacccaagtgtgacaggtggtcggtgtgctcctgccagagcagaggggcctgagtaggaggaagtggaggtggaggccgaggagaatgagacagacagactcactggccagcgggagaaagtggtgggacgagccagggctgacacatctgtgtgatccctggtgcagtaactccggtagatggatggacacgtggatggatagaaaggtgggtggatgcagcgacggatggatggatgaatgaatgaatgaatgcatgcgtgggcggtgagcggccgggagaggggcgggccagctgagcgctcaatcacagccccggggctcggcgcccgccagctgcactcagaacccccctcaccgtggccctgccctgtggcgcctaattacgtgcccccagggctctggagcggctgctgggactgcagcgaagaggggcccgcgccacctccgccaggctccacgcgccggccttgagtgcgctcccctcggccgccgggaaacctagaggcgcggtttggccccaaggtccccggtcccgctcttctttgtctcggcctagttctcggctgtctccgggccgcgacccacctctcctggcggtccttgccgcatgcttctgtgctgcgccagaatcatcgagtctcagttctcgctgccttcccggccagtaggcgtctcccccagctggggagggtcccccaaaccctgtgcttctaggaccgcggggccggcaagcggcaggatctccaagctgcgtctctgatgcggctaggggaggcgcgcgatgaaggcccccctcttctccgccttctctctacgccccaccgctactacacgtcgcgctgcgccgcgaccccggcgctgcctgttggcgccttaagcggctcttctgccgcggtgcgatccccgacgccaggaggactaacccccacccgccaggcctcagaccccacgcagatccagccacacacgcaaccgcctgcagatacccaccacagccctttaagttaacccaaagccccgtacaggcgcactgcccctacatgcgcagccccacggccccacacacccaccagcccactcgcaaacaggcccacatggccacacaactgccctctggacactcagccccacgcaggcacaatcccatatacacacaaccgcacacaggcgcaatcccacccacgcagtacctcacggagtcacacaacccccctataaacaatcgcacagacacagccccacgcagcgccacatcattcagtcaaactgagacccagaaacacattcactagcttgtatccagacccccccccccaagccccgtgacattcactcgtaggacagaccagaaatatacagccacattgatacacacacggacctaaacgcacagccaagacctcacccgcaggctcgtaagtcactggaaaaatattaaagcgttccctccctcccctcctctatctttgacatacacacgcctgcgcgcgcgcgcactcttacactcacaccccccgtccctaagcgcgtcggagcctcgcagcgggtgaccccgaggccccgcggtgagagccaagggagcgtctccccggcgccccctcctcccgctcccttcccgagctcatctctcgcccccccgcccgcctcctccttccctgccccctcctcctcctcccttcccccgagtctggggcgcgggctgcgcgcagccaagccccctcatcgcgcgcccctccccgcgcgcgccccgcgccagcatcgcgcttaccgagtggatgcggccacggggccgtctctaattacctcctgacccccggcggcctgtgaataatggctactgagggcgctcgcaggggctgctaagaaggaaacgcggggcgcgagaggcgcggcgcgcgcgggagcgcgagggaaaggagcgagcctggggccgttgcaagcggctggcgagagaaaggattcgtgcgagcgctcacatttgtttctcccaaggatctcatctggccaccgcgttctggaagaggcgagagggagagcgtgcgcgagaggagagagacggcgggggaaagggagacggcgagacgcgcagcgccggcgcccgggagacccaggaggagcccgcaggtattgttggcggcggagctttgtgttttcggcgggctgctgtgggcgccagggctccccgagcccccggcccgccgccgcgcgcagacctgcccggagtccggggctgcaggctggggtcgccgcccgccgcggacacccctcccgcggcgccaggatcttggctggagttgcggatttgcatgtttgggggttttccacgctggttgagggaatcggtctcagaagaaggaatttctttctttcctttttttttttttttttttggccgcttttggccacagtttggttgtgctggggattcccccctcccctttcctccacaaagcattggtgagcggtcttgacgaatgtggtattggcggaaggcatggggctgagatggcggggctggtggccacggatggggaggcgagagatgccagagaaggaaggagttctgttcaagttcgcaatctgcgccccgaagctggtcggaccggggagggcgatccgcgcgtccgatcctgctccgggcaaccgatgggaaacttcccgagagcgcggcctccctggggactcggcgcccctgacgcctccaggcgcttcctcgggccgctgcggcccctcctcgccgcccgccagcgcttaaggtcgcgctctccccacccccgccttcctcccttcctcggcggcttccggatctggacagagctgcaggagtggcttcaaacacttcccctggagacccctccccactccccgcacgagagcctgcccagtggcccccctgccctgcgccccagtctcacgcgcggtcgagtggccaggctgacaatgaaatctcgcacctctgccggggggagtggggtggggaggaggtccctcctggggctgctgaccctgggcctcgggcagggggagggggctcctgggggaggggcttgttttggttagagacgtcgacctgggatggcgccggggcagggagggggctggggggtgggcgcggcgaaggcggcaggcttgggttcgcggccgggggtcgtggatggcagcccctcttgggcttggtgattggctggtgacttcaggcacgtcgagggcccctccaacctcagcctcctcccctctggtacaatgcgggctgaaagaggtgatcccgagggtgctgtgcttgtgtgacgaagtgtttgtctcctgcgatcctcagcagacgctgctccggtgacccggagatccggacgcctcgacccctccctcagggccgggaggagaggaggatgaagggggaggagagtggtgggaacttctcctttcccattgaggccatgggaagggaatgctagcccagaaaatttctggggaccgcagttctgaggcggggactcaatccaaggggggaccaccgggtcagaggcttcccggcacgcagaagcccccagattattttgctccatcgggggatgcagaggaaggggagaggtggaagagcgaagggctagctggactggcgttgcgggggtggagagcccgtggaaatcagccttaattggattcccaggcaagcagccaggctatcaaggtgccccctcccctttttcttcctggggtagagagccaggtccagagacaccaagctggcaacccaggcaggtgaaggcaattcctctccctacttaaaaagagaattcctgggggagaggggaggcaccttttgagagggaggggggcggctagactgtgttcaggctgttctgtctcttggtccaggaatagaaagagttaaccctcccccagaaatttgtcagcccccacacagcagggaaacattgttggaccctctgacatgctaacagtgtgacaccggctgactggagctagcagattctagaccctggactcccccttcaaagcccaacaggactcggctgggtggtgccttgttcagggaccttgtgggaggcggaaatgagagcccagagagggtcaggcagcaaagcagtggccttgtggcccggagggaagaggggttacaagccagggccatcggaaactggaagggaagtcgccatgggtctggggtagagggaagggagaggcccttctaccctttgcccagactcctgagcaaggctttgccctgctccccacccttcccacacacccactcagctgcaggcctggccattaaatgtgggtgtctgacccataggttggaccatgagaccctagtggctgagggaggcctgggtgaggctctgggaggcaggactgaaaccagcaagggattcactgctgctcatgccctatggcacaacccccttatttatggggctgccttcccttccccagacctcgagtttccgttttcaagaacctttttcttcctatcttccttagggcccccagggcctagcacacagcagtcactcacagtgtcctgtatttgtccagctaaatggagtgaatgaatcagtggtgaatgaatgaaaagggaaagtttctcaattggaagcatctagcccttgtggttttttttaaacctttttgaaatatatattgtaaaatagcattcacagaaaagctgaaaaaaaaagagaaaaataaggttattgacagtcttagagggctctgacaatgttagtattttgatgtagttcttcccagtccttttcgactcggtggttggtttgttttttaaagactttgtcgtcattctctatattcagatgtatatcctgcttgctttgccggcataatgtgagccttttcctgttttgtaaccaatgcttcataaacaccatggttaatgtcttcaggcttttccaatcaagtggatgtaccataatttacttaatattccccttttgtccaacattctggatgttcctgatgaatgatgtagtggatatattttgtatagcttttcttgatacttaaaatgatttgctcaaaatgccactgctgatgccgaaggctccgactgcctgcagtgggagaaacggcttctctagttttccttggataaatgggacactatttttccttccccacaatctagaaccttccatcagagccgaaaagagccttggcaatgaatcacctatctgacctccctcctttgacagaagaggaagccagagcccagagaggggaagcgagtcccaaggtcacacagcagttgctgggctatgcagcagcgaagacccagctactgatttgccatgttggttttcgcatctgaaaagattcctgaggtctttaaggctgaccctgcccatttcacagatggggggactgagaccccaagcttacccctggtgccgccagctggagccccagacaggcttctcggccctcctgggccacccccgactgggtgtgttcacgggatctggcggctacaggctccctgttgcccgccccacctgcccaccacagttccccttcctctttgccatcccattctccagacaaaaagctgaggatccaaagcagatgcagtgagggggtgggactgtaggtctctggggaccctagtggttgcgtccttgccccatgcctcagtttacttgtcagagacctaaccttggatctgttcaggagcagaggcagatgttggcacagatatgaggtatgaaggagtggtgtgggggatggggtgcaccttaaaatctctctctggcccgagattcaccccaggagaccccccggggagaagggaaggagagagagagggaagaaagagttgaagcagagacagtattccccatcagaggacagggactttctgccccctcccctgcagcacaccaaccatccgtgtgcctctgatcctgcttgtgtattgcttaaggggtttgtgtgccttccagcttgggcatgtgttgtgcatgcgtgcctctgtgtgtgtgtgtgtccgtccctgtgtgtgtcccctctgtggtgtcagtctctgatcccatttgtgcatttctggggggaagggagggtgcccccgagctcggtcttgtgtgtgcgcgtgcatgcatgtgtgcatgtctgtgtgtgagcacactgtttcctcctaatggccccaggagggatccaggcatcaggcttttgtgctgcttcaaggttgtggctgggtgggcgaagagagggaaggccttcgacagggaggggtggggttgagggaggcaaaagaaaatcttaaaagaccgtcttccctctggtctccaaggagatcaggctgtgaaatgatccgcacgttaattaaaaacgattatatcctgattgagccattcctgctcacatcccccagccagggagaggaagaggctgagagcagaggatgcaaaatggggtagggtccaatggcagggcatagccaggtggagccacagcccacggaggggagcacaggctgggggagtcaagtgggaaggtgttgaggggcacgtgcccaagtctgattggagcttctcctttgaattttagggactgtcttccagtggtggtctctgagatcccaggagtgggtggcagccacccagccccatggatctccactcatatgccaggcactgagcttgttgtttgcacagatcctgcaagtcagcgcttgtggttccagttttacagagaagtgacatgcttgaggtcatgcagccaggagttgggagccccagattggacccagtcctctgaccccgaggcccagatgcccttcatagctcctagctgcccccagattcccaccatgagcccctacctctgcaggacccctgggaggctggggcctaccatgacaagaacttctccatggcgcccctgaggtggttccttgctgaggtccgagcagcacagggctgggcggctgtgatgtccattcacgtggggagctgggtgactcactagcctggagcagccttgggctgactcaggtcacctttgccaacctgggcaaggcctgcctcgccccaccttgctcctccccaacactggctcatggttccacagcagaccagccacaggtgccccgtgaggctcaagacactgtatccacactgctgggtacctgtgccatgtcttttctggaaggagtctgggcctggtcacgctgggccttgcctggttatctgtctgctgtaagccttgtaaggactacggtggtagaaaagagtagtggtaacaataaaccagacgaccctccacctccaccccagcatcaggtgttgcggggttcacaagcgtggcagatctcagcatttgtgggacctgcctgctgccatacctctgcccactcccatccacccatgtgccacctctgtgttccctgagcccagcttctccgagaggaggagacccactgtggcttggccacacccagaagcaagtgagatcgctggccacgagtgggggctttttctgcttctctgagcctcagtttcccctttgtataatggggatgatagctttttccggagaggactgacaagagagtaaggaaaaccaggtcaagtttgttcaagtgcctggcagccctggaacgcacacagaggcccatttgtgcatttgtgcaactgtccatccgttcagggcacttgtgtgttgccacaggccttgggtttgctggcttctggggagggacacacactgtcacatttcagtgctttctaggagacagtctggggctcaggtgactgtcatctcagcatgagcctctagggggcaaagatgctcactggacccacctgaggctatgttagcaaaggtagagtgggagaagggagagatgtttctgctggggtaggtcctagtgagatttgctgaacctggtcccacatcttagcaggagccagaaacagtatcacgaggcatcagaggggcgggcagaacaggaagtcagcatccacctgttccccaaggcagaactgggagagaggcaggcagatgttcactcattccacaaaaagccctttgcactgaagcaggcagagagaccctgcctgcgctgggtcatccctgcaagatgccacctttcaggagaacagtttttgtgatgttggtatctgccttcctcctaaatatccccttcctgcccttcccagggcctgaaatgcttccgttagtcactgccgaggtcagagcatggaaggccctgattaaaatgcaaactgttacttggaggagtgatcagaagatgaactcatgtttgcataatgcagaggccacccacccctaggccccgcagggccgggcaggcagtgctgatggggttgtggtggctgcctggccctcatggggcgcggtagctcagctctgccagggcagcccatggggatgcagcccatggcgcctgttgcccactgtctcaggaacaggattagatgttgacatgacacttcctggtctgtatatgttgtcacctaattcagcagcacccctacgaccagatttagacctggggccactagtgcagcctcctggcttcaatgctgctgcccagtgatcactgtgaccatcctgcaatacaagtggggcagggacggcaaagctggggctcccagaggggagctcccctgcccaagtctaggccagtgaggccctgccagggctgaggtgtcatatgaggtgctgtcaccagactgggggaccgaggcacaagatgagactttgttggcccaggagggtaggctggaggaggcctttccaagtgtggcacggggcggagaggcagagaagctttgccggtgtcactcttctgtgggtgtcccagccacaggggccttacttcgggcccactcgcagcctgggaccttgggctagagtccctgagtggccgagagagagccctttctaggaagcagggcaggcgatgcccaaggaggcaggctctgcaggagctgggaactgccagagcatcaggcatggtgccagcctggtatgcttctcatacccacccagcccttggtagccctcctagaggtgaggacgtgggagcagaggggccacacacatagggtgtcgggaccagcctgaaccgggtcagcctgaccctgcacttggggtgcctggcggccaggcctgtcctgcacatctgattcatgcctcgtttacaggctgtgtttcattcccttcagtccttccacagtgtctgctgatggcgccaaggttctggcccagatgccctggcgaaggcacccaaagggacaggggctgggtctccaaggggaagcattttgctgcagaaggaagggtgttggctgcaggacacagcatgccagaggcctgggggtgtgggtggcgagcaggtgggattggggaggtggaggcagggactgaggccaaaaaggagtctgggccttgactgcttgaagggttttatcttgaaggcagtgggaaaagatgggtgctctgggcagtgagcaccgctggagcaaagtctcggcagtgggaacacacagggacaatgaggagaggcttaagaggatcagaagaggacccaggtggggcctcagtttcctccctgagaactcctgagtcctctggggtgtgggctggatgagagcagcctccctcctcctggagctgctgtgcaggcctagaatgctggtctagagggaagcagggacctgaccatctccccaacctcttgcctaagcccagagcagctcggcctagccctgcatcccctgtgagctgagcactgggagggactgttcagtctcggctgagaagtaggtgatggtcctgggggactgataattaaagctcagcagattataattccctgaaagaaagctcagcacagagagggaggaacagtgcccagagccttggcacaggctggaggaggattgctgggggaggtggtggtggggggaataagaatgatacctggaaccatcgtgttcagagcttcctctcggtgaggcctcctaggtgcccagccctgggcactttgctgtttccagtcttcagaccctccttgccaatgaaaggttcctgccatccccattttacagatgaagaaactgaggcttggaaaggtctggcaactgtggttcaaggcccatggctggtaagaagtgagcctgcggctaaaccctgggctgtgttgggagcgttggcctccttactgagaagaaggcactgcttaactcagagagaggctgtctgatggcagagtcctgggcaggccacaggcctgaagcaggaacaggttggagcagggaagacccctcaggacattccccatgtttgtggccttctgtctgggagagggggatgggatcaggggtcacactgtggtgactggatctgccattcacttagtcacctgttgtgtgatgccaggcaggtgacgtccttccttgggcatctcctctataaagggcttgtgttctcctggggtttgcaggcttctttaagaatctcttcctccctcattaatcctacaggtcccaactgagcctgttctcatgccaggagctcctggcacactcctttcatcacctgccggagctgggctctattatcatccctatttgacagaagagcacaccaaggcccagaggctactgctgcctggcggtcagccttctcctcaccagttaaacctgcttcgtgcagtcctgctgcccagcttgttgctcctgcctgtctccttggccctgcctggaagaccctcactttcccatgccctgtgcagagcctaccacctcctctgccatctcttccacagagaggccagggcttgagcacataggccagaggttgtcctctggcaatgcccccaggtgggcgctgtttggccagcccaggcttttaaaaataacattggatttcacataaaaattctacattttgcttccctgaaaaaaaaaatcaggtcggcattgcagggccacacacccacagggcactatcggcagagctaccatgggactgccaccttctgagtcacctggttccctgcagttcccactcatgtgccagctgggccctggcactctggagcttgccaccctgcttagacctgggttcctgccctggcatcctggctttccctgatccgaggcagattctatctttgaagctcatctagtaaatgtcaaaactgagaaactgattccaaactgggtcttagtgttttctgagaattctccaggccagaaagaaaaagaaagggtgcaccagatgcggggcactgcgtggggaaagataaggaggtgtgaaaggatgcagaatgcttggggaataataccatgttctccttgcctgttaagtacttggttggcaatgcctgaatactaacaccaatcagattctgcttgttctataagatgattcattcattccaggcattcagatgaccctcacagcatccctgatagagcaccattgtgggtgcttttattctcattttcagcagatgagaacactggatctcagggaagtgacatggcacgccccaggtcccagtaagggcaggaccctgacaagaattccgactcctgactcccagtccagtgctcgttctctctaagacactggaaaaattggctcttaggtgggcttctttctctggcacattttttaaatgctcctttagttaatatgcaggagggatttccatgttctcgtacataaccttttgctgaagtgacaacgtgcgataaaagggtcccaggagagccagtgtaatttgggctgtgagggacagagaataccaatgcagaagcctctgcagaaggcctggctgctcctgggggctgggagacccggggccccctcaccacccaatgcaaaggtctggccatcttgggccctgggaccacgtgtacgttctgattcgtcttccactgcttggtttatttttctcacgtttttgggtgaggatcttggttcctagaggagggaggtctaggcagagagaaaatgagcatccaggacagggggagagattgaggaggatgcctgaggcagacgttgaagccttgtttctagtcaagcactggctagttggggggtatcagacaaaggggtccacatagaaggcaaactgaagggcatgttcaagtgctgttcacgcctgcctttagcccccaacgaccaaaagggggcttggcatagcgagaccctctctctacaattttttttttttaatttagccaggcatggtggtgggtgcctgtggtcccagctactccagaagctgaggtgggaggaacacctgagcccgggaggtcaaggctgccatgagccaagattgtaccactgcactccagcctgggtgaaagagcgagaccttgtctcaaaaaaataaaaagttggggggatgttaaggaggttccagttaattgtggctgattctaaattgggaggcctaacaaatggtacttatcctcccgtgggagcagaccagggctaaccaaggccgctgggaatgggggtcatggagacagagccccttttccctcccacccacctgaaggctccaagaacttccactgcagaggtgtcagggacggacctggtgcagaccagtgggcccacacctgctttcctatgtgcgggtcagagcgtgtaggtgtattacatgcctgcctgtgtgtctgcgtgtgagctccttggacacacacaggggcacatatctgtgcttgcatgtttgtacatctaagtgtgtgcgtatctgtgtgttctgacaccagctcgcgacaccagctcgccctccacaaagctatttccaggccccattccccaagaacagccatctctctctcctttcccacctgacatggggcagggaggagagaatctgtttgaaatctcaacaggacatgggctttgcacctccagagagcaggacttgcttgtgtggacagaggtgacatagaaaggtttcagtttcatccaaatagaaacttactttttttttttttcgagacggagtcttgctctgttgcctaagctggagtgcaatggcatgatctcagctcactgcaacctctgcctcccgggttcaagcaattgtcctgcctcagcctcccaagtagctgggattacaggctcccaccaccacgcccagctaatattttgtatttttggtagagatggggtttcaccatgttggtcaggctggtcttgaactcctgtcctcaggtgatccacccgcctcggcctcccaaagtcctaggattacagatgtgagccacaatgcccagcctttttttttttttttttgagacggggtttcactcttgttacccaggctggagtgcagtggcgcgatcttggctcactgcaatctccgcctcccgggttcaagtgattctcctgcctcagccacccaagtagctgggactacaggcgtgcgccaccacgcccggctgattttttttgtatttttagtagagtcggggtttcaccatgttggtcaggctggtctcaaactcctgacctcaagtgatccacctgcctcagcctcccaaagtgctgggaatacaggcgtgagccaccgtgcccagcccaaagatgcacttcctctcattcagaagtgatttagaagtggcctgggctgctccaggaggtagtgagtgccccatcttaggtgggtaggtgtgcaagcagatgcccaacctgtgccttcctctcttttgtggtcccttctaagcgcaaagtgcctagggctgtgtatctcctggcggcagttctgaggtggccctattttgccaacccagcctggttggagggactgacagggcttctgcccctaggtgtcccctgaacttggcccacaaaaggcctgaggaatataggggactgtgattgtgtgtgtggtgtgtgatgtgtgacagtggacttgtttgtgtatctgtgttatgtgtgtgcatctgtgtatggtgtgtgtacttgtgcgggtggggcttcaagggttgagtgtggatatccatgttgtgagtgtgcattgcgcatggccctggaggatggggggacatttctgggctgtgtgggtattgactgtgaactgtgagtatgtgcacttgggccagtggaggtgtttgtggctagaacgtgtctggagggaactgtgctgagacccccaccgcctctgtcctggttcattccttcccaccccaggctcctctcatggcccctgcccccaggtcagacctgggaggctctcagtcatcccaaactctgaccattcatgctctccctcccagagaccttggcacctgccagcactgctcttgactttgtccttgctctgggataagagcaggcccagcagatggccgagaggtcccaaggaacagaggaacaggcggggaggaggcccagtcactgcttagcttctctgtaggagatgtagaaggaagtgggtctttgtgtttctgcagcatctggaccagatggagagacctttctggagatggcatgcacacttccagataggagctggaacatttccagaaatggaatgtttttagaaatgagacatggtgtttctggagacaggatgaggacgtttctagagaagagatgaaaagcatttctggaggaggggcatttctgaagatgaaatgagaacatttctggagatgggagagggcatttttgaggagtaaagatgaggcttttctggattctgagcattgctagagatggaacatttctggaaatggattctttctagagagaaactagaatacttctggaagtggtgtgtttttgaagatgatgctggagtatttctggaaataaaatagggcacttctgaagatgaggtatttttggagctgaaatgcaacatctctggagatgggatatggcatttctggaagtggaacattcttggagttagggtggagcctcagtagaccactggcatttctggagatggattacatttgaagatgacggggaatatttctggagataagatggagcatttctggaaatggaacattttggagctggggaatttctgggttaaaatgaagcatttctggggaagaaacaggtcattctcagagaagggacattttttggattgaggatgggacatttctagggaaggagttttctgaagatgagggggtcatagctcagcctggctgtttcaaggccacttgaggaggcaataggggagggtctcaggggcccagagaccccacctgtggtccttgttttgcacatggcccgagggagggtcttgcccagactcactcctgctgagctgcagagtgggcttctgaggaacctttccagaatgcagcctttgccaccccctggcccaaaaccctggcctgtgctggaatactaccagagggaggccagagctgcccagtcttactcttggggtccctacctgcttctggtggggtcctggcagcctctaggctcaccacagggataggcagtgactgaatggttaaatttaatttaattcaattttgtcaagccagctgaggcttgctccccagccccctctgccagaagcctgtacctttcctccagtcccccgccccatatccccctaccatggggatacctgagggtggccttattgcagcagacagatggaggggggctacaaggctgaacatgggcaagggtccagggcccttctcgggctcagcctgatttcagggcggggggccccagccacctccgcctactccagagaagcagatattgaggcctgtcaccacttgagcaggcctggagccccagagtaattatttctcttccttaattgaaatttcagcctcagtgatccagcctcagaagtgtaaggcaggcacagagaccctgcccctggtggggggagggggcgccccccaccctggccccagaaggagggaggcagtgccatcccaggggggcaggtggcttcacatgctggtgggtgggcatgaggtggacggctgctggtcaaggaggcagggtcaagggggccagtatggcatagtatggcctgagcactcagtatggcctgagtatggctcaggccagtatggcagctgccatgggaaggttgggcctctccctctgactcctgacagaggaaggtgagggggttgatctaggctaaggtagcatgagggagtgagtaccaggagactgctgcctcctcccacatctggcgggcactgaggggtgggctggggtgggtgaggggctatggtgtgagtggggcgggctggctggcggcaggcccagttcctggttcagggctgggtgaggcggctggcctggcggggcggggtggggtgggcaggagggtgcagctgaggagcctgttttcccggctgctgcggtcaggctgggaggagcctccgccacctgggtggtccctgctgccctacacggccttgggcctggcctgtctgcgggtgaaggcgggggcagaggactccagggaccagcaggaaactgggagaagccatgggcttgaaatgagcctggggtccacccctccgtgagcttctcaaggtggctctgaggtgctggggtaaacgtagcaactgccagcttgcagctgtgtgtgtctgagctcaggcaacccaggcaccacacaggaagctgctgtactcactggaccctgatgggctgcagagggccagagagtctacttgtgggcccttctgggtgtcagtcttctccatctggggaatgggttggcttggtgggagttttcaggcctgcattaccttcaaagggctcatgctgcaagcatgggctgtcctccctgtttttataagtacacgggccccagccttacccagacagcccagcacgctgcccgtagtatcctggggaagggcagcagctgtcatcagtgttatttctgaggtgtgttttcctggcaaccaggaaatttctgtcagtgggaacagcctgcccaaggcctcctccacccctggggaagacaagttgtatgacaagggagacagaggcaattcaaagtgaagaacgggagtgaggccgcctcctccgtgcatattgctcacacactggggcagccacgtgcccagtaaaggctctcttgaaaaccgtggagataggagccaagctctgcaaggccctgactagctcacctgacccctggcatctagaagctcacagcctattcttggtggaggtgtggctatggctgccctccaaggaggggaagacagagatggctggacaggatgggacaagccagcccccaggagctggggaagcgaaggtgggtgcaaatgaaaacgcagaatcccatttgcagtccatttgcttagcagccctgaccaggagggagagaaagaagagggcagagcagggagagatggggagggataaggatacagagagagaatctggcagccaggggtcagggagcctttggccgtaaggcctgggatgcctgctgcttactgaggctgtggcccctcctgccttccagagctaagaaagctttgctctgtctcagctccagacaccgcatccccaccacacattccagcacctgcctgcttcccctgacctctggctgccccacagaccccatccctacctccactccttggggattttgaggtcttatgccaccactccactctgagcaggctcagtctccctgtgttggtggtggtgcggggtggtgagagtggtcctggagcagtgggaactacccggaggccacctggggtgggtcccaggcaccagtccagctggccagtgggccacgggggctgaccttgtcaccttgggcccagatggagggcagcggtgctcggcccttcccccaagcacatacagccgctgagctaacatgactcaccgcgtggcagctccctctccccactgggagtggggatggaagcctccagatgctgcagccccaccctgagggaatcacaggccaggctgagcccttccaaagtggggatagctggggatcagacatcagcatccattgaagggggtgttcacccgcatggggtaagccctgtgcctgggactctgggcttagtgcccagctagggccttgggagacccttgggcttctctgtgctcagggggaaaggagctgtgcagcctctaggggtcctgcctgccccaagctgtgctggtggtccaggccccctttggggaggaccctggccaggggtccctagctcctcctctgtcatccagagaacccttaggtcccaggggctggtggtgttcctcttcctcagaaacactacctgcaagactggaaccctaacacagccacctctggagagttgggggtcacccatctcttctttgctccccacccaccctggtggaagtggttcatctgctctgagccctaaagaggaccaggtgggaaagaggcctgatgccgtgctgggggcttcgaataggtacaggcacttctctaaggttgctgtgtagggcaagaaaatcagctcagagagtgaatgaatttgccccaggccacgtggccatcaggtggcctggctggggtttgaacctgtcttctcagagcaaagctgacttggctgcacctccctggacttcagctttcagggagggaggtccaggcagcaggagcctgggggacaatgctatttttcatattgatttttgtattgacctgcatcctgttgcccaccccggcaagccccaggacagatcccgttttggttttcgccagaacaaagcaggctgtgctagacctgccaaagcagatacttcctcagagcaggtgaaaggaaactcaatcttgtcttttgttactcaaggagggagtgagggaatggctttgcccttgaacagggaggccgtgggcgggtgggaggggtgggtgaggcagtgtggggagagggcaggggcacacatacctgagccgagacaccacccccgcccgccgtcagagcatccggagtgtggtgaccatgttagtattcagcacaagcgcgcgcgcacacacacacacacacacactcgcgcacgcacacacgcacgctcacactcacacacttaagcgcacacgtacacgcacgcctttctttccgtctctccccaccaccctcctgagtcccctctaaaccaggaaggtagcatctgaccagcagagaaaaaaagagagagaaaggaaaagagaaaaagagagattagtgggaagaaaatccgattctggagttaccttagttaccagctcctaatgactcgcagggcgggctcggccaccttcctgagcagggggaccctccctcccgggcccctccatcaccccattaataagacggggcccttgttcatgagttctgccacagaaagggaagaatcaaggacttttcaataagagagaactccctgggtggttttgaatagttgctttttgtgtggcagtgcgggactcgtcctcggctctctgccctggccgcctccctcagctggctctgtctggaactgcctgctcctgggtctccagatggatgagcttgtttctccgggagctcaatcctttattgttcctgcctttcccctcctgacaccctcagcttagcagaggccacaggcagcctttgcgtctcaggaaagcaagagaatccccgaggtggttctaaaaaggcttaaagcccgggagtggggctcagcatgaaggaaacaaaagcacactccccacatccagggtgctgggcctgtcggccagggccaagctcacggccgttgcttcggtgccagtggaaggggaatgaatggaggagagactgggtgagggagatgacgatagaacaggagggagatgggtaaatccgttttatcagacgctgcatatcttaggaaagcacatttcagctcttttggcttttggcaagctggtcctaccctttaattttctaataaaaaggaattacgtttgctgaaaaggcagtaaccagcttcatgtcagtgtctcttgtggagaccataattcccgtcttgggtgcctgccggctctggggtgggaggtgggcttctgtggccacgggtgatgatattcaggagtcaaggggcagggacgtcagggcccacagcagatgccaggcagtgccacatggctttgccctgcttgccccaccctggcctgtccactcccagcccagcctctgatcatggttccaggctcaccacagacagggctggcagaggctcccaagactcacaatagacacttaatgaatatttgtggaatgaatgaaggaattcttactgccgaggcctgaggtagcaggcaagttgctcagagggtcagatcttggtttgaatgaatgaatgaatgaatgaatgaacgagtgaatgaatgaatgaataaaggaatgaatgttctccagagtctgaaactatctatctggaaggactaacctccaaccaaccccactctccctaagctctggcactgaattcactggaaactttgccaaaaataatatcccctctgcttttaacaaataatatgcactcgttttaaaagagagagagagagagaagtgtgtgaagtcgcaagttcatgtccatgctgtcccacacctgagtcccccagagccaagggtgggcacccttagaaggtcctttagaccttcctccaggctctgggaatcccctgcatttcttatctggtttgggggtccttgcacacgcactgttctacaaccctatggggcccctcggccatccctgtccccagtgagatctggatgtggttcagacctccctgggctgcagagtgtcccttcctgctctccaacctgggaacaggagccaggtatttatgtaagtctctgtggggtgaatgtaggaaaacatttttgctattacaactcccttcattccagtccctgatttattgatttttgagacagggtctccctctgcagcccaggctggagtgcagtgacatgatcacagctcaccatagcctcaacctcccaggctcaaaccatccttccaccttagcctcccgagtagttgggacttacagtcacatgccaacatacccggctaatttttaattttttggtagaggtgggatctcactatgttgcccaggctggtctccaactcctgggttcatgtgatcctcttgccttggcctcccagagtgcctcccaatgggctcacaccccagccccagttttaaacaagatcctgaaggcagaacactcaccatgggtaggcacttgataaatggtagcctttgtgatttgggaggaatctgtacccagtgctatgcttggttccacatcctaagcattgcttgtgccatactatatgccaggcccccagggcgcaggaacacacggttccagaggggtgtggaggcccctgagtggcagcgtccaggagcccagtcgctgcccctgcccgcagcagcccatcactgctggtatccagcctccttcagactggtgtatgccactggaaactccaggacatgtgcgcagcagaccccacacacgtggtttctctggggctgcctcctgaccccaatgggcaggcaccaggtctctgaagctcagctggcaaatgtaggagcagcccaggatttggctggttgggcacatgcacggctcccgtcctaggacctgacttaatctcaatccttagaggtggcctgggaatctgaattgttactagcctcttggctgccatggatcccttccaggatcaggaactggcatgaggcataggagggccaaggacatcttttaggctgcatggagcccggatccactctgcagcccctggctgggccgtaggagagcgggcaggctcagggcagggaggggagctaaaagggaatggaggggagaccagcaggagctctgtctgcccgattctggtttgggctgtgagacagtcattgcatttttttgcacagttctggccacacagtatttaagaggctttgcctacagacctgagtgactgtgtgaatggtggcactggtgcatacggggacgcctgaggaggaacagatttgggacttgtccacctaggactccctgtgggattgccagtatcacccctcttcgtcattaattcccagcttgcctgggggaggccagggggtagcatggggttcgggttcccctagggttcaaacaccagcccatctgccctgggtggcccttccctgctaagagcctcagtctgctgttctgtaaagtgggtccagccatttctgtaccctcagggtggccatgagggtcagtagccagaaaggcaaggccccacacagaactggttcacagaaatagcaggcagtttgtcaggggcagccttggcgtggttttcattcaaaatcattttttaattccaaaagaaaggaaatggttgtaaataaagaagggaaggccgggcacggtgggtggctcacgcctgtaattccagcactttgggaggccgaggcggacagatcacgaggtcaggagttcgagaccagcctgaccaacatggtgaaaccctgtcttactaaaaatacaaaaattagccgggcgtgatggtgcgcacctgtaatcccagctactcaggaggctgaggcaggagaatctcttgaacgcaggaggtggaggttgcagtgagccgagattgtgccactgcactccagcctgggtgacaggttgagactccgtctcaaaaaaaaaaaaaaaaaaaaaaaaggaaaactgtagaggcacataaacaggtcagagttcctgtctaggcttccctagaggtctttacttttactagtgtaatctgagtctttgactctgtttgtgggcatttacatacacaattaaatctttactgtgtacctactgtgtgctgaaccccgaggatttcagaccttgagccctgctgttaggggctctcacagtcctggtggggagactgacccctaagctgataaatgacccctccatggggagtgggcctgtaaagtgatgatggaagagggtccacaaaggagggaactaactgtgggttggcaggacagggaatggggatcggggaaccttgaagggacatggagtgtgaactgggactccacagagatcacaagtttttaggtagaagaaaggagagggaaaagcttggaagagcatattctaaggaaagggaggtatttgggatgtgctgactttggagtccctgtgggatggccatgatcaacccactgtagggagccaccaaggggttctggatcttggatgccaggccatggagtttctgttttattctctaagtcagggagccattgaaggcttttgtgtgtgtgtgtgtgtgtgtgtgtttgtttttgtttttgttttttttgagacagggtctgttgcccaggctggagtgcagtggcacgatctcggctcaccgcaacctcagcctcctgagtagctgggattacaggcacgtgccaccacgcctggctatttttgtattttttggtaaagacagggtttcaccatgttggccaggctggtctcaaactcctgacctcaggtgatccacccgccttggcctcccagagtgctggattataggcatgaccaaccacacccagccctgaaggcttttaagcagggaggtaagtgagctggtccagcatgtgtttttaaaaactctttctccagcagagcttacagaagggtgagcagggtgtacccggggggcttgtgtggagtccaggccaggcagggacggtggccagcgggtggaggaagccgtgaggatgtggccggaggagaggggcaggcttgggccctgcgaggtgggtgctgccctgggccatgattgggcatgagtggggagccgagccataccatggccggggacagggactgggtgcgttgttcccacatgagcgttgtggagttggcatgcattgggaggcatccctctgggctcagcccctgcctaccaggccaccattgcccctttcttggccagcagatcctccaccagcacctgtcagccccgagcactggaaacggcagccggcggggcctttgtgcttcaggattccttctccagggacacgggtgatagccaagcccggcagatgcccccgggggtgccaccgtgcccccactcgccatctccgatgctcagctgctccccagaatgaaagaccttgtcacaaagggaggcagggagaggatgcgcttccgtgccgcagcccatctgggagccaacgttattttcctgattgaaggaaacatctgttcagtcctctttcagagcgaggcaggcagcggactgggtcggtctggctctgggcaggaggtagagaacctgggctgagcccagagcccctgccctaaggggtttaagaggagctaccaccgttctctgtccctccctaaactgggagttcaggagctcctgccatccccttaagaagcctcggtcactgcctcccccaaggatgggggctgctggggcaaaagccatcgcctgtcccagagcaccatatgtgttttctttttttttcttttcttttcttttttttttttttttttgagatggagtttcgcttttgttgcccaggctggagtgcaatggtgctatctcggctcaccacaacctccgcctcccaggttcaagcaattctcctgcctcagcctcccaagtagctgggattacaggcatgcaccaccacgcccggctaattttgtatttttagtagagaaggggtttctccatgttggtcaggctggtcttgaactcccgaccttgggtgatccgcctgcctcggcctcccaaagtgctgggattacaggcatgagccaccacgcccagccccatgtgttttctgaggactccttcattatttcacacacacactagagccatgtttttgaaagatacggctgccaaacaaactgcatttattacataatgattaattcatcgcccccatttcttattaatcaaagacatccataactgcctatctgagctttgagttggggagagaaccagcggggcctcaagctgacagccttcccacccagatcaggggcactggtagatttgtgtcagtggagcctcatttggggtaaatgcacagtacccctgaggtttctagaagaaatggagacagctcacagacccccacacgtcacctccccaaacccctggggctgcctgggatgttttataaccccttctccagccagccctgagctcaggctggctgcttggcacttagccactggctgactagtggcctgtcagaggatgtggaagatggggtgggccagtccctgttgctggaggctgcaattagtggcagcctgggaaggagactgaagcctgggctgaggtcaggaccactgggcagagcttgaggtgagggcaaccgacatagggctgtcctggcagcccatcctgggctgagaacgaattctagggttccaggggcatttgacacgaggccggccacactctgaggttaggggctttttcaaagatagtttggtggcaggggcctagagtatggggagtgccgactgattgggttggagctgccctcttgtgcttagtcgcttctagatggaggccacaggagtgcttggtaggtccaggtggagccatcaattgtcagacatgcaaaaaacttgaaaagatatctcaaaagggccagtctggctgggcacagtggtgcatgtctataatcccagtgctttgggaggtagaagcaggaggatctttgagcccaggagtttgagaccatcctgggcaacacagtgagaccccatctctacaaaaaatttaaaaaattagctgagcatggtggagtgtgcctgtggtcccagctacttggaggctaaggctggaagatcacttgagcctgggaggtcgaggctacagtgagctgtgatcgtgcgactgcactccagcctgggcgacagagcaagaccagttctacctggctagggtggccccagagtcatggcggaaggcgaaaggcatgtcttacatggtggcaggcaaagaatgaggacacccaatcttctttactcattcatctaacactgactgtgtggcctggcacccaccaggaatgtccctgccctcaaagtctttacaggctgttggagatggggcagatgcccaaataagtcattgttgtcccaggtagtgccatgccaggggccatccagggagctgagggcccagtaaaaaggcacttaaactcaaatgcatggagaaggggacagccagggtgtgattagggaagacttcctgaaggaggtgctgctccgagaaggttgattgggtggtttttgtaggggttttcttgtttccactttttaaataactacttcatgccacatgctattaggtgcttttcacatacatcgtcatgtttaatttgtaccaacaaccctgtgagataggaaatagcttccgtatgttagcagtgagtaagctaaggatcagagaggggaggttgcttggacaactggcttagccatgattagaactccaataggttcttaaatgatgatagaaaaggtgtaggaggatgggagccgaggctggcatacctggcagaagaaacagtgtacgcacgcgtatgtcggtggggcactgtggtgtggagggctgcagggcttggtagcactggagtgagcagaggcgagcctgaaagctggcggcagggacctcaggggccatgacaggtatgtgagtcaagggagtgatgtggtcccgctacaaatcactgggggcttcagcccctaatgggacctcctctagctgcacccccctccctgcctgtgccctttttggcacctggtggcaggcacacctcaaagaactgctgcatctgttcctgcttctgacctcaggagacagcagcagggctggcatggagcatcagggaaatgcacaacaacacatcagcccctgggggcctcctggatctccccacgaatcctgcaatacccttcacaaccatccccgtccagaaagaggctgaatggcggccagcatctgcccgtcagcagagagttcccgctcttagcaccagctcgcctgagctgcctccagggacagtcctgcccgcctccccagagagccagtgcttccgctgccgcctaatagctctcccggctggagacgactcttgatatttagcctgcgtggcaggagccttaatagcagcaactctccctccctgctcctgcctcctgagccccagagacagctctgctcacctcctagccggcatcctccacgcactgcctaggcatcaggcggaggtctttctgcccactcttggtaacatcaaggaatgaatgagcatccaggagcacttcgagtgtgctattttctcctctgagattcagagatgccctttgagaggctattagcatggccacaatttaaatatgaggaaactgaaattcagagaggggatgtgatggagatggctcactttcgcttcatcttccccccctcttggtaccaggaagtggaccatgctccttcaggcctcaggatctttgcctctgctggtctttcttgcctggaactctctctcctccttctctctcatagatctcatctcagagaagccttcctgccctggtttatttactaaggttggtccttcttgccatactgtaagctccatgaaagtggggagttcccctaccttctgttgctcccctctgtatccccagcacccagcatagggcatgtagctccactagggcctcattaagtatttattgaatgagcaaatgagtgaatggataagcacatgcctgtactagttagggtaagatcagctgcagcaacaaaccaacctagcatttctagatggaggtttgtatttccggaggatggtgagtatttctggtgggtggaggtttcctccacatggcaatgtggccggggcatggtctgcatcaagctggcttagtgtggagggtccaccctggaaggagatatcacttgcattcacattccattggctggagcacagtcatgtgaccatgcccagctgcaaggaaggctgggaaatgtagtccagctgtggctccaaggacggagaacaggttttcgtgactccaaatcttcccataggttgctgtattggtctctctaatcagcagagccaaccgttaccgagtccttgtcactataccctgttgtaagcccttttctcaaattagtccattttattcttacaacagccctacaggagggtattataattagcccagtttactgatgagcaggcaggggctcaaatgacatgttaaggggaaaatacccattagaaacatgatgggccgggcacggtggctcatgcctgtaatcccagcactttgggaggccgaggcgggtggatcacctgaggtcgagagtttgagaccagcctaaccaacatggagaaaccttgtctctactaaaaatacaaaattagccgggcatggtggtgcgtgcctgtaatcccagcaacttgggaggctgaggcaggagaatcgcttgaacctgggaggcggaggtgagctgagattgcaccattgtactccgtctcaaaaaaaaaaaaaaaaaaaaaaaagaaaagaaacacatgatgggtgtctggagatgcagcagccaaaggctgagaccctcacccctgactccaccaaacattacagatattcaaatagacaggccagtgtccagaagaaatttatgcgggctgagccacagttgctggcctttgttttctctggttttgtgcttgtccaagggtggggaggtggttgagtacatctctctgagggtctgggccagggctcagcacttcatcatttcagctgtccatatttggagggcatctgtttccttccgccttccacagaggaggaagatgggtacacatgtggctagtaaccattagccgtcgacttccggttttgtctttctggctctttatgattgacaagtgctggcatgttggcctttctgccccttagcagccctccatgcaggaaagcgggagggaggggtgtgtggccagtgctaggatggggtctgtatggaagagtagctccaggaagtggagcctcatcaaggcaggtagcccacgcttcccgaggaggtgacatttggtcgggctttgaaggctaaggtgggagtctgtcagactgaaaaggaaaggcatgccaggcagaggggcctgtgcaaaggctaagagagcctggcttctcggctcctgtgtctgctttgcccctagagcttgcccagaacagtgacctaagtctgagatccttccgacccacactgcagagggaatgtctcctaaaactactgtttatctcacctcaagctggtgttttccccttgtccgtagagaaggaaagggtagcaaaaaaagaaggaaggtgaggagggaaagtgaacagagagcgactggactgagcacctgctggcttgctctgctgtgtcactgccataactcttccctagctatgcaccgtggccccttgctctcctgcgggcacactactgccttgggcctttgcacgcactggccgcctgtcctgcctgcagtgctcttcctggagagccacagggccgattcctccttctccttagagtcttctctcaaattacctctcttgatgaggcctgccagaccaccttatttaaaactacgaacctagtacccgttccccttagcgaatgtttcccccagagcactcagtcgcggtgtaacgccctgtacaatttactgatttatgttgctgcttattggctgcctcccttccgtgcgtctccccaactcctcccatagaagccaccaagggcagagtttttttttattttttgtttttttaatctcttatagtggtggatctcaagcacccgaacatagtaggcactcaataaatgtttgttgaagtatgagtgaattcagccctgggcaaaacgtgaccccatttcacagactaggaagtggaggcccagggtcttgcagccctgtggggagagggctgcccagcgccccgcaggagcctcccgcccggcatacccacgggccagtgccgggactgggcgcggggcggcgcgcgggcgcaggtagccatggtgacagcgccccagactactcgtatttcctgccttttgtgttcgcacatgccccagcccccagcccgggcagacgcccctgattggccgtcacactgcggaggggcggggcggggtgagcggaaaggggcggggctgacctgtgggcggggcccccggggcgaggctggtcttgtactggcgcgcgctgcctgtgattaacaggcgggcgcggccgcgcgcggctggaaaggggcggggcttccggaacagccgccccgggagcctgggataggggtgagtgctccttgatggcggccccgaacaaaggacgcctccagacccgggcttcctgtccgtagtttttcttggcccttggagtctgagagtgagaggcctgctaggccagcgccccctaatcctcatccggccgtgggtggccaggcactgcagacgtgtccccgggggccgaccaccttacttgccacgctggcccctccctctcctcaccaccacagggcctttgcacgtcattcctggacactcttaaagtccttctttccggccgattcctcaccccctcaggaggctctccacacagaccgtgacctgccctgcctggcactcctctgcccagcgtttatatctctttttgtgcactctccgccctcatcacacgtgtgcctcagggcagggccctgtctgtggcctggcacacagtaggtgctcggtttgtgttgttgaatgcctccattcatcaggttgcctgaggcttccttggtgggtggtgccggctgtactggcccgggacttgggaggaagggagacagatgtgccttcagacccagacacagaagagtttgtctccaaagccagggcactgggtcagtgtctggcctggaccccaggcccgaggagcctggtttggtgtgtgcccttggtgaatggcctactgtgctggccagacaggagccccaggggctggccctgcctcaggaggaaggcagggtcacagacacaggctggaggggcctggagtgagggctgctcaggacccctgccgaccagacctgggagccccagcatctgactcttcgtttgtgtattacttgctgtgccttgtcctggcttgacagggttggagtgggggttggagtggtagagcagcgagaaaatctccacaccccttacccccatggcactcccacaaaacaaaagggagctaaactcatgaaatcggcttcacggttatacatggatagccttttgggagttgggtgatctctggggtatatacattgtttcctcaccaacaccaaaagaaaatgcaatttgagccaagctaataacaatgtattaaatcagagcttcctgagctttgctgggtgctataaaccaccccgaagtttgtactaggagcagattcctgggctcaggccaccctcaaatcacagattttaaggggtggggctcaggaatgcccttttattcaaactgcctgtgtgtggttttgatactcagtcttaagtccatcatttgagaaatggaatgacagatatctgtgtctcagaacacatttgaactcctctccaggctctagaaagtctaccgttctctgccccagaccctggctccagattcaagtctagactggaggaactgtggatcctttgggatttggaaaaaagttctagaccctcttcagaaaaatgtgcttgtccacacacacttcaactttgcattggatctcaaggtctcatacctgggctgggtggtctgtaaagcaggggagacctatttggggaaaggcctccatgctgacactcacctgaacctagggccaaagtgtatggttgtacaagttgtacattgtacaaggatccctggaagaaatcgagccactggccagctgtgcagcctggcacctggggtgtcttcctgttttgtacaaaggcattttatgccattcgcctaacccaatcttttttttttttttttttttttttttttttgagacagagtttcgctcttgctgcccaggctagagtgcaatggcgcgatctcggctcaccgcaacctccgcctcctgggttcaagcagttctcctgcctcagccccccgggttcaagcaactctcctgcctcagcctcccgagtagctgggattacaggcatgcgccaccacacctggctaattttgtatttttagtagagacggggtttctccatgttggtcaggctggtctctatctcccgacttcgggtgatccgcctgcctcggcctcccaaagtgctgggattataggcatgagccactgcgcccagcctccctaacctgatctttaattcccctcctgcctcccatgacaactcaagttagtggcactagtaaagttacagaaattatgtgccttagccatgggaaaccggccctctgtaaactgttattaaagccataacaaataatatccgacagcctgtacctactagtgttcagttcctggtactccagagccctaagcgtttttgggcagtggttggggggctgccaccaggcctcaacttgggttaggaagatagggcaagggtgcaaggcccgtctctgcacagagggtgggagagaggagtaactacatagtaggtgcttggtaagcactttcccagtctacattcattgggtccattttatagatcaggaaaactgaggctctgagagggctggtaatttggattagagaaggcccacctgtctggagcggctttatgaacacaggctttggagtgcgacagcggggaggtcaggagaggagaggaaatagccatagctgtacccccacaacattcacaccatgcctccccctgaaggctttgcctgacgtttggactgtttagagggctcctctgagctcccacagcctgagccttcctgtcacggtgctgccaccctggtttagcaggcctgtttacacactgtcaccccaagagcctggcagcaccccagtgctggactgtgagccctccacacagggcccagcgcatggtgtgtaatacagctctatggaatgctgagtggctgattaagtgggctctagcttctggcagctttgctccctgggtggatggggcgggagtgatgcagaaaggagaggtgtaggcctagagttaggagggcagggagagcactgggcactggaaccacttggcagggtgagttggcattccctgtttgccacgaccttggggtcaccctcaccaacttgccccagctgggcctgactgaagggcagggggcctggacattggagcccagggagggcagagggtggtagactcaggagagagctctttgtttgggggcatttctccagcagagacccttagtccctccaaggagcatgtcctcctccatcagtcagtgtcctagccagcaggggtgcgtccccccagatccttccctgcttatcctatcctgggcccagccatgctttctcccatggggtcatgtcatcctgaccctcagatttggctgggtcgccccagggctctctgacaaagcccagctcctcccctggcacccagcatccctcagacccggcctacaccctgtcaagcccgccttctcttcaccccaaggcctgccgtgcctcacagcttgggcagggctgtaccctctgcacacatcacccttccctatccccaaccctctccctttagtgataaatccagctggccgctctttgcagctcaccagggaccagtgtccccagtgcggccctcggtgcacccagtccttacgtgagccctagccaccatggaaagccaggagggcctggccagcctccatgtggggtctggttggttattgcagggcctgttgggactgcctgtgtccctgttcccctgggacaggagttctggagcctgcgaaacttaagcatccatcatgggacctggcacgggggtgcctggccacagcaggagtgaatgaattttttttttttttttggagacagagttttgctcttgttgcccaggctggagtgcaatggtgtgatctcggctcaccgcaacctctgcctcccaggttcaagtgattctcctgcctcagcctcccaggttgctgggattacaggtgcctgccaccatgcctggctaattttgtatttttattagagacagggtttctccatgttggtcaggctggtctggacctcctgacctcaggtgatccacctgcctctgcctcccaaagtgctgggattacaggtgtgagcactgcacctggcatgaatgaatttttttatttttggaaactcctttgaaatagtgtgtttgctttccactgtcttgttcttcacctttacctcccttacgtataaaggtagatgcagtcaagtaaagtgtgctagcttcaaatcagaaaatctccatagagtcttccgcaaatccttgagcgcctactacgtgctaatctgtcccaggtgctcaggacacagtgtgaacaaaatagaccaaaaatcctcttagtgaagcagacgcttgagtcgggggcactggagaaagcaaatcagttcgtcggtaacgaggcagggaagtggacggggaggaagaggggcttctgtgaaggtgtgcttggccaggcctcaggcttcccacctgttcactggggtgatgtgcttgcccggtgggaacggtattctgttcatgactgttgccattgttattaaccgcatgcccattgcctttcagagtttgtgggccctctcgggcagcccccagagggtgctgaatgccgggccctgtgtacacttcaccctatctccgcggggtcaggctggccacctccatttacagaggagcagatggaggcccagggagggatagggtggtgtcacatgcttggagcggggtccagggagagctcttggctccctgaggcagggagaccctgagcccagacacaccccagtttataagtggggacagctgtggaggtgttgggtgctcagccctgggcctggcttctctggcctgaagacggcagctcatctggctgcagagtcaggaaagatttcctgagcctggactgagaggccaaggtgggtttgcggaggcaggagagagctccagatcaggaggcagtgtgggccaagccggggggcggcaggatgtgagcacagagagggcagcaacccttctacagaccagttcaattccagtaaccccagcctgccgtaggggtgggggacagcctggctgcagcggggcccacctgccagtgtgtgccttgcctgcgctccaccttccccctcgggcactgcggctttcttgggacagcaggaccccagttaaacagccctgtttcctgcccagccgtggctgccgcctcttctcggaggatttttttttcccacaactcaacaaccactaccacttgcagctaagcagaagggaagttaggactcgcattttgcctctgtagcgcctgtaatcagccccacacagcccccgccgcaggcgcccatcagtgccacttccggagactacttgagatacacctgctcacgctaaaaggagaagcagtaatccatcaaaacaaccccaggcgccggggcgggagaggctgagactcagtttcccctcccatggaacagggcagtgttgggcatctgaagtccccacgggtcctggcattctggaagaacacgactcagtagctttccccttctgggcctcggtttccctgtctgccaaaggtgcagggagatgagctcccagctcatgcctctgggcctcctacctcgcccccaccctcatctctccctttccagagacattataaatcaaacggcttagaacgtaaggcatcagaaattctgaaaccttcatctattattaacgctgacagtaaattccccctccgagcgttttacatagcaactgttaccaagactcggtggtggagctgctgctccagcggccgcatcccagcagctccgggcaggatggcagggccgccacaagccctaccaacccggccaccacctgggcactcagcaaaccctctccaggggatgggcggggagggagcctttggcagaggaaatgggtggcttacagctgaaaggaggtcccagctgcttttggtgagccctgaagaccccagctcctgcctaggtgaagacaaggggccctgaagctcccaggccttcagaggcagcacctatggacagggacgggctccgggagcctcccttccttgctgccctggttagaggaagcttgtgagatggaggacaggaaaaggcttcgtaaactggaaagggctgtgcagatgttgtttaccgactcacccacctgtcagctagacgttcctgagtgcctgtttctctgcaggcagtatctgggcaccagagatttaaaacaaagacaaaaggcccaatccctgtcgcatctggcttggtaggagacagacgcgccaacccctaattgcagttgtgcaatgatcaacgtatgtacgaggagcatactcagggcggtgaggatatcgcagagggcccttcacgggggctgatgctgggcagggttttgaaggatgaacaggggagggtctgtgtgttctggacagagggactggtgtatgcaaaggcccaggggtatgaagctgcccagctgacaggtggattacaggctgacctgttttggtggggaggggggctggtagagggagcaggggtcagagggtgcaggaccttgaatgcaagcaagagagtttttacttagaggttctggtcgccatggaaggttttcagctgaggaggaacaaagatttgggtttggggagtatcaccctaattgcgcagataaggataccaaggcctgcgcaggtgagaacacctgcccaggcaggaagcaggggaggctggctgctctctgcaagctgttaagatgcacctgctgtatgtccatccccacatggggaagggtggtgtgacctcagaccctgggacagcatgcctagagaagaagaagcgggcagggagcttgtgggctcttgccaggtcagagtggccaactacgaggagttgtctcactctttgcatctccagaaatcaggacacaagttgagacacagacttcagcccagctatggatgcgtccgttggcagtctctccacctagtgacaaataatatatatgttcattgcagaacattcagcaaatagaagtctcaagaaaataatgtttccctgcagtctcaccccaccacccccaccctctgatggccaggtcacattttgggcccagttgctccagaaccaggtacagatacacattttttaaaacagaagttgcatcatgttctttctgcataccctcagtgacctgcttttcgcccttcatacgctggaatagttccccatgtctgcacatatttcggggtgaggtttgccaagagccacgctagccagaggggacccagctgacctagaatgttcggtgcttgtcttcaagggcagaggccgtgcctggcctgcccactgctgcactcagcaccaagcatggagacaggcccccagtggatgctgaatgcagagctgtgaaaagaagtggaagctgtgtccgtgaagctgagtacaagttggacagagcccactaggatgctgtaatcttgatctggggctaaattgagtcttggggtaagatttgtgcttattaagggctctggatgcttggggtaatagatggaagtttttcagggagggcttcctggaggagatgggctgtagaataaagcagaagggaaataaatgcataactgtccattcactcatctaacagacatccccagagggctccctcctggtcagagccctgtgctggacaggactaggcacccagacagagtactgcccccacctgctgccagccctgggggaaagacagacaagtgcccaggtcactgtggctgtgtgctcgagcagtgctgtaatggtggaagggtagacagtgaggggccaactttactgatagcccccactttactgatatcccccacctcctagccaaagaagttggggattgatttatgggagggagcagtttggcatcaaggtgtgcctgtagatgatggacttagagggctcaggagggaagcccatacatcctgcatactcgggatgggcttggcatcagggtcaaggtcacccagactgtacccagaagtttggctcagcccagtgtccctggcctgggaactcctggatgccgagggtttatggcagctcagttagtggcctagccctgggtccccgccatggagaggggcccctgacgtccaacgtccactcccagagtcccacaccaaggaggcccccagccccacccagaagtcaaagggtgtatctttccagagtctagaagctggagctgctgtggggcctgggccttggtctcctcggctgtcaaatggtggcaccaccctgcagggaacgtgtggagctaaaataaaatgtgttccaggtgctggtgccacagggcttagggccacactgcagaaaacccttcctcctgcttggtcctagctgcccagggccaggccaagaaaggcttcaggaagaagcccccacctcctagccaaagaagttggggattgatttatgggagggagaagtttggcatcaaggcgtgcctataggtgatgggcgtagagggctcaggagggaagccccgcagattacccccttgccaagaacctcctagaactgcatactcaggggataggcagctcattcacagtgaaagtgttttggagtcaaacagacctgggttcaagccccagctcattcacttcccagctgtgtgaccttaggctagttccttgtcctctctgtgctcagagtcctcatctttacagtggaaatgataatgatagaccagtattgtcctgagggttgaaagaggcgacccatatgtgagtgcctcagcacagggactggcacatagtaagtgcttggcaaatgaaaatggttcttctaaggctttttttttttttttaactagtgcccaaggaagtgggggtggcagattcctcactggtctcttaggttcctggcacacatgcagccaccagattgagcctctggaatcgtaccaatccatttaccagcccacgtcattagctttttctgagcacctactctgtgccaggcacaggggcaccatggtggaactggaagcagcaggctcgctgggaggctgacagctgtggatcctgacctgtggagtggccagtgccccgggggatggtggaaggggaagagggtatctagggcaggcatcagttggaaagtcacagtgagatttgagaggaggtgatccctgaactagtgacaaggcctactagcattttgccaggcaaactaggagcaggtggaaaggttgggaggcacaaaaggttgggagactcccagagggtgccagtagctccttgtaagtcattgttgctgggcatgaaatttgggagctggggaggtgggtgggaatcccctgtgaatgccaggccaaggaggcagggacagtgtctgattggtgactggggcctgggcagcatctgagcagggaacacagttgagtgggagaaaggtggtggtcactgaggagcgagggcaggtggggggatggaaaggtctcaggacagggggcccagcagggagggaggcatgggagggaggtctcagggcatccaagggacttttggttgaaccagaagttcctgagtgtgagcgcggcccagaaacagccacaggcctcatccctgcactgggctcgaggctggagtgccaccagcagctacccatccattgggcatgcgtgtgtctgctgtatgccctgacaagacagatggactctgccctcacggagcttaccagtgcagagagaaaagagagtgaataaatatacgagggaggtgattttggagagtggtaagagctagggactaggggagttcccttaggcagggcagtcagggagggcttctcagatgaggtgactgggctcattggagaagacccaggaggatggcgtcccaggcggagggaacagcatgtgcaaaggcctgggggtcaggggcatggcatgtgtgaggagccagtgggagccagtgtggttggagtgtgcatgggagcggggtgggaaatgaagctggggaggagtacccctaaccttagacagctaagaggttcaaatttagttgagggaaagttctgactctacccccagcagcaagggagcttccccaccaaagcaggagatctggctctcagcattcactttactttcctgtgtgaccttgagcaagtggcccaccctctctgggcttccagagtctgtggcaacacagaggaaagtgaggtgcttgctcagagactcgccagctgtgactggccaggggtttgatcccagtcatttctgctctgtggtgggggacttgtcgggaggggcaggtagaggtgagctcagtagaaccaagagcccccaggacacagggcatccaggaggcctgtgcttccacagcctgttcactccttcatgcacccgcctccccctccccactgcactcctgcccacactgcccactccccaaccccctcctctctctagggctgaaagcaagaggctcccatgggggctggcccgatgattggcagagtcgataaaggccacttggaaaccctcctgctccaggtggttccccgctggcatttgtagctgggattccgaggccagagctgaacccagagatcatttatcacacagcctcaaatggaggcttttctggaaaaaaaaaaaaaaagttctttctctgagattccaacttgcattgtctaaaacaggttaattggcaacaccgtttcccccagatccttccctgcatccccccgctttcctggggtgggaatggcagcccctggaagtagagaagggggacaggtttaagacacgccgcattttcagagcttgctagccatgtggagactgccagaggaatcctagagatccacccagtgaccacggctgctgggctgcacttagctttgtgatccagaccgggagctgcctgtgaagtccctccccaaggagctggaggtcaggagcctgtgtgtctcactcccttccttgcttgttcctatgggaaatgacaattgaccactgatacacgcccgccctcaaggagctgctggcagcagcaagaggggtgagctgtgctggggcagagggggcaccgagggaccctgggagccaaaagacggggccagcccactctgccggagtggccaaggagcaaaagcagtctgcctggaaggcaggcagggagaagtgtgctgggcacaggtacgggggcccaggtcataaaagaacctggtgcatttgaaaagctgtgagatcccagcatgcctggagtgtagaatccacgggactcatagtcagaatgtttctgtttcacaaagccagagaggttgggagggtccaggccacaaaaagcctagaatgcctggttgtactcctcaagataggctgggcgtgctgcataacaaatatccccaaatatcagccccttcaaacagggtttgaccctcactcatgccaggtctctgaccagacagctgggaaactgctcactgatgtcactcaggacctgggcagacagaacaacagccattagggctattttcgtggcacagagggagagagacaggtgtacagatgcatggagcttcctaaagcagcatgtggcacttccacttgaatttcactgcaaagtgggccacatggccatcctccggacatctttatgggctagtgacacgcttgctgcctttggctgaggaggacaggaaatatttggtggtggtgccgacactgaccacaaagaccaagaaggttcagcactttaccctgagcaaggtgaggagccttgggagggattgagtagagtaggctgcagcctcatttagttttactttttaactttttattgacttgcatacagagaagagcacgaatcataggtggacagctgatgaatttctgcaaaccaaacacactcgggtataactgaagttcagatcaagaaaaagaacatcaccagcccccagatgtcccttatccccctcatcaggcatttcctgcccaagagtacttttgtctgcctttgagtttcacagacatgaaaccttttctgtccaacttcttttcctcttttttttttttttttttgagacaaaatcttgctctgtcacccaggctggagtgcagtggtgcgatctcgcctcactacaacctccgtctcccgagttcaagcaattctcgtgcctcggcctcacaagtagctgggattacaggtgcctgccaccacgcctaactaatttttgtatttttagggttttgccatgttggccaggctggtcctgaactcctggcctcaagatatctgcttacctcggcctcccaagtagctgggattacaggtgcctgccaccacgcctaactaatttttgtatttttagggttttgccatgttggccaggctggtcctgaactcctggcctcaagctatctgcttacctcggcctcccaaagtgctgggattataggcatgagccaccgcgcctggcctcctcttcttttactatttatgagacctatctgtgctgtgtgtggcagtggtttttcattattgtgtagtattctattgtgtgcatatgccacagcttatttctccctcctacttttgatgaacacttggattgtttataatcggaggatcttcggtggcttgcgcctgtattcccagcactttgggaggctgagacgggaggagagtttgagaccagcccaggcaacatagcaagacctcatctctcaaacatttttttgaaaactaaaatagttggaggatcttgtgaatatacctgccgtgaacattctccaacacattgtttggttcctgtatgtggagttcccattcaatgtgtgccttggaagtggaactgccatggtctcatttgcatttaagaagcctctactggacacacagaagagaccgaggtacagtccaggcaggaggtggaggggaaggtatgtgggcccagccctagggctcctccacctcagaatccagaaacatccccagcgtggacttgtcttccaggcgacttgggggtctgtattgtacacacaagatgaaaatcgtgtaaagcaaggcccagacacatgaggctgagtgtgcagccccaaacggcaagacgtaggccttactgtgtgagtcacacggtggtgttatagcacattctagtacacaggcaagaatagttgtataatatttgaatgcactgaactcacttccaccaggtacacgtgtgaggaatctccctgcaagtcacccgtttcacaagagggaagacggcccatcttttaagtcaggggaggggaccacttgccctggggcctcgggctggggttcagcctgcctctgttccccactcttggacacacaggatgaagggccccagtgctgatcgctcacaggggtggtaagacttaccctgttaccctcttggggtgtggcatttcttagaagccaagcatgggtaatcctttgcctggaatgaagccaggagaatggtggggcttcaggctctggttctagaagacagggcttcttgggagctgcccctggagcctcccagcctgagcggtaggtgctggagctggtgcctttgaacttggattcatcacagggaagacctggggtccaggcctggttccgaggtgcccaggccagcccctgagcagccaggcggccttcttgtgaactcacattgtagtgtcccgtgcagctgtcctggtcctgcaggatgcattccccacccccaagcccttaagggctgttgggttttgtttttaagaaacatatggcctagttgttactttggctggcctccccaagcctcatgtctctgagacccccactcctaaggaagggggccaggcattgatgggggtgtctgggaagccgagggaggatgcctgccagttatgagaaagatgcatctttgtcgcagacacatgtggggcgctctatgtaaattgtttcagcgcctaacaggaagaagaaaaatgaggctttgatgcgagccaccacctctcagccaggcgtggtgtcactcaggcgcgtccgaggcctgcttctattaaggagctgtaagctcttctcaggccagagacccagggtgctctctgggcaggaggtggctctgctctgtctgccgaactctgggcgtcagcactggggcgtgctggggcctcaacccagccccacctccaaggcaggcggagagcactgctgatggattccccagcactgcactgtgcgaggcccagggcggggaccccagcaggcagcgtggtagggtttgctggggatgacaggcaggcgcacaggcggcggcactgttaggccccatgtgatggccacagcctggcacaggaatcggtgctccaggcagcagacagcaaaggtgtggaggcaggaaaggagccactgtctctgaggcctgggagagcactgcgggtgctggagatagatggtggcaggggccagctcaggggagggcaggaatctggtcttgtggctttggaagcccatgggttgcgagcaggagagggtggggtggtgtgagtctgagggaggtctcagatgggaggggagggcggagtggggcagggaccagtgagggccagagtggagactgggcaggagggcatagcacacacatggacatgcttcccaatgagccctggcccagtcaactcccagctccaggaaccccccacagccctttgctggggtgcacaccgtccagagcactgacttccccaacgagccaggtggaaatgtcccagggaggaccccggggcctgaggagcctactgaatcctcaacaaagaagggaagagaggcctaggccacagcaggcccagaattattgtgttatgctctggatcttggggaatgtgtaatccccacaccgtatctatggcaactctccattaaccagaatttggttctacaaattcctgttcccattcattctagaaaactcagagctgttggtctttttaaaaaaactcgctgaaaaaaaaaaaaagatactaaagaatgtaaagaagaaaatgaagtcagctccagcccctctgctgagaacacactgatgttagtactttcgtgcatttccacccagtttgtttaagaaaattgggattgtgttgaatgcctgcttttgcatcctgccttttccattgtgcttcagatcatgagcatttggcaggtcagaaaaaaaatgtctttggaagctgggctgtggggactggggtttggaaggcttgctgtgtgctgtgatccttcaggggtcatcgccctccctaagcctcagcctttgcctctctgcagggagagactgaaggacatttctcaggctcccgccaagagtctcagtgttttccttgcaatggtggccttgttattccagccttgctactcacaggtgggcctggtgatgtttgtggcagggtgggcacagggctggcactgccaccaagtacgtagttgagccggtaagctcagaaacgtgggctcactccagccttgagcactttcccatctcgtgatcctgggcaaatgactttgcctctctgaacccctatctcttaagctccagaaccgggtggttgtgatggttcattggcttaatgtaagtggaactcttagcatataataagtgctcagtaaagaggaactgttgctaccctgaggattgctggtatctgtgatgtcacaggtgtaatatgaggattaaatcatgaccttcttgcagcattcagcagaatgcctgggacgtaggggacactgtcagggggtggcacctggtcccatggtctagccaggactatctttgtggcccttaacttgtgcagctgcccagggctggcgctcagaaatggcctgtgcttggtgcatgctgctctgctgttgctatcttgagtttttattactttgtgagcaagaggccctacattttcattttgcactgagccccacaaattctgaggccactcttaacaagaggattaatccctagggcagactggcagggcaccccacacatccacggtgctcaatagctatttggagggtgaaggcaggactgaatgggccttggttcagaggagaacagtaccccagcgaggccaggtggcttgcccagtttacacgccagacatagggccaggcagtgctctgaccatcacgtgaggggctgtcagggcgacggtgtgtctgtcaagggcaggaagtgggctgtgtggagtgccagccaggatgggcagggtagcctgcgccctgctgacctgcagccagacacactggggagacacaagacgactcaggttggaatcgattgaaaccaagccaagagcttgggccttggagtgcatgggagggggaggaggttcagacccaaggtggcggctgcggctggtgttagcacttcttcccggcagggtgggcagggccccattaggggaggcaggcctggatgccccccagcaccctttcatgagggggagagaggagaggagcaaggcccaggccacctggtattcagaaggctgaagtgacagtgtcaggcagtttggggggcagatgaagccgtggcaaagggtggccaggaggccagagcagcactcacagatgaggtgggattggggccacctgcatgtgtggggaaggagcccccaggactcggtgtgtgggcctctggctgacaaaggccactctgcagaaaggaaattagaaagaagaaatgatttcttggctcatgtcttcacgaacaagggagaaagttgctggcgtggtctcctcacagaagagccagggtatctgaggggagccctttctctgccagctgggtcaccctcagggctggaggtgctggatgccagagtagaagtggatggatgggggtgtccccccaaaaggagagggagacaaggtgaggctgtgccttttaagccttctgcgcaggcctccttgggacagcccgggtcggatctcagactgcagcatgtggggctgggagccagctcccccgaggcacgggggctcaagaggtctgagcagcatgctgaggtcagggctggaggagcagaaagtagtagggagccactgatggcgtcataatgaaggagcgacatgacaagcttgtgaggggccacacagggcagaggctagggacgaggagatcccgctggcagctgggcatggaatttctggtgggtagtgaaacagccagacctaggacctgtggcagtgaggatggggagggggccagatgggcacacttcaggcaggggaaccccaggacttgggggcctcctcagagaggccttacagaaggactggggcagcaagcaaggcctgtggggcgaggaggcctaaggacaccatggatgcactggagccaagccattaaggaccctgcaccccggccagaggcctcactcaggatggctgcagtggagactgaagagatgggtcgggtggagggaaatgggctttgccctcaggaggtggttgtgggaggagatgcggtcacccgggaagagaggccagaggatgggaccgaggagcagcgacacgggaggacggcagggcgggtgagcgggggggccctgcccagggtgacagggctttgctgggccctccaggaccctaggcagggtctcccctggaaccaggcggtacaaggcctgtgatgggaggggcgggaggatgagggattgctggcaggagggcctgggaccagaagtctccactgcagccatcctgagtgaggcctctggccggggtgcaggatccttgtctacctgcggggtagggagacagcctgtctcccaaagggcggtggggtggctgagcctcaaggacaaaggcaggcgggggcaggggaaggagcctgtggctgggagcttaatggccccgaaaaaaaaacataaaaccagagaattatggggagacataaacagagctgtcaggcattagctgcagggagacggctcagcctgggtaagagatgctggcggctgagctgggatccttgcgtgtgcataaaaaagacagaagttataaaaggagggagattaagaagatactgcctcttccatgattgggctccccggccaattcctttctcacgccccggctgaggccccagtcgcacactgaccctaggggcctggcctgcgaggcctggccaggtcaggggccagggcctgccagcggccagggaggtccatgggggtgggtgggggtgggtagcgacttggcccaagctagtggaggggccggggagccaggcccaaggacgcaggcggcgccagccccagcaatttatgggtgctcacacaccctgccgtcttcattttccccgttgctgctgctgtcattagccaagcactaatgggcttaaatttcaccttaaaccatccccactgtcctcagcagatgacaaacgccctactctcgccggctgcaaagctgctgggcggcctccaagcaggcatgtgccctccctctgcccgtgtcctctggccctcaataaggaggctcctaaggacccagggcctgggatactcacaggccgggagaattcctgggggtgtctgggagcccaaggaagggcagggctcaggaaagggggcttcagggggatctttggagaccctgggatgataatggatggggagacaggagcccagggtccaggggcaccccactgtttggccttggcagggccatgcccctgaccctgcccaggtgtcatgaagaagggccctaggagctacccgccatgtttttaaaagccttagggaaatcatattttgcttaggctaacaaaaatagcagtggctttgcttggggttagaattccatccatccatccatccatccatcaaattcgttcactcattcattcagcaaatgtggcccatgagcccctggcctgagcaggtccatgaaaggcccgactagctgttcatttgaggcccatgagagggaacaagtgggtgatctctaaatgcagttcgtttgggagacaaaatcctttagcagtggctctgaggatgggaggggaagtgaccaaggggctctagaggctgtggggacagagtgcatcaacctggggtgcatccagtccatgaggcgggtgtttgcccgaaaaggagacaggaatagagatggagctatggcagagatgcagggattgctgggggctccctgctcatgtgtgcacatagccatggccaccgcctcccgcctttgtttcccagcaaggggcaggtgcccgaggagctgctggggttgatccaccatcaaagccggcctgtcgggggctggtatgcagagtcatccctttcccatgggaatctcgctcccttccaagcccccagcacccgcctttcatccctgtgctgagagccagtactcccactgacacccaaacagtgatgccaaggaggcactgccagagggaggccaccaccatacaggcctggaatgtcacactctctgtccccaccaccccccacctgcagtgagcctaggggaaagaacaggctggcacaggcattaactggagatggagggtggtgcatggctctgggccaccatgctgtgtgtccccttgtcctctctgggcctcagacatgcaatctgtcacctaagggtattgaccctgccaggctctggcacaccaggaaatgtaagccagactcaagggttggcaatatgtacgggaggttgggtgaggcatcttctccagtccaggaggaagggattcctaactggtgcttaggaccatggactttggagaaatctattcctccccaccagtatctagaattggctgtggagtcctgccaatgctctgttcctgacatttctagaatttctccctgcatttccagcccctgccaccactttggtctggccccattattgctctctgggggacagtcccagcttcctgttcactggcctcctggcctcccctctcacccccatcaccaatccatcctgcctcactgcagccactgcagactccccaacacacatgtgtgatgctcactgttgctcactctctggggctccccgtggccctcaccacaacatctgtgctctccactgtggcccagagggccacacaccacgtggaccctgcccatctctcatttcttgcctctcacttccactcgagagccagcctgcattctcactactatctctcactctctcctgccttccaggcttttcctctttcccttgctaactccggcacatcccctaggtctcaggtgaagtgtcactcccctgggaagcccctctgccctcctgttcccactcaggtatgacgtagggccctttcccatgcgctggcacttacttgccttctccacgaggctctgagcccacagctgtctctgggtgctcagtctctagcaggtgtatggcatacagtaagcacttagtaactgcttctgagatggacagatgggtatgtgcaagggtggatgggcaggtgggtatgtgtgcatggatgcatggatagaaagaaggtaggctggtgagtggatggatgggtgggtgattgtgaggtatacaggtgagtgagtggatgggtggatggatagatgggtgtgtgtgcatggatgcatggatagactgatgggtgggtgggtgggtggatggatggatggatggatgggtgggtgggtaggtgaataatagatgggtggactgttgtgtgggtggatggagaggccaggtggtctatgaggtgagtccagaggcattagaaaatggagttctaagcctttggctttccatgggccccaatttctctgtctgtaaaatggtcagctcagctcctgtgcccagcgtggaggctcaggatgagctggagagaaggtggaggcttcagcaggcagcacatcaggcgctccacagacagtgcatgggacagaacaaggttgcttggcgtccctgcagcccaagggctcccttcttcagggggacaccgatgccctcctccatccctgcttgctcccaggatccttgcccaggtagcagactgggaaccagacccatagagttcaaatctaaacgttgctgctcaccaggaaattccctttgcctcctaggccttaatggcacatctataaaatgggggtgctcgtgtattcatgttctttgcagtttctctggggatcaaaacaatgtgacgaagggaggcagagagaaaaaatgcaatgtgacagggaagatggcacctctcctgatgcccagcacacagagggtacccaggaaatatggggcttagaatctcaacacctgaaagagcagcttctgctgcagcccctgccacaggcgccacactggccacagtgctccctcctagcccttcttcccctggccaaagctacctctggaaactgagttcgaagtttccaaaccttatcccagaccccatagccatgagttataataggcacataattaataatcacgtaattataatgtctatattatttataatttgtatatttatatataatttatttaactgcatctataatctataatttaaaattacatcaggtaagtaattacttacctactatagtgcttctgccacttacaagctgtgtgactttggataagtgccctaacctctctgtgcctctgctgcctcctctatgagttaaaatgtgtagactgcttctcagaacagggcccaacacatgtctggtaggtgtgggaattagccccgaggatgctgatgacaaagcatttctgtatctgttttgctcatgggttctttgctcaaccctgcaaggtgggcatttaatcactatccctattttatgggtgaggaagcggaagcccagcaagttggggtgactcacctgaggtcacacagcgagtcagcagtgggcgtcaggtactcggtgttctttccaaagactcctgaggccctggtctggaaaaagccagctctggaccaggccggaacacaggggcctttctgaaccttcctttcaggggcctggggccgcaggggcctccggcccgtcagccaagtcttttcctcccaacatgccagccagggaacacagacagccggaccccgctctggccactgccccgccaggcccctgtgccaggacagcgtgtccgcccacccgggcagtgaccagctgttcctgaggctgtgggctggagccaggtttctgtcacttcaaggagctcctgtcttcccggccgcacctccacagccagcaaggaccagtcagggattttcctgaactttccctctgttataaaagagtatataaacatttaccttttaaaagtaacagctaacttagttgcgccctcctctgcccagcattggtctggcagctgcatgtacgttgtctcctggcatctgcgcaccatcgtctgaggtgcataatcttgtgcctgtttgcagatgaggaaactgaggcacagggaacttgagttgcctgcccaagcccccacagcaaggcagtgtctgggtggggatttggacctagacagggagcctccctaccaatcaggccttcagggcagagtcttggggcccagaaaagcccagcccagcttctggttttaaattttataacgtgttcctttgttcagatgattgaaggaaagcatattgcaggtagaaatagaatgaaaacattgtaacacatgaaaccaggagtgcctttgtgtgcagctgacccttgaacaatgtgggggttagggacgctgacccccacacagctgaaaattcatgtgtaattttttttttttttttttttgagacagggtcttgctctattgcctgagttggagtgcggtggcacaatctctgctcactgcagcctggacctcccaggctcaggtgatcctcccagctcagcctcccaagtagctgagactacaggcatgcatcaccatgcccagctaatttttgtatttttagtagaaatggggtctcatcatgtcacccaggctagtcacaaactcctgggctcatgcagtctgcccgcctccacctcccaaagtgctggaattataggtgtgagccaccatgcctggcctcatgtgtaactttcgactccccagtcaattaacacacattttgcatgttatatgtattatttactgtagtcttacaatacagtaaactaaagaaaagaaaatgttattaaaatcctaaggaggagacaatcgaatctatttactagtcatgaagtaaaagcggatcatcgtgaaggtcttcatcctcgccgtctttgtattgagtagactggggccaggagaaagggagggtcttgctgtctcgggtggtggagggggaggcaggagaggcaggcacactcggtgtaaccttttgaaaaaactatcttgggatcttggctcagttattccgatgctgagtatgctaatcacatctaattttcattgattctgagaaaaacatccacatataagtagactgtgttgttcaagggtcagtcatacctggccctggcagcagcaggtccccacacagcttagcgcttgagccagtcctggctgctgcgtcccccaaagctgtgtacccactgaggaggacgcagcctgtacaggaattcaggtttggttctccttcccctcttgggggctgtttcctcatccgtaaaatgggaggctgatccctatcttgcgcattgcaggacgcaggggagctgactcctcttggcagctgggtcttgtcccatcctactgagggggaaactgaggtcaacccaccagcctagagtcaaacagctggaaagtggcagtgccagatttgagcctgaaaccaggttattttttcagtcaccttgcctagccattcatagaagtttttaaatcttttaggagttatcacatgctcatggtagaaaaattcaaatgcaatttcctttttatacaaatgttttgtacacacttttttttttgagacaaagtctcactctgttgcccaggctggagtccagtggcgcgatctcagcttactgcagcctccacctcctgagttccagcgattcttgtgcctcagcctcctgagtagctgggattacaggtgtgtatcaccatgcccagttaatttttgtatttttatacagatggagttccaccatgttggccatcctggcctcaagtgatcatcccaccttggcctcccaaagtgctgggattataggcatgagccaccgtgcctggctcactttttttttttttttttttttttttttgagagagggtcttgctctgtcgcccagactgtgcagtggtgcagtcacagctcactgcagcctgacttcatgggctcaagcaatcctcctacctcagcttcccaagtagctgggaccgcaggcaaacaccacctcacctgcctagttcattttttttcttgtagaggtaggatctccccatgttacccaggctggtctcaaactcctatgctcaagcaatcctcctgccttagcctcccaaagtgctggcattacagtgtgagccactgcacccggccctgtacacactttctacactgcactttttttcaccaacttgaagactgctccaattaatccatgtggtgcttccattctctgagtactcagccaatagaacctcccagatgtatctccctcatcccccttggatggacagctaggggatcccgtgttttgctgctgcaaaggacattgcagttggtagccttgtgcagatgacttcgggcccaggttagagggcacatgtaatttgcatttgggtccatattgccagaaagctctccaaagaggtagtaccattttaccctcccatccccaactagattgggcacctctttccccatgccctcaccagctaggcagatgctctgtgccaagaaaaccaaacagctgcttcccttacaaatactcaagggcctgggcatgtgtgggggcctgagtccagcctgcacccgttaccaactgcaagatctcaggcaataggcttcaccccgtggggctcagtttcctcatctgtaaaacagtggtgattggattatggtgagaagtttgtagatgcaaatgcctaggacagtgcctggaacatcgaggccccaggtcagaagtggctgttcttacgagtctgcatgagtcttgtaccccatgactgcagtcatggggatgggggcccagcccctaggatggatgctcaggcctcagacctgtgttttgggaagggatgaagggaagggaagagcaatgtggggaattaccaaggggaaagggtgggattagcttatcccagcttcccactgtgccagtggggaaactgaggcccagaggggcccaggccttgaagtgattgcaagttcagcagcatgaaactgctctttatccgtgcactgctgtcaggaacaaatgctgaatggagagtccggagggttgcccaggccactgcaggacccaagctctgagactgagggcttggggacacagagccagagccttgtcctgaaatcctggagggtgctccttggacaggacaaaacttgtattctctctctgagcccagcctcagcagaacccagagtcttccagggctgagatcttgccgtaccagctgcggtcacagacctgccacactggcttgacctgggagttccttacagctgcagaacccctgtcccacctgacccgctgcatcaaaatctgcgtctcaccaggatgtacactttaatgtttgaggagcactgagactcagccaggatgatactctacctgcctgcaggtacaggccgctgctctatgggcagacctcaaccctcagccccagaatgtcctccccagctctgtcgcagacatacgtggctccctgggaggcatagaaagtacaagacttggacctggctccccatgaactggtggccctggaagttgctaccttttattgagcccctgccagctaccaagcacattatcccatttcgtcccacaacagcactgaaagtttgctgtttaatttagagtatcttgcagcttaggcacacaaagcacagagaggttaagtaaactgcccaaggtcacccagcatatacatatgcaggagctgggatatgaatccagagctgaccccggcaccagagtctagccatttacaatcagagtgggcatgggggcagatggtggctcctctcacccctgaaaccggagccccagcccctatgagccctcacagttcattggtctggctgtggtgaatctgacctctcaaaagcctccctttccggagcagaggcctgcgattctccatgctggagagcccgccaagagggattctcctacaactttccagaacacagcagttctggggccaggccaagctagctatgtacagctggaagaggctctctcccccagatgctgagtgactagaagccaagagggagggagttctggaatggtctgcagcagctggaggtgaggcctgagggggctggggcggggcctgggaagaggggccagtgcacagagtattctgaaccgcagaaagtattctgttcactctgggagaaaaacaagagtgttgttcaaaacagctggacgccaggcccagttgccctcgcctggtttttactcttaaacaccttcgcatttcatggctgttccaaagagagagaaatcagccagttgtccattcagacacaagacaaggcatcagccgacaaccaaaggcaaatattttccgtggtgaggaaagcctcccgggtggccccaggcctgcctctggagcagtggctggctggtggctggctctccccgaaggtcgctgcttctggtcagcagactgcgtgtctgggggactggccaggatccgcacccacccagggagcgctgggggcagcggggcggccatcctaggcccgtagtaaatggaagctcccttcctggcatgagagcagccaggcctccagggaggccaggacagcgtgggccccacagttccctgtcttgaaaccccagcccttgatatcaaaatgggacctgttagtctgttgtcggggagggggatttaactgcccaaagctcttaggccctgagtgaatttttttcagcacaacagtagctacacacagttgaagagtgtggcacatggctacatagggtttgtatttggtctacagatgaaggaacaagacccatgtggacttaggcctcattatcataattctgcagccccaggagccaaatccccacatggaaacccttagtaggtagcctggccaagtgggtagcgggaaatcagtgatggtaggccctgggacttctctctagtcccctccccaccctttttttttttttttttttttaatagacggagtctcgcccttgcccaggctggagtgcagtggcgcgatcttggctcactgcaggctccgccccccggggttcacgccattctcctgcctcagcctcctgcatagctgggactgcaggcacccgccacctcgcccggctaattttttgtatttttagtagagacggggtttcaccgtgttagccaggatggtctcgatctcctgacctcatgatccgcctgcctcggcctcccaaagtgctcggattacaggagtgagccactccacccaggcttttttttaagacaagagttttactcttgtccccaggctggagtgcaatggcgcaatcttggctcactgcaacctccgcctcccaggttcaagcaattctcatgcctcagcctcccgagtagctggaattacaggcgcatgctaccatgtcaagttaatttttatatttttagtagagacggggtttcaacatgtttgccaggctggtctcaaactcctgacttcaagtgatccacccaccttggcctcccaaagtgctaggattacaggcgtgaggcatcgcacccggccacccaccctttttttctcccaagaaaaccagttttctgaaattttcagggggaaccaggacctcctcgcccatgtctttcacccctgggtgcctgtatcctgtattcaccaaagccccacgggcatctccccgattgaggtcccacccctcagggcctaggacagggggaccagggagggcccccagaggctggagtttggaatacccccttctcttctctggagctcagtttgcatgtctgtgaaatgacaggtgatgtcacctcccagaagggcagtttgagagaagtaaaatctattgaggcaccttggacacaggagggggtcagacggcatcagcctttgagggtgctgcagttacacggctccagcagtctgagccttatcaagacctttccagatatgagggaagtccatgcccagtgtctagctggctgggggagaagccccttgagaacccccactctgtaatgctaggctctgcatttgcttaggaggctgtgtccctgtctctccccttctgggccagccttgctttctgggcaggcccaggagtgtcccgggcccagcactcagagtcagcgctgtctttaatctgtattccacaggcatcctcaccccctcccctcccaggagctaggaacctgccaggcttcttacctctctgctggaatctccaccccccaccagaggctgccctcttggggaaggggcccagcccttgaggcctgtctcctccagactagctaaaccacagagagaactccatctcaggttcccaaataggcggtattcttccccgccaccaagctaggcagctcctggcggctggaatgccctgctcctttctcagcccaccacttcctccaaccttccgtcctctgtgctgcagcagggagtcttaccccacctccttcaggagggaggtgctcacgggttcctatgcctgtgggtctccaggattgggcacggagcagtctgcaaaatgtcaagtgagggagagatccagtcaaagccccaggggggcctctgagctcagtcagctcctctgctgctccccacctcttgggggaaggacaggctggggtttgcatgggtggccttttggagagcagagtaatgggagcctacttgaacttcctgcggcctcattccctgactgggggcggagggtagtctgagctgctggcctggggtgcttggccgcaggggaaggggctgggagggaggggtctgggtgagtctaagggagggtgagcctgaaaaggggacggcagcactaaactgccttcggggagtccccactgtgcgcccctggcactttcccagtcccctggcgcggtcgcaggcacgggtggggtctgcctcaaagttgttggtacggccagcccgctgctgtttaaatggtgtgtttgtttagagcggcttagggagggaactggaaatggggggcgggggcagcgccccacttggcgccaccgctgccggagggtctgcgtgttagaagccccagcttcgtaaatgaccgaagaagggtgggcgttgaggagggaaggccgaaaaccaacggagggctcggggccccgggccggccgccccctttttgcggggggagagcaggagccgcctctcgcagccactctgcgcgcggggtgggagggagagagggaggcgaagggacgacagcgccgggctccccgcccccatcccacccggttccaatatttcgcagaaaggcacgcggctcctaatcggtcttttccaggctgagatttagccgtgcgatgcccgcgcaggggcgggggccgcgggccaggggaggcgctcagagtccggagccgccgagcgaggtgaggagcccgcgtcctcggctggtggagcgggcgggcgggcgcgcaaacccgagaggcagatatagaaaggggggcaggttaaaaataaccctctccggctgggaagctcgcgcgcgctctctcgcctcgttcggtgccagaggactccaggggaggtggcgttggggagggcagagcgggattccccctcctccgccgggcggggtgcccgcctgcgcgccgcggttgcacgtgtgcggggccgcgcgcccgggccccctctgcacccggtcggtgggtgccccctccccaggaccgggcgcatctggcagtggccccccgcccgcagccttgcgcggctggagggaagcgctccattattcattatttacgagcgttaataggtttgagccacgggggcggggggttgggggggcgacgaggacccagtggggaccgaagcattagaagaagggatagggagggagggggaagggcgggggcggggctgtgccgcggcctggaggaagaggtctcggcctggggcccggcgagccgggcgcacctctccgtcaggtttctccacaccgccggccgtcgaggctgctcagggcgccaagagggcagcacgggccttagattttgctctcggcctctgtccttcgcgtcctcgcccttaccgaggcgtggggagggagctgcggaggccgtacgccccgccctgcgcgccccttgccgccgccgcgtccccgcggcagccccggcctcatttatcatcatctttggtcaagtggagtgtgcaaggaacagctgcttcactcggctgacttcgagggcggctacgggagaatcagggagatgaatgatgggggctggtggcagccccccgcggtccccgcgcaggcgagagggaggcggggacgtccagggccgcctccgcctcatggcgagtgcagcgcccccttcctctctcctggcgcctgcagcgaccggggaccgggggaccggggcaccgaggaccgggcccgccccgggaggggactgggcgcggggacgggggggcgcccttcgccggcggagaactggcgggcgcgctgccggcagagcccgaggttgccgtgaccttgctggggtcagcgggctgggctgcggaggcggcggcgcggcgtctttggtgcgctttccggattggcgcagaggccgggaaacaaggcgggggcgggcgggggaacacaaatagaaggtgaaattttacctgcccctgagggagtcctgcggattttctccggcagcagcaggcgctctgcctttgtcttacacggctgaaacatctgttgcagaggggcggagaggccgcaacaacccccacacaccctgcgctgctccccgtccccctctgccccagccgggctgcaggactccaggcgccgcgttaaccctgctcgcgctggggcgcgcgcccgcactcgctgccgcagtccagcgcctcgcgtggggctcctcgcccccgccccggatctggtcctggccggggcgcccggtgacccccctccacctcgatggggtgctgaggtgtaggcggggggcgggggcggaaagggttaatggcctagtcgcagaccctaattgtcagagccggccccgcttcgtttcaattaccctaagtagagactgaatgcgcaattaacgaagtcagcttgccaactggaaagccggccccgctttcacgttgagcagaatactccaccagctgacttggacgaagcaatttcctcctctctctctccccttttttctctccttctctcttccaatccccctccctctttttctctctccttaataataaaattataccaagcagtttgcggtgtggcaggcggccagaaaagcgtttctttaaacgccgccgtctcacaattaggcagcaagaggatttgacacgccgtggcggcctgacaggcggcttcctcccctggggactggggggagggagggggtgccaattccccgctcccccaggtggaacggggactgggaggggctggcctgctgtgcctccccggctgtcagaatggctgcagcgagggggtgtcaaaggcagggaagcgaggggcggttccgcctaggctggggaaggcggaaggcagcggcacattccacgactcctctgggaagctggcgtatccaggagggagaccttgttcccctttctgtttgacagacaggcactctggggcatagagctgtagacggatctcagccctgctgggcgtcctgcacaagccactggcccactctgggcttcttccattaatccctcggcaaaatgagggggagatttgacctagaatgtgctctgcaaaaagtgtcttcccgtggctcgttgcccttaacagctggtcttgtaggccaggagagggggggtgtaggcagcaccacgtagaagcaagccggagacccctatgccgtttgggtggcagacccatgggcctcaaggcacacaggagggtggctcggcggggagccatgatgcaggcagctaatagatggggtgactttgcaggattgccagggattggtgccatgaggacagaggatactgaacactagctgcagcagccgggccacttgagctcggggaaggcccagagaatttggcagaggtgggaggtaactgcaggggtccccatttgctctttgcagccccccagtcccacccaggctgctgcttacatggggtgccttcatccttccccacatagttaagcccttcttccagccttccctgatcacctcctctccccacccccatgggcccctgggtgtcactacatctcaacaccaccagggcagttgtatgtgtgtctgcctgcctctggagagcaagggccatgtgctgtttcctgtgtgtctccggcacccagctcggcccacatccagactgtaagctgagcagaaatgtgctccacaggtgaaccagtgcaggcactaggggctctggaggagacagcacacactttgtctctccttcctgattggctgttgcatgcatcctggcctccaggcccctcatcctcaaacctgtctctgggtatcatccctttggtctgtgttgggggttaaatgcactcaacacagaacccagcaccccaatccatctcatctgtttatttatccaagtaatactgaagggacatcgactctggggccagtttctgggtttggagcttagggtcaaacagaggaagtctctgccctcctcaggctacgttctagtgagggaggcacatgtgaaacagctcattgtaccatcaattatgtaattaccgctgccatgagagccaccaaggagcctggcgggggacccaggagagttggggtggcgcctcgcccggtgtctggtgtggaatgccacagaggttctcaccgcctctggaagcctccagcctttccagtccccctcctctctgcacctcctttccaaggccgctgagtgcacctcctgcacgggtctgccctgcctcccccctgagcccagggcactcgcctttctgctctcctgcgttgctctgcttatctgtgctggtcccagagcttctgctgggcccgtgagcactgttcctcctgctctgggtgccatcgagcccatgcagatcccctttgcatcggttctgtcagcatttgaccccaggagcttgtgatcaaattcaggccacagacagtgtctcttgaattctcaagtatgaaagaaaaaactttgtacttggttgataatattttcttaaatgagagctgtccctttttgtaaaatcctgatttctgtctttttcaagggaaaagctcagaagctttggcaccctggcctcccactcccaagtggccgcagtccgctggtgctgagaggggctgctgctgcccctccccccccactttatttgggagcaggatcgccagtttgtctccatacccacctgcccacttccctgccaggcctcgggaagatgttctttgtcaaatgaagcaaagcagtggccacccctgatctcccgctgcctggcccacccacatgtgctctgtgtcgccactccactgctctttctggatattttcacagagttactgtgacattttgtgcattattgattcagtaaatatttattgttctggacaatggggagtagctgtgaacaaaacaggcagaaatccttgctctcatggaacttttgttctaaagaggagaccaataataaagcaagtcaagtttgattacaacaaggtcagtcgtgggggtgcaaggggtgctgtttcaaacagtggtcagggaaggcttattgagaaggtgacagaggtgacagaggagccaagacttggagccagggtagaagctgtgtagttatctgggagtggtatttccagaggtaaaaggcttgcccaaggtcacacagtcagccagcagtcagacaaacctgcagacacttgacacctctgtgtttccacttccccagggaagtaagtcatggaccctctgggcatgtggggtagggaggacaaggctggggccagacagtcctgtgccttcccttagcagccaggccaggagtggtggctcacgcctgtaatcccagcactttgggaggctgaggtgggcggatcacctgaggtcgggagctcgagaccagcctgaccaatatggagaaaccctgtctctactaaaaatacaaaattagctgggcgttgtggcacatgcctgtaatcccagctacccgggaggcggaggttgtggtgagcccagatcgcgccattacactctagcctaggcaacaggagggaaactctgtctcaaaaaaacaaacaaacaaacaaaaaaactagcagtcacacctagcctatctcatccttatcatgcagcctcctacaagggcaggcactcctggggcttggggtggggagaatggagctggctgggagcacctctgtgggtcccatctgacccctgtgccagggtctgggccagccccttggtcttgctaggcccaggactgattgtgtctgatggcatcagcctggcctcgtgggggaaggacaggggctgtgtcccccagcaggacccagacaactgcctgggccaccagacccttgccctgttaactgtctgcgacccagcaatcagcaccccccaccctttttcccttttcttcattttgacagagacacagagaggtggtgacgctttttgttcagtggtgaataaagtgatctaaaaaaaaaattattgtccacaagagactgatcagtacagaactgataataggtgagctcctcccggcagccttccctggggggcctaggaatgcctgcagctgctgtggaatcccatgttgctcccccacacctcacagtggaggtgggactgctggccatctgcccctcgtccctggactgtgggccctgcggcccaggtctcccggcctcttgatagctgtatcccaggaatcggcaccaaggatcggtggggtgggagtggagagcagggcacagctttagagttaggggacctgggcacctaggcagggggcctggctgtgcccatgaacagcaggtggggccaggccagcgggtgggcgtggttaggccctgcagggatcccattcagctggcttagcaggtctcagctgtccccacagctgggtccctggaggagatggtgttgggggctgtgaggggaggctcctcaaacatctggagagtccagatacctctgcactctgaagggcccagagcccccagccacaccagggctcccccaacctcaactgagcctggctagggctgcccttctgcttctcaccccatcactggcatcctgatatttgggacccccagaccctatagagagggtatgttggtcaccccgtgggattcttccttgagcatgggggggccatgaatgaggagggatgcatatccaagcgttgcccacagggagtggtctggaggggctgcctggtcctctggggttcctgatgtcctaggagggtcctccatctgcccgaagcaggcctctcagcccgtggaccctaacctgtcccagaagcctatgggcacccaacctcttgtcttgtgggctccttggaaactcgcccccttcctcccattcaagccaggcccctaggatatggaattgagcccatacgatagcagtgaatctggcgaacgatttctcattttcaccaagtctcctgtattgattattcatcacccacaacagatggggaggcctgaggagttccaccttctccacccctgcctggactcctcctctgccctgtcctcagcttctggagccctggtacactgctccttcattctcaggttcccaggccttgagtgggttgggtttttaaatttttttcttgcagctacaaatcatgaaaacaggtcataaaaccaccttgggtaagtaggtgggatggaaccagtggcctcagagctgctgctggggatcaggaagcccccagtccgtttctttctccctctctccctgcctcccctcagcctccctctctccctttctcttaggaaaaaattccagccaccacctcccagctgggctccctcaggagccacagcagctctggcctacactgtgcccatttcgctgactggggcctcaagcctggggtctgaggaggctttaggcctagtgacctctccctgaggctgcccaggggacagtagttgccttggtgacagtgggtggctggtgaccatcactgcccattagtggacccacccgaggtgggtctggctgcttaaagatgaggacagaataaaaaagtgaggaccctggcctgaggctcaggctgtcacaggctgcagctcagccccttgccccacagcagctttggcttgcatcctgctccaagagactgttcctccaaagtgggagcccctcacgggggctcaggacaggggtgtccacccgtggtccagtcactgccgctgctgctgagggcgtcctgcataggagcttccctgcgggtgggctctgctctggggtcctaagcagggcacttgtcctgaacctcacttttttctgtaaagggggaggagagattaatcaaaccgttgttcaagaaagccgcacagagtaggtgttctgcagccgccttgctcccgcctcagcagtcctatagatttctggagggaaagggctgaggtctttgcctaaaagaagggctgtgccccaggtgtgtgccacactgccgaaggcctgtgagagccgctggccttgcaccgtagggtagctggggtttcgttgtgcccccactatgttcatggcttggagtgaggacacccattgctgtgtcaaggggaatcctgatgccctgggtgctatgtgattccagctcatgctccctgctgtgcctggcctgcctcctctgtccagcgctgagaagactaagttccaggatctgattctaagggtgaagtgttcatgtatctggtgcttagaggatgcactagactccgctcctcctgccttctagtttcagcaagaactttggagataaggcctggaccaagtgtctgagaggagaggcaggttggggagaaacggatggatgggaatgagtggggaccgtccgggcagtgtggttgagctggaccatgaggagtgagcccagtgggtggggggtgccctcccttgtcccctctcaccaccccttctccctccagcccaagccacaggccaaacccacaatctgcctgctaggccacttcttccctgcccccaggttcaaaggtcaccatcgttctgccggggccagggaggggggtgctctttctgccccctcctctcctgaggcctgcccagcccaacccaacccagcccagccctgctgcctgcctcgccttctgtgtcctgtcctagtgctcttgaaaagtaatcataatcataataattaataacaacagagcccatagcaggcctgaggcagcccttaaagaggcagtgcccccttttctcccagcagagctggcagtgggacctggctggcactgagaggcggcctgtgcctttgttcccatccctccctttgccttgggttccagggtggtgttggggcgagcatttttgcctgcattctccatcagcactgggcttctcgtgttttaattgaactgtcttttcttagcaatagatgctttcaccgcatccagctgctcgtgtgtattgggaaacctgcctgtaatacagctcggctaaattaaaagacacagcagctggaccaattaaacagggagggaggaatgcagacggacaggcagggagggggtactggtaatagcaccccctcactgtctctgtctctctttaaataatgtttctggtaatgcattttggagaatgtgaaaaaaaataaaaaataaagccgtagaaatgttaatgatatccacaggacactcagcaggaaatgagagtgatctgggactaataaaagccgaaatgtaatttgtgcagatatacgaggcgcagccttcagagtggtcctgggtttgcacattctgggctcataaacatgcgcctggggagggcagggagcgggcgctgtgccctcggcctgggcacaggcccgcctgggctgccctgtggcagtctggccagggcaggagcgtgaggctgcccacctggcagggagctgccagaccagaaccaagtgccgtccccagctcctctgggttggcgcgtcgcagcaggaacctcctgtaatgttttatccaagctgccaggggtaggattgaagtgggtcagaagggtgggcacgctgcttgttagggatgcctgcgacaaatccagggagaggagctggagcagagggaaagcggctttgataagccggtgggcaggggctcgcctcgtgggaaagtggccggcccccacactgggctgactctcctgcatttgtgggccagggcaagctgactccagagagcaggagaggtggtcccaggactgggctgacgggcttctgggggccatctggctgccctgggcttgccctgctctcaggcagatggaggccctctgtcgccttccctgcatccatccccagacactaaatgaggaaggcacttgtggtggggtccgggccaaggaagaagggtaaatggagcagcacccccagctctcccccactccccacctttctgcctcttccctgtgcccctccccgactctgcgtgcctctccctctctgtgcccctctccccctctctttgtcccttcctgaccccttcaacaacctggaatctttgtagcctgaggcaagccaccccttccttttggagcatttgggaaccagcactggaaagtcccctatcccctcctgggggcctgggccacacaggccgagctgagcccctttcttcctgcctccgggccagcatggttctgggtaaatcccaaaccctctgggactcggccaatggccagcccctccatgcacttcctccaaaacctggggcattcctctttcttccatccctctttgaggggtcttctggttggccaggccagcgagtcagctggaggaacctttaccctggatgctgggctgtcagatgctctgctctgagaggctcccgcaacccaccctgggtcctttcctgacccaggattctgctctgcaggcaggggcaggttagacccctgcctgagccccatcccctaaaatcataaccagatgggctcttgagtgttgcctgccccagccctcacctgctgaggtggggaggaactggccaggaggggacagggctgtgtcgccccatgtgggtggggctgggctgtgcccttccgtggccgtggccctgggactgcatctctactcccattagtatgcactccctcactctgggccacgtaatctgtttatgcacgtatgatatcaaaaacaggaggcaggtgctgccgtcttgcgttcctgggagtcagaggaggggacattttatgtctacagtggcttggcagcccctaatcgatgtctgctagaaggaacagacagattccagatggcgtggcagtgatagaggaggtgtgtgtgtgcatgcgtgtgtgtgtgtgtgcgcgcgtgtgtgtgtgagcatacatatgcttgtgtgcacgcatgtgcgtggggacaggggcagaccctcctcagtccccagcatggctgggtcatgcttgaacacggtcgcgaagggactaaattacaggatccagcaggccccaggggatgagggagcgggaattgctctgctaaatgcttttgagctgtcaggaagggctgggagtgatgggtgggggacattggggaggagctggcaatgggcggggggggggcgggtagctccccagtgacctggcgctgggcagccggttttgcctcccgcatcagtggccgtccttggcaagactcagctgcaggcgatgtgggagcgggaattacagagcacacctccctgacacagaagttgtcaatatgcgcacagctggtggggaggctcaggcgaaggggggactattaagagctgcgcgggggagcaggcagggtggggaggtgggtgggagggtgctttctgaggcaaaaggaagtggcccgtctgaatcgctcatcctctgccccctccctgcccatcctcccctccctccttccctccctccctcccttcctttttcttttcacagataaccagcccgagtcatgcagtcttttcgagaaaggtgtggtttccatggcaaacaacagaactaccagcagacctcgcaggaaacatcacgcctagagaattacaggcagccgagtcaggccgggctaagctgcgaccggcagcggctgctcgccaaggactattataacccgcagccttacccgagctatgagggtggcgctggcacgccctctggcactgcagccgcggtggccgccgacaagtaccaccgaggcagcaaggccctgcccacacagcaaggcctgcaggggaggccggctttccctggctacggcgtccaggacagcagcccctacccaggccgctatgctggtgaggagagccttcaggcttggggggccccacagccaccacccccacagccgcagccactacctgcaggggtggccaagtatgatgagaacttgatgaaaaagacagcagtgccccccagcaggcagtatgcagagcagggcgcccaggtgccctttcggactcactccctgcacgtccagcagccaccgccgccccagcagcccctggcataccccaagctccaaaggcagaagctgcagaacgacattgcctcccctctgcccttcccccagggtacccactttcctcagcattcccagtccttccccacctcctccacctactcctcctctgtccagggtggtgggcagggggcccactcctataagagttgcacagcaccgactgcccagccccatgacaggccgctgactgccagctccagcctggccccggggcagcgggtccagaatcttcatgcctaccagtcgggccgcctcagctatgaccagcagcagcagcagcagcagcagcagcagcagcagcagcaagcccttcagagccggcaccatgcccaggaaaccctccattaccaaaacctcgccaagtatcagcactacgggcagcaaggccagggctactgccagccggacgcagccgtccggaccccagagcagtactaccagaccttcagccccagctccagccactcacccgcccgctccgtgggccgctcaccttcctacagttccacaccgtcgccgctgatgccaaacctggagaactttccctacagccagcagccgctcagcaccggggccttccccgcagggatcactgaccacagccacttcatgcccctgctcaatccctccccaacggatgccaccagctctgtggacacccaggctggcaactgcaagccccttcagaaggacaagctccctgagaacctgctgtcggatctcagcctgcagagcctcacggcgctgacctcacaggtggagaacatctccaacaccgtccagcagctgctgctctccaaggctgctgtgccgcagaagaaaggtgtcaagaacctcgtgtccaggaccccagagcagcataaaagccagcactgcagccccgaagggagcggctactcagccgagcccgcaggcacaccgctgtcagagccgccgagcagcacgccacagtccacgcatgcggagccgcaggaggccgactacctgagcggctccgaggacccactggagcgcagcttcctctactgcaaccaggcccgtggcagccctgccagggtcaacagcaactcgaaggccaagcccgagtccgtgtccacctgttctgtgacctctcctgacgacatgtccaccaaatctgacgactccttccagagcctacacggcagtctgccgctcgacagcttctccaagttcgtggcgggtgagcgggactgtccgcggctgctgctcagcgccctggcacaggaggacctggcctccgagatcctggggctgcaggaagccatcggtgagaaggccgacaaagcttgggctgaagcacccagcctggtcaaggacagcagcaagccacccttctcgctggagaaccacagcgcctgcctggactctgtggccaagagtgcgtggccccggcctggggagccggaggccctgcccgactccttgcagctggacaagggcggcaatgccaaggacttcagcccagggctgtttgaagacccttccgtggccttcgctacgcctgaccccaaaaagacaactggtcctctctcctttggtaccaagcccacccttggggttcctgctccagaccccactacagcagcttttgactgtttcccggacacaaccgctgccagctcagcggacagcgccaacccctttgcctggccagaggaaaacctgggggatgcttgtcccaggtggggattgcaccctggcgagcttaccaagggcctggagcagggtgggaaggcctcagatggcatcagcaaaggggacacccatgaggcttcggcctgcctgggcttccaggaggaggacccccctggggagaaggtggcctcgttgcccggggacttcaagcaggaggaggtgggtggggtgaaggaggaggcaggtgggctgctgcagtgccccgaggtggccaaggctgaccggtggctggaggacagccggcactgctgttccaccgccgacttcggggacctcccactgctgccacccaccagcaggaaggaggacctggaagctgaggaggagtactcctccctatgtgagctcctgggcagccccgagcagaggcctggcatgcaggacccgctgtcacccaaggccccactcatctgcaccaaggaggaggtggaggaggtgctggactccaaggccggctggggctctccgtgccacctctcaggggagtccgtcatcctgctgggccctacagtgggcaccgagtcaaaggtccagagctggtttgagtcctctctgtcacacatgaagccaggtgaagaggggcctgatggggagcgagctccaggggattccaccacctcggacgcctctctggcccagaagcccaacaagcctgctgtgcccgaggcgcccatcgcaaagaaagagcctgtgccacggggcaaaagcttacggagccgtcgggtgcaccgggggctgcccgaggccgaggactccccatgcagggcaccagtgctgcccaaagacctcttgctccctgaatcctgcacagggcccccccagggacagatggaaggggctggagccccaggccggggggcctcggaagggctccccaggatgtgtactcgttctctcacggccctgagtgagccccgcacgcccggacccccaggcctgaccaccacccctgcacccccagacaaactggggggcaagcagcgagccgccttcaagtcgggcaagcgggtggggaagccctcacccaaggctgcctccagccccagcaacccggccgccctgcctgtggcctccgacagcagcccgatgggctccaagaccaaggagacagactcacccagcacgcctggcaaggaccagcgctccatgatccttcggtcacgcaccaaaacccaggagatcttccactccaagcggcggaggccctctgagggccggctccccaactgccgtgccaccaagaagctcctcgacaacagccacttgcccgccacattcaaggtctccagcagcccccagaaggagggcagggtgagccagcgggcaagggtccccaaacctggtgcaggcagcaagctctctgaccggcccctccatgcgctcaaaaggaagtcggccttcatggcgccggtccccaccaagaagcggaacctggtcttgcggagccgcagcagcagcagcagcaacgccagtggcaatgggggagatgggaaggaggagaggcctgagggttcccccaccctcttcaagaggatgtcttctcccaagaaagccaagcccaccaagggcaatggcgagcctgccacaaagctcccacccccggagacccccgatgcctgcctcaagctcgcctctcgggcagccttccagggggccatgaagaccaaggtgctgccaccccggaagggccggggcctgaagctggaagccatcgtgcagaagatcacctcgcccagcctcaagaagttcgcatgtaaagcgccaggggcctctcctggtaatcctctgagcccatccctttccgacaaagaccgtgggctcaagggtgctgggggcagcccagtgggggtggaagaaggcctggtaaatgtgggcaccgggcagaagctcccaacttctggggctgatccgttatgcagaaatccaaccaacagatccttaaaaggcaaactcatgaacagtaagaaactgtcttctactgactgtttcaaaaccgaggccttcacatccccggaggccctgcagcctggggggactgccctggcgcctaagaagaggagccggaaaggccgggcaggggcccatggactctccaaaggcccgctggagaagcggccctatcttggcccggctctgctcctgactccccgagacagggccagtggcacacaaggggccagtgaggacaactctggtggaggaggcaagaagccaaagatggaggagctgggcctggcctcccagcccccggagggcaggccctgccagccccagacaagggcacagaaacagccaggccacaccaactacagcagctattccaagcggaagcgcctcactcggggccgggccaagaacaccacctcttcaccctgtaaggggcgtgccaagcgacgacgacagcagcaggtgctgcccctggatcccgcagagcctgaaatccgcctcaagtacatttcctcttgcaagcggctgaggtcagacagccggacccccgccttctcacccttcgtgcgggtggagaagcgagacgcgttcaccaccatatgcactgttgtcaactcccctggagatgcgcccaagccccacaggaagccttcctcctctgcctcctcttcctcatcctcgtcctcgttctccttggatgcagccggggcctccctggccacactccctggaggctccatcctgcagccgcggccctccttgcccctctcctccacgatgcacttggggcctgtggtttccaaggccctgagtacctcttgccttgtttgctgcctctgccaaaacccggccaacttcaaggaccttggggacctctgtgggccctactaccctgaacactgcctccccaaaaagaagccaaaactcaaggagaaggtgcggccagaaggcacctgtgaggaggcctcgctgccgcttgagagaacactcaaaggtcccgagtgtgcagctgccgccactgccgggaagccccccaggcctgacggcccagctgacccggccaagcagggcccactgcgcaccagtgcccggggcctgtcccggaggctgcagagctgctactgctgtgatggccgggaggatgggggcgaggaggcagccccagccgacaagggtcgcaaacatgagtgcagcaaggaggctccggcagagcccggcggggaggcccaggagcactgggtgcatgaggcctgtgccgtgtggaccggcggcgtctacctggtggccgggaagctctttgggctgcaggaggccatgaaggtggccgtggacatggtaagaggccagcccagccagggtggggagtgtggggttccaaaggacaggcaggcaggcagtcggggagccccttgtttctagtgctacagtgtgggccaaatgtgtctgcagtctcgggacaatctgcagagtcctgagcctctctggggtgtgtgggggaagtggaggcacccatctggctaaggcaggtcacactcacctaccctgtcccaggagacttcccgccggggcccgtatgcccagccaccgccactctcccactcacctggcatcttcaggctccagccccacccagaatccactgggcccctccccatgctgtcaccggagatgccaaggcccagagaacacgaggactcccaagattgaacatcagggctgccccgggcggtgcaagagcaagttgcccaccctctgttcctgtctccattgcctctgggatgaagctaagggctcaggaagaccctctctggcgacacaggcttggtgcatggacccagtcacagggttcctccctctgcaggacagtccatggggtcacacagtcacaacaggcagggcggggcagatccagaccctctcaccattggctctgagaccagctttggaagccatagtcactgagcaccaacatgagagagggaactctggggctgtgccgccatgcacctttggggctgtgacctgccctctctgtgcctccgtcccctcgcccctaacgtgggtatgagggtgcccatggaggaggggtcgggagggttaaaaggtgggcacctctgagcccaccgagcacagcagccctgtgatagtcagtgcagaggggcctggtggctctggtgacagcagggtgacgttcttcgtggtgtcaccacttccccagtaccatagagtacctctgtgcccttctgagggaggggtcagtgggggcggtggggtgcacctctcccccggggccatgcttctgcccccacattcaaccccgactccactgcctcatccagacttccgtggagtgacgctcccggctctcagcgctgtgtggtggctctcagtggggacgcctgcagccttctctggcccctgccctgagtcccatcccctccactccttccttcaacccactatgtgcggctgaggtcacaggggagccagaggggcttggcaggggtctccagaggccctggacaaacactgcctgcatctgagtgattcagtgacccagcacagtggccccagccggtggcttcgcccctccccctgcccagcctcctcccccgtcgctgcactgcccacctgctcctcgcagtacacccctgcagcccctctgagcagcccctgctcctgacagttgccgtggcattgcctggccaaaccaaggtcccggtgggggcccactgtgtttgccacccacgcctcctagtgtgtgtcttgggcacctgcttcccactgcccatggggatggctggagaccttctccacgcccagacgccctgcccacctcactccaccctccacctcagaggaaggctggccccgacaggactcctgcaggttcctggtgccgcgggccttgcttacccagcagatggtggccttgggcctcttccctctccccttcccagttagtgattttttgcctctctcctgctttctgtctctctctgtctctctctctctctctctctctctctctctctctctctctctctctcattactggctccttcccagcgccttgaaacaggttcaagtctctcccgtcatcaaaaaataataaccctcagatcaccagccccagctggctgccacctcccctgcttcacagccccattcctgaaagccttgtccccacggcatcctcggtcccgcagcctcaccaggggctccccgacactcacgtcccaccaggctgagatcaggtcgtctccacatcccctgcagccagcactggccggccgaagggaggaggggtcagccccgagcaccgaccaccccatcctgtccctggcccatgggtgtcttaaccgcccatgcacacacaaggtcctgctggactgaggagacagtgtgtgttggagaggcgctagcttccctacaccacgcgggggctggaacttgccagcccagcccatgcctgtctgctgtgccatgctccagaaatggcctgacagcctgcgcaactagggctgccccgggaaggtcggaaccaggaacaccctgccagacagatgggacatcctgggagaatgggcagagtctggggcttcccagggtcacttttggctcaccaccccttcctgcctcagtggcttgggggcgccatgctccttggagtgagaccctggttcaaatcccagctctgccgagggctggttccatagctccaggcgagtcacgcatgctctgagaactccacaatgtcaaaccccgttagcaggattgtggggttctgtggatcatgtgggacctgcctggcatgtggaaggggcttggggtgcagctgtgtccctggccccagcactgccacacccctcggtaccttgacctcacttttgcgctctggagggcagaacctctgagccagctctcagggataccttttttcctcgatggccttttctgggaactgccctcgcctgctatctctgagccctgcctgcccttcccccaaagccatcatagacccctacctcctatccagatggagcctggccatggaatgcttggggtgagagggacccatagcgggctccgggcattgttagggggctaggtggtgtctgcagaggccccacctgtggcagggtttacatgccgccacccctgccctcctcttgggtagctggggtcagaagggcctgaggcctcactctctctgcatcttagtttcttcacatctaaaatgctattcatatgcctgcctgagggtggttggggcctccgtgcagtaagtggagagaagccttcagccagaggacccccatatgcttaaacatccagacaccaagggccactcacagacagcagccggcttgtgtttcgtcatcccttttgggtcaggaactggggacgctggactccagatctccaggaggccatcccagactaggcgggaaggaggcctcagccctgagctgaaaacctgaaattctagaataaaccccaggccccactcccagcatgggcagcggggaggggagtgttctgacatttctcagctgctgtggttgggatggtgcgcccaccctgagcatgtggggtcctgtgggcccctactccagcctggaggcagctgcaggggtcagagaccagcctggagccctcgggcaggttactcagcctcagctctcattggtaacccaggtaaaataacagtaatcccatcataaggttgctgtgggcatgaggcttccagccatgcctggcacataggaagctattgtcgtttgtttcactggcttcgcacttgggcagaggccgccgccctctctgctgccttctctacctcaccccccgcccccagcacggtggcactgtggctctggcgcctggtgacttctccctccccggcctcaggtttgcttcactcttccaagggccttcttggtgtgactgtcctgtcctggccacgtccactccaagcagctggtccaggtgtggggcagcccccaagctcagcagaggacagttttgagacttagaggaggacggcatcagatttacatgaagtcagccatctcaagggattaccacgtcaccgcctcctctcacaggtctgagagctggtcccctggagggtgcaggtctcatcctaggtagaacagtcccagcctagcttcaaagtgctcctgctgccagaaagggtagaaaaccatgctgaatgccttcactgttgcctggaatgggagcctcagtttcaccatctgtaaagtgagattaatgaaagggacccacagagggctgttagagccagtaggcggccaggcgcggtggctcacgcctgtaatcccagcactttgggaggctgaggtgggcggatcacgaggtcaggagatcgagaccatcctggctaacacggagaaaccccgtctctactaaaaatacaaaaaattagcctggcgtggtggcgggcacctgtagtcccagctactggggaggctgaggcaggagaatggcgtgaacccgggaggcggagcttgcagtgagccaagattgtgccactgctctctagcctgggcaacagagcaagactccatctcaaaagcaaaagaaaaaagagccagtaggccaggcgctatgtcttacacctgtaatcccagcactttgggaggcctaggcaggcagatcacctgaggtcgggagttcgagaccagcctggccgacacagtgaaactccgtctctactaaaaatacaaaaattagctgggcatggcagcacatgcctgtaatcccagctactcgggaggctaaggcaggagaatcacttgaacacaggaggcagcggttgccgtgagcggagatcacaccattgcactccagccccggggggacagagtgaaattctgtctcaaaaaaaaaaaaaaaaaaaaaaagcaagccagtgggcaaggacacacaccacgcccagcacaccagaagcatgcagcagatgctggctggtagccacagccatggtagtaactggcatcactggcccaagggggtctccctacccaatgtaccagcccagagggtgctaaatgacccatgtttgtgggcatgtgtaccccagtgctgaacctccttctggtagattttcaagcaccattttggagaagggaggcagggaccacagggggccagccagcctgtacaggttttttgtgttttttttgtttgtttgtttgtttgttttttgaggcagggtctcactcttgcccaggctggagtacaggcagtggcgtcatctcggctcactgcagcctcaacctcccaggctgcagcaatcctcccacctcaccttcctgagtagctgggactacaggcacacaccaccaaccctcactattttttgtagagacagtttcaccatgttgcccaggctggtatcaaactcctggactcaggcgatcctcccaccttggcctcccagagtgctgggattacaggcatgagccactgcacctggcctaccagcctgtaaagcttgagggctgggctccaactggagactcacctgcctttcctttctcttcatcagatgtgttccagctgccaagaagccggggccaccattgggtgctgccacaaaggatgcctccacacctaccactacccgtgtgccagcgatgcaggtacgagcccgcccaggaacaggagggcattggagcccatccaagcagtccagggggaccctccctgggcacagctccccaaacccaggccccatctcactcttcagtttccctcctctcttgccccagcaattcttttatccttctgtctgcctagacctctgctgggcaatgccagggacatggaaatgaggcattccccaggcacctgcttgaggagtgcccagagcagtgagggaagatagaagcataaattacaatgtggaatgctgtctgcggagccatcattgccaaggggcagggaggatctcaggcctcagagagaaaggggtattggaggttgggcctttgaaggataaataggagttcactcagcagagacaaggggaaaggcactactacaacagcaaaaaccaactgagttgggggtgatgaggttcaaaacagactgagacccatggagcaattgtggaagttttgaagcagggtaatggggtatggaggtaggcccaggctccccgcatcctctccccggtccttcctctcactcatgtattcatttgttccgcaagcatttgttgagcccctaccatcactgggcacacagaatgaccgtgcatgggctggagccacccaagagcccttacctttatcgaccaggtggggaaactgaggctcagagacattccttatttcatccagagaaagcaattgcttatggtacaatattagtcattggggacaacaatattttgggagatatggggccaactttggcctggattcaaaccctagtggtggggggtggggtggttttcgttcttgtttgagacagagttttgctctgtcacccaagctagagtgcaggggtgcagtcgtggctcactgcagccttaacctcctgggctcaatcatcctcccacctcagcctcctgagcagctgagaccacagatgtgcgcagccatgctggctcctagtagtgtttttatttttatttatttatttatttatttatttatttatttatttttgagacggagtctcactctgtcaccaggctggagtgcagtggtgcgatcttggctcactgcaacctccgcctcccgagttcaagcgattctcctgcctcagcctctcaagtagctgggactacaggcgtgcaccaccacgctcagctaatttttgtattttttgtagagatggggtttcactgctttggacaggatggtctccatctcttgacctcgtgatccgcccgcctcagctgcctaaagtgctgggattacaggcgtgagccactgtgcccggcccctagtagcgtttttaatgtgtggtcttgagcaagttggttgatacctctgcacacagtttccctacctgtatgatggagatgataatagccccttctctgcagagctgctgggaggagagtgaaataatgaacactacccacacggtgctgcctcagtcctattttgggtccagcctctgtgacctctccccacacggtgctgcctcagtcctattttgggtccagcctctgtgacctctccccgtcaccctcaatccctcccaactctggcctggaaagaggcgaagtcataacccacctcccagtggacagagtccaggcccccccaggctcccgtcgctctcctagcagccccagctactgcctcccgtcctcacctgatgccctgctggctttgcctggacaggggaccacagcctgtaccccacctgcctggtgggtccccagccagtgtcagcccagccaagctgccccagggaggacacagaggactctgagtgctgacagttgcttggcaggggctgagctgccgggacccagcggggaaggggcttgctggagcagggacgtggaggattctcactggcttcacgctcccactctgagcagtgtgagccagagtttaacatggaccctgccacttgcccaggcatgtggccgcactccccataatagctgccacgagtcacattcctccttccacagtgattaacttagcgcccgctccactcccagccctgctacagaaccatgttgtttccagccatcttcacagattggctgcctcacccacagcacacagcatggcgtggacagtcccaggacttaatgccttggctttcttgctccatgtcctatgttctttctcctaccccagcactgcccagccccccaaggggctcacccttgagtgggacggacagcaaaactgtggttcttggccacagttagggagaccagacgggaaggagagagtatgcactgtggaagaggttcatcctgtctgaacaagggagaaatctaggaagacttccaggaggaggtgacatttaagccaggcctcaaaagatcgggggagctttgtagcaactgtttagtggtgggacttgtatactaggctttgagcaagagaacttttatttcagataaaatcctagaaggattcctcatataacagggatccctgtagcaccgtgaagattgaggcaggaaagggactgggaatgctgcaaatggagacatacacctcagagactgagttggcacagaatccatgggacttgatgatgagggagagggaggtgacaagcctgatgcccagcttccccatgaaggggagaagtagggtgtggacgtgcaaatggagtattagctgctgctgcagagctactggcccttccaggcccagcttcatgtctccagcaccagcccttcattagttctcaaaagggcgtgagttggctgcaggctctgctgggagcaggatgatctagggtggccccagctgtgccagcttgtctttgctccatcaatctctcatcctccagcaggctggcctgggtgcgtcctcatggcagccccagggctttgagagagtggaggtcacagggccactcacagcctaggtcctggactttaccacgttctgttagccaaagcaggtcccaagtccagcacagagaagtgcaggccacctggggtgagctgcagagccacaccacaaaggacctgggtgcggggaggggactgggctgctctgccaggccatctacacacacggcagttccctttggccacacggcagtagaggcagctgtggacatacaaagtgtagatagctgggctcaggatcgagtctcgcccaccatcagcaggcgagggctcatcagagccctggaagggacaaaatagcagggttgtgttcaccatggaacagctggctgaggaggagggtggacccctgggaaactgaggaacagctgccagagaaggcgagggagaacaagtgagctcgagagtgaaggcggggaggacgggcgcttggggtgcagggagggcccccagcgtgactctgccagccaggcggtggggggggcgggggggtgggagtgagagggcactgagggagtgggctggtcaggctgatctgatgtctggccagggaggagccccaggcctctgtgtcaggcactgggactgcagggcaccagggctgcccactggctgccagcctctgccctgcactgcgctgtcctggcctactcatcctgcccccttccaattcttgttaaggaacccactttggagacaagcagtgactgaagagcaggcagaggctgctacaccacagtgtcctgtctcaacctttccccactcaggccctggggccaacctgtcagtgagtgcccaggttccccaggtgcaggcaccaggtcaggagccagatcactgaggactggccttgcccagtgactcccgccccgtgccccatgtggggtggtgctggggcagtgctgagggagccagtttggaagtggcgacctcctaccctcaacttcccttggtgggagtgcccgcagctacccaggcgtgccaggggcaggcctgggattttagcctagtgtctttggaatatctagttcagccccagaaccacatctggcttgcctgagccaagggaaggggaacagccgtggcacatctctagctgctggccctgaatggcagtttccaggtccgtggcactccagcttctggagacaagggcagatcgcctcagagaggcctgctaccacccagccctgccctcagggctgcagagctgtccctgccctgccttctggccaccaccctgtcatgatgccattgcacagagccacctccagtgtgaacaggaagattgtgttggagagagcaccagcctccagctacttttgggtctggggtttgttcagaacagtggctggtgaggctttgggggaggggagccgagaaggggactagagactggggggtccctgggggaaaagccagcttctccctaggtggcagtaggcaggggagtggagactccctgagatagcaacacctcctgggcctaggtgggcataagcactggccatgcttggttgtcctctctgcccctgcctcctgcgcccactgcatgccacacatgtgcagggtggtttatttttaaattttattttattttatattttattttattattttattttattttattttattttattattttattttattttattttattttattttattttattttatttcatctcagacagggcctggctgtgttgcccaggcaggggtgcagtggtacaatcacagctcactgcaacctccgcctcccaggctcaagtgatcctcccgccccagcctctcgagtagctgggactacaggcatgcgccaccatgctggctaatttttgtatttttgatagagatgaggttttgccatgttgcccaggctggtcttgaactcctgggctcaagcgattcattcacctcatcctcccaaagtgctgggattacagacatgagccactgctgctgccaagatggtttctatacactcccatcctcaatctccatgataggcatacagtaggtggcataatgcccattttacagatgtggagactgaggctcagagaagtagcagatgctcaaatccaggcttgcaacaccactaccagtccgtccacaggggttcatgacatgctcactggaagttagtgagctcttccaggggctgggcatacatccagggaagaagacagagctggtgccctctgggagcttgcctgccagtggggaagaaacaaggagcaagacaagatcacacaggccagtctcttaggaggcagtgacaagtgtggctggcagagtaaggcgggagggagggagggactgagggactgcctcaagtgaggaggggcggcacgtggaactcagggggaaaagctctccgcggaggaggtgaggtgagtcaagactgccaggccaggggccgcacccgcgccgtggagtggagtggagtgtggagggttttgtgcagaatctgattaactctttgaaaagagcccctgcagtctggagcctcgcgggcagtgcggctcccctcctggctgcagacaaaaccccacagctgtggggcccccaccctgtcctaaccaccgaaacttctctttggtcacaggttgcatattcatcgaagagaacttttctttgaaatgtcccaaacataaggtaggggaccacagtgttttgtagggcgaggggtgtcaagcgggagaggagccccacctcgcacctccttcacagtcccctgggcccccttggctgcgcagccccgcagggcccagccctaggggagggagctctccccgcccacccccaggagcccccgccgccgtccagctcaggtccctgtccacttgcgcgccgccgccgccgaaaacccgcaggcgtcggggcatgggcagccaggggctggagggcgtccctgggacggcctccctgcagctccccaagataggtgacagagtggggcaggcgggggcgcgggacggtggcacggagctgaaggcgaaggtgaaggtgaagctggacggggtggggccagaaggggtggtgccgacggcctcgggcggagaccccagccgcgctctggggtcgcctgggtctggggcttaggcggggggcccacactgggggcggggcctatggactgtgaagtccgaggtcgtcggtaactggcgggcgggcgtcttttgcagaggctgccgtagtaatccaccccaacggccggaggagccgccggagcccgcctgcccgcccgccgccgaaggagaggagccgcctgcgcagcccccgggcctttgagctgctcccagcgctggtccagagccgatccttgatccgggtcccggatcgtggatccggccgcctagggctcagacttgcggccccgggttgggaggaaaacccgttccggagccgcctgctcccggaaccggacggcacagggcgttcttgcccaccccaggggccaggcttgcggagggggagcccgcggagcggccagactccccggggcgctcagcctccggcgagggtgggagacggctttgtcctggggacactttccctctggaatctcaagacgacgtggcacacattccacgtgggtgctgccgccaccccagtcggtcgtggcgtgcagctgggagccctgggcttgggggtgggggtcgaaacagtactggaagaggcggagggcggctcctagctccgtggactaggcgggggagaaaggaagcctttctgagagcgggctaggccggcactggagaggccggagcctttggaacaaaccgtgcggaacgcgtccaggggccttcccgcccagcctttgccagatctctcgtgcggttcgggcaaagccggggtagacctgggctatgctcagttaggggttgcgggatccccgagtgtgggcgggactgggacaccctttggcctctgtttgtcccctttccagtcctccaccccacccctggagcccagcctgggagcgcaaaacccaagaagcggccagaacgcacctccggctccggcggacgcgcgaccgttgtgcaccaccagggaccgccgcgcctactctgcacgggagcagggacagcgctagatttcgtgtacaaaacctgtgtacccctctatatatatgttacatagaatgtatatatgttgggaacatgctcgcttctcccgtgtgtcgccgccgtgcgtcgtgcgcccgcaacagagccccaaccgggcctttgccgggtaaggggctaccgcgacgccacttgtccacgcagccaccaccggcccgggccagtccctgccagtccgtccgcctgtccgtccgtgtcctcagctctgtccacgcttcgataggcctgacgcagcccccagcccagggccgccctagcaacttcctgtacatatgactgtaaaatggtaaacgtgtgtattatatctggcctcgttatatagtgtatatatatgtatacatatacatatatataatatatatgaagactgtaaatgttaagacgactagtgttcttattagtatattgcttcacactgaagattgtgtgtatcgagctgtttctaaaagatgtttattttccttaagagtaaaaaacagtcattgcattcagaaaaaaaaaaaaaaaaaagtcaataaagatacaacgattgttttggaaaa

SEQ ID NO: 73 - DNA, 25652 bp, Homo sapiens
  source 1..25652: mol_type = genomic DNA
tgtgtgtatcgagctgtttctaaaagatgtttattttccttaagagtaaaaaacagtcattgcattcagaaaaaaaaaaaaaaaaaagtcaataaagatacaacgattgttttggaaaatctgcagcccgtggattccgaccagattcagctgggagccgggccaggctttaggttggggaatgggaatgaagggaggggctgggggggggggcatgaatggagtcagggagtcggcctttcacagaacaggaaacctcccccgcccctgtgccccctctccagtgtggcggcaggtcgggagggaggaggcttctttgctgtgagatgaccaggggccgggatgggggaggtgagacgtgccagacttcttgcagggagacccaagctgtagctcctgtcacacaacaggtcctggaagtcagtccatcctcccgtgccacccagggacctgatggggacagagctgggaggtgagaagggacaactgaccccatggaggccctaagggttgacacagcccaaccatgtgccctgggagcagggggaacaggtaggctggaggccatacagccagccctccccactcctcccactaacaaacaaacatcgggaagagctaagttaaaagttgtgtaccttgtggccggagggggaggggaagcctttccctaggtgctgggggagggcccaagcactctcactagtcagcacatccatcagctgaagacacaaaacccagattataaataatttcatttttaattctctgtacaaaacttctcaatctatgaaaataaagtttgcaaaaggcaaagtagcacaggagcctcaggtcaggaggctaagcacgctgacctacactatgtacacgtctctctcccacgacggagagagaggcctctggggcagagccctgcttgcagtccgggaaagccaagttggcttccgtcagcacagggaaatgtacccctctcttccctgtacacaggaggaaaaaagccactaaggtgcctgcagagcaaggaggggggccccccaaaatggctcggcccctgcagtgccccgatcggccaccagaggtcagcaccatcatggccgccggtcttagggtcaagatcgcgcccctcgggccttccaccgcgaaggcacacagcagccgcaggtcgaactgtggaggccagagtctcttgcactgccttcggccttcaaagcttcgacgcaggacagaagctgcacgggaccaaagtggctagagacaggggtgctgaggccggggacacggggtctagctggaagtgacagtggtcccaccgcccaggcgcatgagcatctgctgacagtcgtgcagcagccggcgatcgccaagcttctcgagtgtgcgcgccgcctcagccagcatgcccacgcgctgcccgggcgccgacaggaagccggggggcaggtagcaggaggccagcagcaaggcctccgcgtgctcccgccgcgtgggccgcggctccagctccgccaccgcgcctgcgcacacgaggatgtgtcagggatgggtctcaagctggccacgcccccgcgggagccctgcccacacacaagccacggcaccagccgcctgtacctggcacacaggtacctggcgggggcctggcgggttcccctctccccaccctagtctcagcccacacacaaagtccacagactgagtcacgcacgtgcagtcatgtatcccacaaatgacagtcaccccactgattccttgtgaaaggaattgtcatcaggtaaccatcaagaagatgcttggtctttttttttttttgagacagggactctccctgtcactcaggctcactgcggcctccaactcctgggctcaagctgtcctcccaactgagcctcccaaagtgctaggtgtgagccactgcgccaggcctgtctgtcccgtctgacacacacacagcctcccttggtatcacatcccatgtgcgcccttccctgctgagcagacagcacatccctggtcagcagctgccccctcacctcctttgccaccggggcctgcccgccgcctcagactgcggtcgaggagctggtgtgtccgtgtggggctggcccccgccatcagccgggccgtggcctcatgtaggaacacctgggggccaggagagtggaggctcagggctctccatctccaccactgcctgactccccgtcttgaggacagggccatcgggcactcaccctccgcatggcgggccggaagctctgtgccagccgcctcaggctgctcaggtcccgttggaagccacgcagctcaagggcggaagcctggggcctgctgctggtgccctgggctgctggggccggggccgggggctgctgctgccgccacaggctggtgcgcaccacaagaagcaggtcacacaggaacagctgcacggcctgggggtggcaggcagggcaggggtcaccagggctccagctctgggaggggcaggatgggggcccgtggtgccaggggccggctccgggctgcactgccgaggcactgcacccgcctcacacacgtgcaatgcaacagcaatgcaccgcggggccgcccgcctctctcggcccccacacccgccaccggcccgggagcagctgtccagccctcctgatgcagggcctccaaagggatcctaccacaccatccacccccctcctcccagggatggggaaactgaggccagataggggcaacccctctcctctggacagaagccttagccaaaaagcagggtctgctggaccccctatcctgtgctgcttgggctaaccccatggtcttctgcagcccctgggggctggggagaggaaccagggaatggaaagctgaatcccccagccctgccaggcccctgaccccacccctcaccttgtcaatggagctgctggctggtgtggtagccaggctgtcctgcaggtacccactggccttctcacagatggtcaggctggctggaccagactctgccttggcacagcccagcagggcccgggcagccttgaaggagtgcagagctgccctgggcaggggtctcctgttgggaccagggcagaagagtgccagtcagaccagtccacaagccctggctgagtgccccccacttccctggctcgagttccctgaggaaaaaaggtggtgactcctcctgcacagaacaaaggctgagtgaggcacagtgcccaggggatgaggaaggctgagcccgggaccaggcaggaggaacctgccgtgcactcactcagactcctgcagcacccggggcaggtgctccaccagcgggcacagccgctcagccgcctcctcatcccgccgcagccagtggatcaccacagctgtcagagaggcccaccacttggccaccgggtctacgcctgcagaagagggagggtcccctgaaccctcagtcacgctgcacgggggagctgagaagggagccaggacaggggccggggactcaccggtggtggtggccatgctggaactgatggagaagctgtaggcaggagcccccgcagcatcagaacagctgttcagcagctgcaggtacccgagggcatccgagaattccctgtggaaggagagagctggctgtcggaacagatggcaggggtcctaggagggtgctccccacctgccctccagagtacagcctggcccctggctctgcaaagtgccactgtctcctcccacaggctggtggggagaggaaactcagagaggaatgaagcgtgcatggcacgcacggtagcccagctctgggctctctccacagggttgaggccagagctattctcagaatcccgccggaggggccttgcctggaggagggcacaacgacacttacttgtccccatcagctgacccagggctggggttgggctgggtcacacagttcagtgctcgctctaagagatgttcccggaatagctgagtcacctgggccagggggtccactgtggagaggaggaggtgagtggggtggggagcagggccccaccctcctctccaagctaagggctttttcctgggtgggctggggccacacctagggccactgggaagtgccggcatgcccctgggtgcagcccctgccaaggacaggggaaagcgggtggacataactatcaccagcaccagccttggccaggagacaacactgaggcctgccctacactgcttccaaaggaaaaccgacttgagaagatgccattgttggctccgcttccttactccacagcggcactgcctggggtcacttctccaattagccatctgcccatcaatccctgcatgtgcttctgaaagccccaatgggaacgagaggcacccaggcctttcccttcctgcaacccccacagcaacaacccatggcagggagaaggactggggtggccagagacagccagagattcaggcgacaagggacaggacaggaatgaggatgagggacaggagaggggacagggaaggggtaagagagcacctgggttcccggccaagctgtacaggctctcccatggggtactgagcacggaccagtccccatccacgaagaaacggtggcccacggggtggcagagccactgcatggcaggaggcactgagccactctgtgccaggcaggcctggcgggcactgctcaggaagaagcgctgtaggggagggtactgggctgtcacagtggacacagcctggggccagaccccgggccgagtcccagcttggcctggagtccccctggtaaccactgccacatcccgtgtagctcttacccagggagcctctggagagagctgcagggataagcccccagccccccaacccactcactgtcagaaaatgcaaggcccgtgggagactggtcttcactctcaatgcagccgccacatagatctcggccagcgtcgccacagacacggcatcccctgcacactctgccaggttcagggcactcagcgccaggttggtggcagtgaggtgcccgcctgtgtgcttccctggaaggcaagcaggcatgaggctgtgggtggagcacaggcagcagggagcacctcggagcccgccccacgctcagtcctacccatggtgtgcagctggtgcagcttatggtagaccagggctgcgtctcgggcgctggcgctagcatccactcgcagagcacagtcctgctgcaggccccctgcccggcctgccagccagcggcccacccagagacgctgcagcaggtgacggatgaggttccagaggaggctacaagccaggtccaggtgggaggtgggcaggggccggcccagtgcccgcagggccagccacagctgctgggcagcctgggcaaagtctccctgtggatgagggttttccaggtgagaaaagtgaggtcagagcagctgccccaaagctcagaagagccgtccacagcaggctctggaggggtggtgggggtctgcggatgcgtggctaggcacagggaggacgggacagattcatggtgtgcacagggagcaggaacaagggttgacacccagcaccttcacagcctggggtccctgccctgcccactctgccggggccagccccttacccgggccaggtccaggtcagcctgcttgcgatgcctccagaagtacacggcggggcctgagtggggccgtgtgactggctcaccgtagacaaagagaagcaccaaggagacgagcaccaacagcccattgagcagccagaccactgggggcagcagccactgggcccagccagggccatctatggacagagggaaagctggggacacagctcccaggaaatccagagccccaagttcacaagcctgggggctcaccccgagtgtccctcccaaagatgcccaggctggccggtcccacctctgctctcggtgcccagcacgttgcgcccagggctatggtagacgctggtggtatctgaggggctgggaagcccccgggcccccagcaaggaggccaaggggttgcaggacaggcagaggaagacgagcgtgcacagggccaggcgggagcggtccagcatgccccggctgtgcagagacggccgctgctctggctttgcctggtggggttgggcagggtggtgagggcagaatcggagggaccccagagagcatggggctgggaaggggggggtcaggattctgcccaccttactgtgggaccccacgtggctccaggcctcagttattctgtctatgaaatgggaggtaggatctgttagggtcttcccggccctgtcatgaggctcagaggatatggctgggagtggggaagggggcaccgtggcagggcccaaccttgctgtcctcaaagactgggctgtcaggctccgagtcactgccactgccaccgctgccactgcccctgctgccaagggacaaggggctgctctggaaaggtgagccagcatccgaggggggtggggtcagtgtgtcctccacctcagtcttcacgccctccatgagcacgtctgtgttccctccactgccacaggccgacaccagatccttcagagattctgtgggccgaaaggaacagagccaggagtaaaggctggatatgtgaccccaaatcagagcctaggcccttggaggcctagggactactgtagctcctaaagctagcccaggacgctttgatggggctgggttagggccaaagggaggcaccaggtctctttcaggaccagaggtaaccaagggactagagctgaatgcagggctacagccaagggtgaggtgggcagggcagagggtgggccagaaccaagggtggggtggggctagggatggggtggggccgggaggtggagcaaggctagagaagaggccagactggagctcaataaagccaggactcactgcttttgtggacagcagtgcgcagacttaggttctcctgcttgagtttctggttgctgtgttgcagaaagcgaatgtagtcgatggccttgcgcaagacagcagatttattcagctgcacggtgtgggagggagggggagcgcacaggtggcctgtcaggtcgggggttgtggggttggagagccctagcaagggggtgcggagctgctttgcaacattactgcctcaggacctttgcacttgttccttctacctgaaccgttcctcgcctagtagcacccacctcccaggccgggcatagggttagaatgtaagatgcagacagcagggtctggctagctgctgctgtgcctgccgccatctcagggaggccttccctggctaccaccaggggaccctcaccatcctcttcctgctttctctgcaacgagccaaacgtggtggtctcgagcacttattcatcctgcctactgtccatctcccccaccagaaggtcggctcttctttgagggacaatttttgtctgtcttgttcattgctgcatccccaatgcctagcacagccccacctttattgaagaggcctgcaaaccagtttaactaaataaacgaggctggccaggcctggggaggctgaattccaattccctgcttgtccaggctcagtctcactccctctcttccttccagttgcccctgatctgttccttcctagggacaccccggtctgtgcccctgcaggcctctccacacctttgcctcagtgcccaccaccagatccttgagctcaatgattttgtcattgatggaggagcggtagcgcttctcaatggcgttgtgggctgtgcgcttctctccacggctctgggcagaggccggggccttgctgccagctgcgagccggttgataggcagcttctccgcatctacgaccagtgggactgttgccaagatggttccgccactcaccagggtctgcagggccaggcacatgttaccaggtgggcatgtgtgtgtgtgtgtagaccccactcccttatgccctgcccacgtcacccaccggcaaaggccctgtctgcacagtggtgccagagaccaggggactgagacctgccgccttcacagtggctccgtctgtcttcatggctgtcagaagcagcgagtctgccttgatgaagtggggctgcagcaggacctgagggtgggagaggcttggctgtaagctgtgtgtctgggctggggctgccccctccccaacccctggccagaccccctcaccgggacctgctggatctgcgaggtcacagtggtcgttacaggggctgccgtgggggcagctgtgactgtcagtagctgctgggggaccacactctggacctgggtgtgcaaggagacgggcgggacccctggcggggaagccagtggcaggccaggcagcggctgctgggtgttcccgggagggcttcctgcagaaataaagcatggggctgcagacacagacctccctctcccactttcaacctgctcttcaggtctctatcaccgactggccttggatgagtcattgccccatgtggcttcctatggacagtccctgcctgggctctgatgcaaatgcactggcttcaagccaggcctccagtgcgaggttgcgcctaccccggcaacaagcacaccaggactgctagtaacagggcatctcaagcagccgagtggagccccagtttctaaagcctgcacagacctctactcacatcacagcagaagcttcttcctgtgctcctggaagccccaccccgggtgtcccctcccgccacacatcccccttacctgtagagaagcctcccggagggctggggtagcctaacacaggggtggagctgaactgcggtggggctggggctgggaagctctgtggcaggagggcccctggcaggggctgtggggtgggggtctgcaggatgctcagtggcactgactcttccttgataccaggcccaggggagaaagcgggcatggacgggtacatcttcaatggagtgggtgcaggctggggaggggacaggggtgagggcgctgcctgcggcccgctcaggaaggcttcaagagaggagctcaatgtggcaggaggtggagacaagctgcctggggagctggtatcggggctggcagggtctgtgccccctgccccactcccagcatagggtgggtcaaataggccagggaagtcactgtcttggttgttgataagctgaagcatgtctgtgaaaaggagaagagggtgcgtgagtgaggcagagactgacccccaaacagggcatcacacacatccaaacacaaccttatttgcacaacccttgttggcacacagctgtatgtgtgggcaatgccaccaggacagaaagccacccacaggagctggtgttcccggacatacagccattttgcgagcacctgtgctgtctaaagcaatgcctgctgctgcgagtgcatcacaatacctggacaaggtgggcaccacaaggctcacaatcttgccccacagctaggctggggctgagcccagggtcgggcccaagactgcagacttcagagcctgagctcttcccaccatccggtatttgcccaaacatctagaaacatccttagtccacagcaaacagcaggctcacattcattcactcatccagtgagcatgtgctgagtgctgagtgcccacactatgccaggcactgctcccggctgtgaataagggaaatccctgcctagaactaagcaactttctggggagctgggagtgtcctgtagcttgatgtggatggtggtaaacttttactcctgtcttcatggggcatgcattctacaagacatccacctctgagtccacacacatacacacacacacacacacacacatacacactgcaccgtggactcagaccagcttccaagcatttgcccatgaggtgaccaacccttccagacagctctcctgccctctccacagtccatcacccccaaccccacacagaacaaaaggaatccagaggcccaggtgcagccttccctggctccacttggggcctgtttctcaatgtgtgaaacggggggcacgcctccatccacagatccagcagctccagtctttgggatggagatggggatggggagggaggagcagtctagggcagagggggtcttcatataggagcgatgggccccacaccccaccattggccactcctggtctcatcctaaaacgcacccccagcaggatcctctgggcactgaatttgacaaagcaacttagaaactgctgaggagtgggtgattttcccctcccctcagtttacagggggaagaggggtgcagagagaggcaggattgccttgaggccctgaagaagtggtgggatcctctgtgaccaaggaccaactgtgcagcctgggcccactcttcctagggcagcgcaggatccccaaagagaatggcagacagggaagtcccccaagaggaccccagatcagagcagggtcctcatccacactagaaggactctaagggtgggggcccatgtcagaagggtgggtctggtccaaaagccaggcccgctgtggggctacccacattgatggggccaggctagacccctaatcctcacccacagctgagagggtgatgtgatcattggccccattctacacgtgaagaaactgagctgtagagaggtgacttactggcctaagttcttatagagtcagagactcaactgagtccagaccctattttgactccaatgccccaaccactggccactaccctagactacctcaaaagattagctcacctcatcttggagacaagaaaagacactgaggctcagggaggaccacaagcagcccaagagcatgcagtggggttcaaacccaggtctacaaaatcccaaatctattgtctctctgccttttcttgccccactaagaagccaagagccaggctgccatcaccaacccattactcagtggaacagaccaaggcttagggccaagccagctgctggccacatggccaaccagtgtgtctctgtgtagagttctgggctcaagtccaggctttgcctgcagccaagtagcctcaagacccaggcctggccactcagggctttgatttcatctctgtaaaagcaagtgctgtctgtcctgactccttcctcctcatacagactgggacacactcccacctcagccccacctggccaagggccctctcccccagctggtgactagcagcctatctggctcagcccagggccctctaacccactcgtggtggcacccactgggtcagaatgctctacaggacccatgggggcctccagtgctctcaggatccccagcctgagctcccagccctgcccaccaccagcttgaagtggagcctggaccaacagcctcctctcactggccccagtttcctcatctgtacaacagaaaagactaaaccccttttggtacggctgcccgaggctttgcttggcaggcagctggcaccgagtggagacccaacattgcctactgacaggtacccaggcagggaagctactgcaggaggggaatttcctagagcagttggcagaacaggatggggtggcagccccagtcttcctggcttctcaagtagaaactctcctggtttgtggaccccccaggtcacaagtcatcaagtcataatggactttcaactgcagggtttcccatccctttaccccagtccgtgtgagcctcttcgatagatgggggaaactgaggcctgaaagaaaaactgacaattttgacaatctagggctcccactgtcttcctgaaaagtctaagatgcccacaataggcaggggtgctgaatagggcagacgctgtggcagagggacaacgggccctcctccctgcttcctcctggtcctgtcccaaagcgggtgcagagaatgtagagaagaccaccctctccctccaaaccctcttaggtcgggatgctgcttttgggtctctaagcaaacccttcccccttgagttgcaggggacactaatttggttggaggtagccctccacttccccagcgagctggtaactgtcacaccttctccctcgggaaggggctctttcctgctcaagttgcgtagcccgcatgcccgcccaccccaggagaacctgcaggagacggaggcattgtataaagggctggtggggaggcctccaaaaataccttcgaaagtgcaatccatggctccgcgatctgcgcccgcccttggggcgtccaggccgttggccctacccctccccgcgccgacttcacctgtcaaggcgcggcggatttttgaagccgttgagcgctgcggcgcgcccgccccgccccgccccgcccccagccccgccccagccccgccccgcctgcaggtcccgccccgccccgcccttcggggctgcgggccgggcatggggtgagcgcgcgcggccaatcagcggccgcgctgccgcctcgctagggcccggccccggcccccgccccacctccccacggcggcgggggctcgagtttcaccccgcggcgctgaatggggttggggttactagcggacgtccgcctttaacccgctcggtgccagcgtctgccggggttactggcggtcactggccctcagctcccgcccccttcgttaaagggtcaaagcagagaagtcctggcccaacacaccagaactctgtgttcgaaatcactggttcgctggcaccctgagcgagccttaaccgctccaaccctccgtttactcctccagaaaacaggacagtcattatctccctggcgtcgaatggtagaagggagataatatgggtgcagcacttagtacgcaagaagcgtttaattaaggccaagggctgccgagtggcagctgcggtgggtgcagggacctcccccttctagggcagccccaggaaggggccacccctcaccacagcggggctgatggtctgggatgaggccactcctgaaaacaggtcacttccgggaaactgaggcctggaaataagggtttcctgactgccagcaccgatgtccctctgccagatgggtgaagtctgcccctccccctcaaggcctcacaacccagcagtcaccaagtgagtcccgacccactattcattgtagggccctgggaagccaggaagggctgcagtccctaggacagaagatgggtaaggaaggggtgacaggctctagggttcttttgaggaggtgcctgggcctgtcttccctcttttgtcaaaggtaaaagttacacacacacacacacacaaagtgatcagagcctggccagttgattttgcagccaagtagaccaccagcaaagcctgcctctgccccaaactgcaggccagcgcctctgcctggtccacaccccagttggctgcaacctgagagggtgcctgaaccctgggcagacccagcgactcagcagtccattgggggctggggtccctgcggcctcaaccttgctctctattcaggaccctaagcaagaaaacccagccatgtctctctcgcaacctgtcctcgccaccgccgtccagcccaggcccttatttcccagctttgggaggttcaaggacaacagacggcctctctagcatggcccaaccctcccctcagcccgcgggtgttccctcacccccaaaacaaaacacagcattgctcttggcaaaggctctgacatgagtgacttaagacagggaagcgtccttgacccaaaagcacactgagagctgaactccaggcatgagttccccatggcctcccagcctggttctttcattactttgctccccagtttctgagcctagaatgtggtgagaccaacaagcagatactagcctgagacagcagggccagggccactgtgaacagtcaagcctgtcccctccccttacccatcttggctttaccacatattcctgcctcttattgtgtctttatttgtctcatcttcctgctctaaccccctcccatcccactgaggaagcgcgatgggagagggcggttgctctctgagccccaggggcagcagagtcattaaagactctgatgggggtggggcggggggggccttccaagaggagggggtgtgacctgggaacagagggctggcccttgggcagagggcacagactaagctaagatgccccgaggaagggggaagggcctgggtgccactggccatggccagcctctgaaactcaaggcctggccaaaccctggctcactctcccctggggctgatctactggccaatttcttttttttttttttttttttttgagacagagtctggctctgtcacccaggctggagtgcagtgacacgatctcagctcactgcaacctctacctcccgggttcaagtgactctcctgcctcagcctcctgagtagctgggattacaggtgtgcgccaccacacctgtaatgaaatgtaatttttgtatttttagtagagacagggtttcaccacgttggccaggctggtctcgaactcctgacctcaggtgatcctcccacctcggcctcccaatgtgttgcgattacaggcatgagtcaccgtgccaatttctgtggaagctggtcaccaggttaagactgaaaaaggaaactctagagccagccctgcagcctccctcagagacacacccaagtgggctatctggggctgcatgccaggccctgctcttcctttagcccctcccttgctgtgtgatggggacagtccactccccaccctctgagctcccacacctacgatctccagaggtgggaattctgggaaagcaagtgtgtaaaacatccatcactcaacagtctcaacaaaggttagttctctctacagcaattagaatggtttagaactggaaagtcaggtagtgagttgcctgatacttgcagtattcacgttggagctccattaccattcgactgagtctttttttttttttttttaaggggagttaacggggccagtctagagtaaggcagctgaggcaccttgggtgcacaatttaaggaagagcctctcttgcctcccctagtccctgtcctggaagctgggagagctggtctctaggggctcactgtggcacccaaattgcggcccacccatgggtgaaccgggcttccctatgaacactgagaaggcccttgtggttcccacacacactctgaacacaggaaggaagaggaggcatagactctgggccatggtggccccaactgctccctagttcaccttccccaggcttgtgaagccctgccacccctccccaagcctgggttcctcctcttccctcttcttcttcctctcctgccctgattctatcaggacccaacaggaaacctgaacccccacctggcatccctccccagttctaccttcaaacctctctctgaaggcagatgcaggcgccctttaatgactctggccgatgtattctgtgaggccatgagggaaatcctgggcaggcctcatggcatgcgcttgtagggcccaacgctgaccagcacagaagcctacaacccaaacaaggccttgaaccccaaacaacctcctggaagagggagctcttcacctgcccccacagccttgtccacagaacccagatccatctctgacaatatctactgtgtgccaatcctgtgccaggcactggggccattatagatgaggtggtcagggcagcccatcttaggaggtgacatctgaaaggaggactgaatgatatgagggagtgggccggaagggagggcagaagaaacagtgtgtgcaaaggccctgcagtgggcgtgggcaggataggaggagcggaggcagtgagggggtggaggccaggacggccaccaaggagctgggattccaactcaggttggtctgtcatctgagccaaggaccccaattctccagggaatgggtgggaaagggatttgccaattgatccctgcactacagaccacaaagctgcaccaactgtgaagaagggtcagccacaggggaggatgtggcacaggtgctcatgggattccagagcacaccctctcggcctgctaatggaggcagcagggtgaggatgggtgcccaccatccctccagggagctgggctgcaccccacctgctgttctgctcccaccaggcacttccttgatcctcctaactggagtcggcggtcctcgtgttctcagctggtcgtgtatccagcagtggcacaggctgccctttgtgcactcatggctgccccgggggcacaagtgtgtgccagctcttcccggaatgggacgcacccatggctggagccccaggtgcacctgggcgcaggtcctcttgaggaaactaaggctcagacggaggcctcgtgcccaaagtcccacagctgccatatgaagaatctggtacacaaaccccattctgcggccccagagcctgcccttcagccccagcctgtgggggacagcagtgagccccaactccggcctgcctctgccctgaccagctatcctcatttgtcgcagttcagtgagtgtgtgcagagtgcaaagacagagaggacaacacgaagctctttaaggctcagctccggcactgcctcctcctggaggcttcctaaccaccacccccccagacctatccacctgccctgccaaattagaggctgggcctcagctgggggcccctcctgtcagggcctgaaccagctgtgaccccagcctcacccagcacagggctgaccacagcagggaccccagtcagaggccgtgcagactccagccatggcttcctccaccctcgtctgcctccacccccatcccctaactggtgtctccctgggcctccctttccctgcctgctttctgaacaccacaagctattgaaggccaggctgttccctccaccaggaatgccctttccacctggtgaattcctattcctccatcaaaacttgctctgatgccacctcccattcttcccttgtctgtgcccctccacatgccagctcccaacatactgaccgtctgaccctataaacctcagagccacgtttcctcctccccactaggctcttcccggagctacaggtgtgcggaattaccctcagcagcacctgcgagatggcaattacatgtgatgctggtcggcaccaattcagacaccttgtccgagaggtggcccagggcacatacttatcactggcagctgaaaacaacccacgggcctgatgcagtggcaattctgggagtagcccctgctgctgggcacctgttttcagtcaaaatggcagtgctaaggttaggcgcaggggctcacacctgtaataacagcactttgggaggcaaaggcaggcagatcacttgagcccaggagttcaagaccagcctgggcaatgtagcaaggccccatctctacaaagttttaaaaatagctgggcatggtggcatgagcctgtagtctccattactctggaggctgaggtgggaggatcccttgaacccgggagttcaacattgcagcgagctgtgattgtgccatggtattccagcctgggtgacagagcaagaccccgtctctaaaaacaaactggctcacgcctgtaatcccaacactttgggaggctaaggcaggcagatcacgaggtcaggagatcaaaaccatcctggccaacatggtgaaatccagcctctactaaaaatacaaaaattagctgggcgtggtggtatgtgcctatagtcccagctgcttgggaggctgacgcaggagaatcatttgaacccaggaggcggaggttgcagtgagccgagattgtaccactgcactccagcctggtgacagaacgagactccatcttaaaaaaaaaaaaaaatatatatatatatatatatatatatatatgtatacacacacacacacacactcacacatacacacacacacacatatatatatatatttctccctcttgagttgtttctctgcagcttgttttaaagctcatatgaaggcagcaagatgttttcgagctgccaggctccagtctggaaaagataaagccctttacaaccttccctacaacgtattccctttccttctagcatcaccggcactgggtgatggtcattgtcttttatgtacttttggtggctttgcttagtcccaaggctgtgaccagaactttgaaggtgctttcactcacatttccaaggctgccttgatgtgttttgcacagaaaccgccatctgtggccagatggccactctgcccgtcctcccccagccagaaacactgcttcctcagcaggttctttttgtttgtttgttttgagacagggcctcactatgttgcccaggctggagtgtagtggtatgatcatggctcactgcagcctcaacctcctgggctcaagcaatcctccagctttagcctcagcctcctgagtagctgggacgacaggcacactccaccatgccaagctaatttttttagtttgggtctcacaatgttgcccaggctggtcttgaactcccagactcaagcgatccccctgcctcagcctcccaaagtgctgggattacaggcgtgagccactgtgcccagcatcaattatcttccatggaagccaaggatagggtgcttgttccccatggcggggggtgctccccactggcctagtcagccccatcctgtctctcaccaactccagaccaccacatggtagatgctcagaacttggaaccatagcctggtacatcctagaaacttccagcacaggctccttgggtaattgctgctaacatttgttgagctaaacctatcgcgtgccaggtactggttaggtgctctaaatggtgatttgtttgttttctctaaaacaaacagggccttgctatgttgcccaggctggtcttgaactcctggtctcaagcaatcctccaacctcagcctctaaagtcaataagattataggcgtgagccactgcatctggctaaatggtgataataataacactaactggcattggttcagggcctactatgtgccatgcactgcttaagccttcactcatcggatccccacaattccaagaagctgcttttagtactgctccctttacattgttaagaacctgaaggttcttggacttgtccaaggtcatacagtagggctgcttgttaagacccctgatcccagccttctagctgcagggagcacagggaccccagagcctggcaggggcagcatgcagaggcaaggcctgctgggagacaggtgcagggacggggagtcagttaggaaaggagctcaaacagggttcggggtaggccacaaattccccctagggggatggacccccagccccgtcccacctcccacaagccccaacccagcaggggacccacacctggagccagtctcaatggctccctgacctctcacccctgagccagttaaggctttccccacctcacccccgacacacacagccgcccctgtggagcacatggtgcaggctgtcacacactgtcagtgcccagggtcaaaaggcatgtccacatggcccgtggctgctaggagacaaggtcagaggcacttcctctggccggcctgggctccacctgtcagcaggcaaagtccagatcccaggcctctgctggcagtgactcctgcctggagctgaccgggtcactcaggatgtttgtgtccagctaggtgaatgttgggcagaaggtaactcccaacccggctgagacaagggaactttatcttggagcactagggagccatgaatggttggagaccaggggagttctgtgctgtaagctagggcagtaactagtctagagctgtgttttctaaggagtgccagtgcttggtggaactagggagagaactggggcatgagatatcctggggagaggtatggggtggcagagcgggcccccattgtgccctaccagggctggcctggacccagcaaacagccagacacatgactagaagcaaggccctgttgtggctgggctgggcatgctgggagggacatcagggcgggagaactctgagaacgcactgctcggggcaaggtgacacccagaagggctttctgggaagcagcctctgacggggcttggcagacatctggggtccgacagacaaagagcagacatgacggggtccaggcataggaaagagaccccgaggccctgttccaggctcttggccagaactctgtttccgtctgcctcttctgcactcataagcttgtgcaaaattggataaattaatcctcagcagggaggtgaagactgccacgggcttaacaataatccccaacacaggtacagggccatctcctgatccatcctcccccgacagctgcaaggtactctgaggcccagaaggagacaggctcacctgaggtcttggtgcagatgcaggactcaaacccagggacactatagccagggcagtgccttcacccacagatgcaaggactcatggaggcagctccatccccaaatccattcacatgacaagagtttggctgtggcaggcagcaggaccggatggggcccaaggcccttggctggctcaccagggctggttcccagtctaatgactcaaacactgctctggactgggatggggaggtagccacatagcctctgacccctctgtgacccacttccaggcccccagagtagcccctgtggaggagcctccctcaacccctcatccccattcttaggagcccagtgcttaagagcttaagagctaggctctggagcccacagcctgggtttgaattctggctttgccatcatctggctgtgtgatctcaggcaaatcacttaacctctctggtcctcaaggccgtcatcttcatcatatgtctacctacttggggttgtcaggggattaagtgggattatcaacacactgtctgaaacacagtaagtactcaattagtgttttctgttcacattacgatcctccatccaagcagccagagggaactgaagctcggtgtgcccctgctctgacccccgactgtcctcacatctagcccagctctgcactctggcactcaaggccagcctggccccctcttatccctcatgtctctcaagggacctggcatttccacccccaaatcttcagaccttatcaaacctgctcagctccactcctggtagaagaagcttcaaaagcaggctcgacctctgaccagcaattcccctcccagaacctcatcctaggaacacagtgaggatccgggcaaagactggcctcagtggccaggcacagtggctcacgcctgtaatcccagcactttgggaggccgaggcgggcagatcatgaggtcaggagatcgagaccatcctggctaacacggtgaaaccccgtctctactaaaaatacaaaaaattagccaggcatggtggcacgcacctatagtcccaagctactcgggaggctgaggcaggagaatggtgtgaacccgggaggcggagtttgcagtgagccgagatcgcgccactgcactccagcctgggtgacagagcaagactctgtctcaaaaacaaacaaacaaaaaaaaaaaaacaaagaaaaaaaccggcctcagtgtccactgcagcagtttataaagataaaacaacctaggtgtccatcgacagggaatcaggtgggtaataagaggaaaccttactgtcgtctggctgttgacatggaaccaagcagattccaatcagctgtgaaccaatggaccctattttaatttataaaaatacagatccagccgggcgcggtggctcacgcctgtaattccagaacgttgggaggccgaggtgggcagatcacaaggtcaggagatcgagaccatcctggctaacatggtgaaaccccatctctactaaaaatacaaaaaaattagccgggcgtggtggcaggtgcctgtaatcccagctactcgggaggctgaggcagaactgtttgaacctgggaggcggagcttgcagtgagccaagatcgcaccactgcactccagcctgggcgacagagcaagactccgtctcaaaaaaaaaaaaaaaaaaaaaaaaaaaaaaatatatatatatatatatatatatacacacacacatacagatccacagctgcccggggctgggagcaggaacaggaactgactaaagaagtataagggatctcactgtgtgataaaaatgttcgacagctagtaattgtcacacaactcaaaaagttaactaaaaatcattgaatgatatactaaaaatgggtaaattttgtgatacataaagtatacctcaataaagtcgtttttaaaaaattgatgaaggccgggcatggtggttcatgccctgtaatcccagcacttttgagaggctgaggtgggcagatcacctgagctcaggagttcgagaccagcctggccaacatggccatctctactaaaaatacaaaatttaaccaggcgtggcggtgcatgactgtaatcccagctacttgggagctggagaatctcttgaacctgagaggcagagtttgcagtgagctgagatcatgccactggactacagcatgggcaaaagagcgagaccctgtctcaaaaaaaaaaaagtttatgaagagtgtgcacccatccccaaacacatataaacacacagagagagagagagagagagaagaaaagctctttcacataattagcagggcttatctctgggtggtaggtttaaagttttttttgaaacagaatctcactctgtcatccaggctgagtgcaacggcatggttatagctcactgcagcctctaagtccaggctcaagcaatcctcccacttcagcctccagagtagctgagactacaggcacatgtcacccacacccagctaattttttatttttgtagagacaggattttgtcatgttgcccaggctggtctcaaactcctggacacaagtcatcctcttgcttcgacctcccaagtgctgggattataggtgtgagccaccaccccaggtctaaagattttattttcttctttttgctcacttgcattttctaagttttctacaatgaaaaaagatgtgtgtaattgggaagaaaaacaggaagtttgaataaaaactgaaaaatcctctactgaagtgggtaaagctgagccctgcctagtgagaaggggctgcccccagtcttcaaggggctgggactgcccccactctctcatagactagaccttgggccacatggctgcccatgcctggcctttggttctggagagacaatgtttttatccatgagtcagtaagaaaggtctgtatcagacctctggcccagaccagattctgtcagtaagaaaggtctgggctgggagcggtggctcacacctgtaatcccagcactttgggaggctgaggcgggcggatcacaaggtcaggagatcgagaccatcctggctagcacagtgaaaccccgtctctactaaaaatacaaaaaattagccaggcgtggtggctggcgcctgtagtcccagctacttgggagactaaggcaggagaatggcgtgaacccaggaggaggagcttgcagtgagccaaaattgcgccactgcagaaaacaaacaaacaaacaaacaaaggtctgtatcagacctgtggcccagaacgggttctgttgtccaacttgcccatgaagggagggtttgcatcatttttctggaggtggaaactaaggtttagagggtgagagggcttgagcaggatgacaaaggaagtgaggagtgtccaggttcaagttctgaccccaaagcgcatgtcctcctggcttggtcacgttgcctcttgggactacactcactgggcccagtgatgtggaactggtagttgagtcaggcccagatctccctagggcttgggatttcagggttcatcactccagagggcagtgaaggacaacccctcgtgccagggataggggaggctgttttggaaaagcctcacaatcagggcctctcctctggggtcctcccctagcccagccccagggggaaggagggagggctgggaagcttctggggctggcaaccagctgggctcatctgcaaggctgcagtagggcaggagtggtggtggcatagatatatctgttttgccaaccccagggtggccacgggttccatggacatgtccattcaggctgtgagtctaggcatcttgttcctgcgaccttggcctcagtttcctcatcaaccaagtgcaacttagctagtgctgctaaaactcctgcacagaaaccatgcaggcaatttgctaggggcttccgtttgctctatctacaaaatggaagcaacgggcctcctaattggcacttggtgccaccattggccccaaaccccttctcatcacagccagggtgatgctccaaagatggaagccggtgccactgttctgctccgccctttccctggccgaccaagtcggtttgcgtcctcctcctccctgacctcactcctttgcaagcctctaactcctcacacttaggccctgcctcgaggcctttgcccttcccttgccgtggcctggaaaacatctttccttgctggtcctgggggtgaccctcaggtctcagcttagaagtccctgaccgctctacccaaagtagccacatccctgccctcccccagcctcgctccacccaaggtacaactaaatacccgtttggtttcccgggagatttttgtgttccctaaaagagggggtacccaggtctgtctgtaaaccctcggtgcctaagacggggcctggcattcggtggatgtcagtgaatgagtgcggaggctgtgcccgtcgcagaccgggagaacccgacacgaggcgggggaagggcgcgaggcagcgcccatgcgcatgcgcaagagctccgacgccgagctgaactctcgggccggagggaatgaccgtgagtaacctcgcaattacgtcacggctggggctggggcggagcttcggcgacgcctgggtccccagcttcagccgtggccatcacagggctggagagtcaccggtcgggcggcacccggcctgggacgcgtagaggcgcacgtgtcccggcccggagccgccaagggaccccggcccggcccaggagccctcacccacaagcgcgcggcccgagacgctagcgcgggaaccagggaggctcggtgaggctcgggacaccgagctcagagacaccgggaagtcccgcgcgagcacagcacggagctggcgcccgtgggggagacaaaggccagggagacacctgcgcgccccctactcgcgccacccggcgcagcttcaagccctgcccgccctgacgcaccttcgatgtcggtcagcagcgccgcgtccagatcgcacggctcgcccagcgcctgctccaaagccgcctcgctgaagggtggctcgtccatggcgcagccgcctcctccgggaggcccgccgggcccgccgcctcgtacggcccttcctagggagcgccgccgcggccccggctctcagtcgccgccgccgctccgcgcgttcgtgtcctgccctggcctcagaggcggcccggcgccggcgaaaagttcctcggaaact

SEQ ID NO: 74 - DNA, 12296 bp, Homo sapiens
  source 1..12296: mol_type = genomic DNA
tgtgtgtatcgagctgtttctaaaagatgtttattttccttaagagtaaaaaacagtcattgcattcagaaaaaaaaaaaaaaaaaagtcaataaagatacaacgattgttttggaaaatctgcagcccgtggattccgaccagattcagctgggagccgggccaggctttaggttggggaatgggaatgaagggaggggctgggggggggggcatgaatggagtcagggagtcggcctttcacagaacaggaaacctcccccgcccctgtgccccctctccagtgtggcggcaggtcgggagggaggaggcttctttgctgtgagatgaccaggggccgggatgggggaggtgagacgtgccagacttcttgcagggagacccaagctgtagctcctgtcacacaacaggtcctggaagtcagtccatcctcccgtgccacccagggacctgatggggacagagctgggaggtgagaagggacaactgaccccatggaggccctaagggttgacacagcccaaccatgtgccctgggagcagggggaacaggtaggctggaggccatacagccagccctccccactcctcccactaacaaacaaacatcgggaagagctaagttaaaagttgtgtaccttgtggccggagggggaggggaagcctttccctaggtgctgggggagggcccaagcactctcactagtcagcacatccatcagctgaagacacaaaacccagattataaataatttcatttttaattctctgtacaaaacttctcaatctatgaaaataaagtttgcaaaaggcaaagtagcacaggagcctcaggtcaggaggctaagcacgctgacctacactatgtacacgtctctctcccacgacggagagagaggcctctggggcagagccctgcttgcagtccgggaaagccaagttggcttccgtcagcacagggaaatgtacccctctcttccctgtacacaggaggaaaaaagccactaaggtgcctgcagagcaaggaggggggccccccaaaatggctcggcccctgcagtgccccgatcggccaccagaggtcagcaccatcatggccgccggtcttagggtcaagatcgcgcccctcgggccttccaccgcgaaggcacacagcagccgcaggtcgaactgtggaggccagagtctcttgcactgccttcggccttcaaagcttcgacgcaggacagaagctgcacgggaccaaagtggctagagacaggggtgctgaggccggggacacggggtctagctggaagtgacagtggtcccaccgcccaggcgcatgagcatctgctgacagtcgtgcagcagccggcgatcgccaagcttctcgagtgtgcgcgccgcctcagccagcatgcccacgcgctgcccgggcgccgacaggaagccggggggcaggtagcaggaggccagcagcaaggcctccgcgtgctcccgccgcgtgggccgcggctccagctccgccaccgcgcctgcgcacacgaggatgtgtcagggatgggtctcaagctggccacgcccccgcgggagccctgcccacacacaagccacggcaccagccgcctgtacctggcacacaggtacctggcgggggcctggcgggttcccctctccccaccctagtctcagcccacacacaaagtccacagactgagtcacgcacgtgcagtcatgtatcccacaaatgacagtcaccccactgattccttgtgaaaggaattgtcatcaggtaaccatcaagaagatgcttggtctttttttttttttgagacagggactctccctgtcactcaggctcactgcggcctccaactcctgggctcaagctgtcctcccaactgagcctcccaaagtgctaggtgtgagccactgcgccaggcctgtctgtcccgtctgacacacacacagcctcccttggtatcacatcccatgtgcgcccttccctgctgagcagacagcacatccctggtcagcagctgccccctcacctcctttgccaccggggcctgcccgccgcctcagactgcggtcgaggagctggtgtgtccgtgtggggctggcccccgccatcagccgggccgtggcctcatgtaggaacacctgggggccaggagagtggaggctcagggctctccatctccaccactgcctgactccccgtcttgaggacagggccatcgggcactcaccctccgcatggcgggccggaagctctgtgccagccgcctcaggctgctcaggtcccgttggaagccacgcagctcaagggcggaagcctggggcctgctgctggtgccctgggctgctggggccggggccgggggctgctgctgccgccacaggctggtgcgcaccacaagaagcaggtcacacaggaacagctgcacggcctgggggtggcaggcagggcaggggtcaccagggctccagctctgggaggggcaggatgggggcccgtggtgccaggggccggctccgggctgcactgccgaggcactgcacccgcctcacacacgtgcaatgcaacagcaatgcaccgcggggccgcccgcctctctcggcccccacacccgccaccggcccgggagcagctgtccagccctcctgatgcagggcctccaaagggatcctaccacaccatccacccccctcctcccagggatggggaaactgaggccagataggggcaacccctctcctctggacagaagccttagccaaaaagcagggtctgctggaccccctatcctgtgctgcttgggctaaccccatggtcttctgcagcccctgggggctggggagaggaaccagggaatggaaagctgaatcccccagccctgccaggcccctgaccccacccctcaccttgtcaatggagctgctggctggtgtggtagccaggctgtcctgcaggtacccactggccttctcacagatggtcaggctggctggaccagactctgccttggcacagcccagcagggcccgggcagccttgaaggagtgcagagctgccctgggcaggggtctcctgttgggaccagggcagaagagtgccagtcagaccagtccacaagccctggctgagtgccccccacttccctggctcgagttccctgaggaaaaaaggtggtgactcctcctgcacagaacaaaggctgagtgaggcacagtgcccaggggatgaggaaggctgagcccgggaccaggcaggaggaacctgccgtgcactcactcagactcctgcagcacccggggcaggtgctccaccagcgggcacagccgctcagccgcctcctcatcccgccgcagccagtggatcaccacagctgtcagagaggcccaccacttggccaccgggtctacgcctgcagaagagggagggtcccctgaaccctcagtcacgctgcacgggggagctgagaagggagccaggacaggggccggggactcaccggtggtggtggccatgctggaactgatggagaagctgtaggcaggagcccccgcagcatcagaacagctgttcagcagctgcaggtacccgagggcatccgagaattccctgtggaaggagagagctggctgtcggaacagatggcaggggtcctaggagggtgctccccacctgccctccagagtacagcctggcccctggctctgcaaagtgccactgtctcctcccacaggctggtggggagaggaaactcagagaggaatgaagcgtgcatggcacgcacggtagcccagctctgggctctctccacagggttgaggccagagctattctcagaatcccgccggaggggccttgcctggaggagggcacaacgacacttacttgtccccatcagctgacccagggctggggttgggctgggtcacacagttcagtgctcgctctaagagatgttcccggaatagctgagtcacctgggccagggggtccactgtggagaggaggaggtgagtggggtggggagcagggccccaccctcctctccaagctaagggctttttcctgggtgggctggggccacacctagggccactgggaagtgccggcatgcccctgggtgcagcccctgccaaggacaggggaaagcgggtggacataactatcaccagcaccagccttggccaggagacaacactgaggcctgccctacactgcttccaaaggaaaaccgacttgagaagatgccattgttggctccgcttccttactccacagcggcactgcctggggtcacttctccaattagccatctgcccatcaatccctgcatgtgcttctgaaagccccaatgggaacgagaggcacccaggcctttcccttcctgcaacccccacagcaacaacccatggcagggagaaggactggggtggccagagacagccagagattcaggcgacaagggacaggacaggaatgaggatgagggacaggagaggggacagggaaggggtaagagagcacctgggttcccggccaagctgtacaggctctcccatggggtactgagcacggaccagtccccatccacgaagaaacggtggcccacggggtggcagagccactgcatggcaggaggcactgagccactctgtgccaggcaggcctggcgggcactgctcaggaagaagcgctgtaggggagggtactgggctgtcacagtggacacagcctggggccagaccccgggccgagtcccagcttggcctggagtccccctggtaaccactgccacatcccgtgtagctcttacccagggagcctctggagagagctgcagggataagcccccagccccccaacccactcactgtcagaaaatgcaaggcccgtgggagactggtcttcactctcaatgcagccgccacatagatctcggccagcgtcgccacagacacggcatcccctgcacactctgccaggttcagggcactcagcgccaggttggtggcagtgaggtgcccgcctgtgtgcttccctggaaggcaagcaggcatgaggctgtgggtggagcacaggcagcagggagcacctcggagcccgccccacgctcagtcctacccatggtgtgcagctggtgcagcttatggtagaccagggctgcgtctcgggcgctggcgctagcatccactcgcagagcacagtcctgctgcaggccccctgcccggcctgccagccagcggcccacccagagacgctgcagcaggtgacggatgaggttccagaggaggctacaagccaggtccaggtgggaggtgggcaggggccggcccagtgcccgcagggccagccacagctgctgggcagcctgggcaaagtctccctgtggatgagggttttccaggtgagaaaagtgaggtcagagcagctgccccaaagctcagaagagccgtccacagcaggctctggaggggtggtgggggtctgcggatgcgtggctaggcacagggaggacgggacagattcatggtgtgcacagggagcaggaacaagggttgacacccagcaccttcacagcctggggtccctgccctgcccactctgccggggccagccccttacccgggccaggtccaggtcagcctgcttgcgatgcctccagaagtacacggcggggcctgagtggggccgtgtgactggctcaccgtagacaaagagaagcaccaaggagacgagcaccaacagcccattgagcagccagaccactgggggcagcagccactgggcccagccagggccatctatggacagagggaaagctggggacacagctcccaggaaatccagagccccaagttcacaagcctgggggctcaccccgagtgtccctcccaaagatgcccaggctggccggtcccacctctgctctcggtgcccagcacgttgcgcccagggctatggtagacgctggtggtatctgaggggctgggaagcccccgggcccccagcaaggaggccaaggggttgcaggacaggcagaggaagacgagcgtgcacagggccaggcgggagcggtccagcatgccccggctgtgcagagacggccgctgctctggctttgcctggtggggttgggcagggtggtgagggcagaatcggagggaccccagagagcatggggctgggaaggggggggtcaggattctgcccaccttactgtgggaccccacgtggctccaggcctcagttattctgtctatgaaatgggaggtaggatctgttagggtcttcccggccctgtcatgaggctcagaggatatggctgggagtggggaagggggcaccgtggcagggcccaaccttgctgtcctcaaagactgggctgtcaggctccgagtcactgccactgccaccgctgccactgcccctgctgccaagggacaaggggctgctctggaaaggtgagccagcatccgaggggggtggggtcagtgtgtcctccacctcagtcttcacgccctccatgagcacgtctgtgttccctccactgccacaggccgacaccagatccttcagagattctgtgggccgaaaggaacagagccaggagtaaaggctggatatgtgaccccaaatcagagcctaggcccttggaggcctagggactactgtagctcctaaagctagcccaggacgctttgatggggctgggttagggccaaagggaggcaccaggtctctttcaggaccagaggtaaccaagggactagagctgaatgcagggctacagccaagggtgaggtgggcagggcagagggtgggccagaaccaagggtggggtggggctagggatggggtggggccgggaggtggagcaaggctagagaagaggccagactggagctcaataaagccaggactcactgcttttgtggacagcagtgcgcagacttaggttctcctgcttgagtttctggttgctgtgttgcagaaagcgaatgtagtcgatggccttgcgcaagacagcagatttattcagctgcacggtgtgggagggagggggagcgcacaggtggcctgtcaggtcgggggttgtggggttggagagccctagcaagggggtgcggagctgctttgcaacattactgcctcaggacctttgcacttgttccttctacctgaaccgttcctcgcctagtagcacccacctcccaggccgggcatagggttagaatgtaagatgcagacagcagggtctggctagctgctgctgtgcctgccgccatctcagggaggccttccctggctaccaccaggggaccctcaccatcctcttcctgctttctctgcaacgagccaaacgtggtggtctcgagcacttattcatcctgcctactgtccatctcccccaccagaaggtcggctcttctttgagggacaatttttgtctgtcttgttcattgctgcatccccaatgcctagcacagccccacctttattgaagaggcctgcaaaccagtttaactaaataaacgaggctggccaggcctggggaggctgaattccaattccctgcttgtccaggctcagtctcactccctctcttccttccagttgcccctgatctgttccttcctagggacaccccggtctgtgcccctgcaggcctctccacacctttgcctcagtgcccaccaccagatccttgagctcaatgattttgtcattgatggaggagcggtagcgcttctcaatggcgttgtgggctgtgcgcttctctccacggctctgggcagaggccggggccttgctgccagctgcgagccggttgataggcagcttctccgcatctacgaccagtgggactgttgccaagatggttccgccactcaccagggtctgcagggccaggcacatgttaccaggtgggcatgtgtgtgtgtgtgtagaccccactcccttatgccctgcccacgtcacccaccggcaaaggccctgtctgcacagtggtgccagagaccaggggactgagacctgccgccttcacagtggctccgtctgtcttcatggctgtcagaagcagcgagtctgccttgatgaagtggggctgcagcaggacctgagggtgggagaggcttggctgtaagctgtgtgtctgggctggggctgccccctccccaacccctggccagaccccctcaccgggacctgctggatctgcgaggtcacagtggtcgttacaggggctgccgtgggggcagctgtgactgtcagtagctgctgggggaccacactctggacctgggtgtgcaaggagacgggcgggacccctggcggggaagccagtggcaggccaggcagcggctgctgggtgttcccgggagggcttcctgcagaaataaagcatggggctgcagacacagacctccctctcccactttcaacctgctcttcaggtctctatcaccgactggccttggatgagtcattgccccatgtggcttcctatggacagtccctgcctgggctctgatgcaaatgcactggcttcaagccaggcctccagtgcgaggttgcgcctaccccggcaacaagcacaccaggactgctagtaacagggcatctcaagcagccgagtggagccccagtttctaaagcctgcacagacctctactcacatcacagcagaagcttcttcctgtgctcctggaagccccaccccgggtgtcccctcccgccacacatcccccttacctgtagagaagcctcccggagggctggggtagcctaacacaggggtggagctgaactgcggtggggctggggctgggaagctctgtggcaggagggcccctggcaggggctgtggggtgggggtctgcaggatgctcagtggcactgactcttccttgataccaggcccaggggagaaagcgggcatggacgggtacatcttcaatggagtgggtgcaggctggggaggggacaggggtgagggcgctgcctgcggcccgctcaggaaggcttcaagagaggagctcaatgtggcaggaggtggagacaagctgcctggggagctggtatcggggctggcagggtctgtgccccctgccccactcccagcatagggtgggtcaaataggccagggaagtcactgtcttggttgttgataagctgaagcatgtctgtgaaaaggagaagagggtgcgtgagtgaggcagagactgacccccaaacagggcatcacacacatccaaacacaaccttatttgcacaacccttgttggcacacagctgtatgtgtgggcaatgccaccaggacagaaagccacccacaggagctggtgttcccggacatacagccattttgcgagcacctgtgctgtctaaagcaatgcctgctgctgcgagtgcatcacaatacctggacaaggtgggcaccacaaggctcacaatcttgccccacagctaggctggggctgagcccagggtcgggcccaagactgcagacttcagagcctgagctcttcccaccatccggtatttgcccaaacatctagaaacatccttagtccacagcaaacagcaggctcacattcattcactcatccagtgagcatgtgctgagtgctgagtgcccacactatgccaggcactgctcccggctgtgaataagggaaatccctgcctagaactaagcaactttctggggagctgggagtgtcctgtagcttgatgtggatggtggtaaacttttactcctgtcttcatggggcatgcattctacaagacatccacctctgagtccacacacatacacacacacacacacacacacatacacactgcaccgtggactcagaccagcttccaagcatttgcccatgaggtgaccaacccttccagacagctctcctgccctctccacagtccatcacccccaaccccacacagaacaaaaggaatccagaggcccaggtgcagccttccctggctccacttggggcctgtttctcaatgtgtgaaacggggggcacgcctccatccacagatccagcagctccagtctttgggatggagatggggatggggagggaggagcagtctagggcagagggggtcttcatataggagcgatgggccccacaccccaccattggccactcctggtctcatcctaaaacgcacccccagcaggatcctctgggcactgaatttgacaaagcaacttagaaactgctgaggagtgggtgattttcccctcccctcagtttacagggggaagaggggtgcagagagaggcaggattgccttgaggccctgaagaagtggtgggatcctctgtgaccaaggaccaactgtgcagcctgggcccactcttcctagggcagcgcaggatccccaaagagaatggcagacagggaagtcccccaagaggaccccagatcagagcagggtcctcatccacactagaaggactctaagggtgggggcccatgtcagaagggtgggtctggtccaaaagccaggcccgctgtggggctacccacattgatggggccaggctagacccctaatcctcacccacagctgagagggtgatgtgatcattggccccattctacacgtgaagaaactgagctgtagagaggtgacttactggcctaagttcttatagagtcagagactcaactgagtccagaccctattttgactccaatgccccaaccactggccactaccctagactacctcaaaagattagctcacctcatcttggagacaagaaaagacactgaggctcagggaggaccacaagcagcccaagagcatgcagtggggttcaaacccaggtctacaaaatcccaaatctattgtctctctgccttttcttgccccactaagaagccaagagccaggctgccatcaccaacccattactcagtggaacagaccaaggcttagggccaagccagctgctggccacatggccaaccagtgtgtctctgtgtagagttctgggctcaagtccaggctttgcctgcagccaagtagcctcaagacccaggcctggccactcagggctttgatttcatctctgtaaaagcaagtgctgtctgtcctgactccttcctcctcatacagactgggacacactcccacctcagccccacctggccaagggccctctcccccagctggtgactagcagcctatctggctcagcccagggccctctaacccactcgtggtggcacccactgggtcagaatgctctacaggacccatgggggcctccagtgctctcaggatccccagcctgagctcccagccctgcccaccaccagcttgaagtggagcctggaccaacagcctcctctcactggccccagtttcctcatctgtacaacagaaaagactaaaccccttttggtacggctgcccgaggctttgcttggcaggcagctggcaccgagtggagacccaacattgcctactgacaggtacccaggcagggaagctactgcaggaggggaatttcctagagcagttggcagaacaggatggggtggcagccccagtcttcctggcttctcaagtagaaactctcctggtttgtggaccccccaggtcacaagtcatcaagtcataatggactttcaactgcagggtttcccatccctttaccccagtccgtgtgagcctcttcgatagatgggggaaactgaggcctgaaagaaaaactgacaattttgacaatctagggctcccactgtcttcctgaaaagtctaagatgcccacaataggcaggggtgctgaatagggcagacgctgtggcagagggacaacgggccctcctccctgcttcctcctggtcctgtcccaaagcgggtgcagagaatgtagagaagaccaccctctccctccaaaccctcttaggtcgggatgctgcttttgggtctctaagcaaacccttcccccttgagttgcaggggacactaatttggttggaggtagccctccacttccccagcgagctggtaactgtcacaccttctccctcgggaaggggctctttcctgctcaagttgcgtagcccgcatgcccgcccaccccaggagaacctgcaggagacggaggcattgtataaagggctggtggggaggcctccaaaaataccttcgaaagtgcaatccatggctccgcgatctgcgcccgcccttggggcgtccaggccgttggccctacccctccccgcgccgacttcacctgtcaaggcgcggcggattttt

SEQ ID NO: 75 - DNA, 25652 bp, Homo sapiens; identical to SEQ ID NO: 73
  source 1..25652: mol_type = genomic DNA

SEQ ID NO: 76 - DNA, 25652 bp, Homo sapiens; identical to SEQ ID NO: 73
  source 1..25652: mol_type = genomic DNA

SEQ ID NO: 77 - DNA, 25652 bp, Homo sapiens; identical to SEQ ID NO: 73
  source 1..25652: mol_type = genomic DNA

SEQ ID NO: 78 - DNA, 25652 bp, Homo sapiens; identical to SEQ ID NO: 73
  source 1..25652: mol_type = genomic DNA

SEQ ID NO: 79 - DNA, 25652 bp, Homo sapiens; identical to SEQ ID NO: 73
  source 1..25652: mol_type = genomic DNA

SEQ ID NO: 80 - DNA, 25652 bp, Homo sapiens; identical to SEQ ID NO: 73
  source 1..25652: mol_type = genomic DNA

SEQ ID NO: 81 - DNA, 25652 bp, Homo sapiens; identical to SEQ ID NO: 73
  source 1..25652: mol_type = genomic DNA

SEQ ID NO: 82 - DNA, 25652 bp, Homo sapiens; identical to SEQ ID NO: 73
  source 1..25652: mol_type = genomic DNA

SEQ ID NO: 83 - DNA, 25652 bp, Homo sapiens; identical to SEQ ID NO: 73
  source 1..25652: mol_type = genomic DNA

SEQ ID NO: 84 - DNA, 25652 bp, Homo sapiens; identical to SEQ ID NO: 73
  source 1..25652: mol_type = genomic DNA

SEQ ID NO: 85 - DNA, 25652 bp, Homo sapiens; identical to SEQ ID NO: 73
  source 1..25652: mol_type = genomic DNA

SEQ ID NO: 86 - DNA, 25652 bp, Homo sapiens; identical to SEQ ID NO: 73
  source 1..25652: mol_type = genomic DNA

SEQ ID NO: 87 - DNA, 25652 bp, Homo sapiens; identical to SEQ ID NO: 73
  source 1..25652: mol_type = genomic DNA

SEQ ID NO: 88 - DNA, 25652 bp, Homo sapiens; identical to SEQ ID NO: 73
  source 1..25652: mol_type = genomic DNA

SEQ ID NO: 89 - DNA, 25652 bp, Homo sapiens; identical to SEQ ID NO: 73
  source 1..25652: mol_type = genomic DNA

SEQ ID NO: 90 - DNA, 127377 bp, Homo sapiens
  source 1..127377: mol_type = genomic DNA
tagtatggcatcgaggagaatggagaccaaacctgtgataacctgtctcaaaaccctcctcatcatctactccttcgtcttctgggtaagtgcccacgccgggccggtggccgagtcgctgtccatcggtccgtatgatgatgctctgagaaaagaagtggggaggaaaacccaaaccaaaaatcaaatctgggacccctctttaaggagacaggcgcggggtgctgggtcggggctgcaggatggcagggtgcgggtcggggctgctggaaccctagacctcgctccgcgcaggctgcaaggggctgcggagtgtcggtgactgcaggttgtcgaccttccaaaaaaaaaatgttaatgcattagtttcttttataatctcccgggatagggtcagctcctggggaaagttgcgggtttattcgtctgttttcctcgctgtacacctttctctcccttcccctaccagccggttcgcggcgcctcttggagctaacctgtggcgggctaggagaggacacgggagcgtggggtttaatctcagattcccagttattcctgaccccacggggctgcgggagggaggcaccagaagcaccgtgcctgcctggctgggcaagggcgaccgaagtctcccaagcgcacgatggggagcaggcgttgtcaccgcgtggaggcgcacgaaagggagagggtcttacataagccgggggcatctttgaggtttcttggtgacccaagagatgagtctttggattcctttcccacctccctgcatccttacactccctatctggtggttctgtcactgcatgagcacaatccgcagcgccctggcagagggtcccctccacttggtgatagagatagcgccccaactctactccccatctatccagtgctgccgccggtccttgaagctcaatgcagaagggtgacgtcacccctcagccagggccgcggggggctgcgtggtgcacctcgcggagggatgcgcctttctgcgcgggggaggggggaggaggaggagggggaggaggaggaggaggagggggctccaggcttgtgccttacctcatcctgtttggcaaatcatggaatcagtgcagggctgacactgcagtgattcactgagagaggtgcgtggtacttaaagaccattccctgttatttctcttttcatgtcggtgaccccgtcttccctagttccttacgcccataatcaagctacagctaccccgcaggggaatgaatatcgaccctcttccccccttgtcccccaaatctgggtcattttagcttctacggcagtcattttgaaatctgaggctctgtaggaaaagccagttcaacctttgcttgttttcttcttgcacccctcacccccgcccctcacccaccaccatatattagccctatttttgctttgaaactggagcacagtgctgtatgaggtaccgagaatcagctagatggcaaaccggactgtttgcaatggtcaaggaagaagcagagatttattgaggatcaaaaatattcctaatgcacccggacatttccttatcgctggcgttggtggttcttcaagtcagggaaggtatggactccccagaccacacataccaggagctctgcaatgagctaggatagattaactggcatattgcacaaggcaaacacagaaacggactttatttggactgacaacgacacaggttgaaatgtctcagtagtggaattgtgagctatgcacagatcatatcatcttatgctctgcctgtaaaaagcagtaacacatgctgattgctgaaacttcccagtagccattcctgggaactggtttagctttttatgtgtttccttaaatctctttttgtttggccctttatcatttacttgacttcctatttgttactggagtgaatcatattgggaggggggaggtatttttatcttccttaaaaataaggttaacagtgcacatgaagaaatattgttctttcagaatcactgcaagctggtaaagaagggggtcttccaggctgaggcttttcatatgagcactttaactctccttgcttacattccacccctatgaatctaattacttaatgcccccaatacatcttaaacaatcactgcattttatgtcctccggaagttccttgatgccttcattttaattttttctactttcaagattttcatagtcttaaatgttaacctggaacattttcaatagtttaaataccaaagccagttctggctttggttgttgtaatcatttcatacttacaaccaaaagaataagatctcttcggatgtgtgaggatattttaaacaagacgttatttttaagtagccttattgaggcatgattcatatgccataaaagccacctatttaaagtatacgattcagtgagttttagtataagtagcacatattttagtatataagtggtatatatttctgtatatttagtatattcatagatatgtgcaaccatcaccccagtcaattttagaacattgcatcatttcacaagaaacctgtttctttagctgttatcccgtttaccccccaatttcaacttcccaccctcatgcccaccccctgccagccctaagcaaccactactttctgtctctagagatttccatattgcaggcatttcatataaatgtaatcatacaatagttgcccttttgtgactgtttttttcactcagcataattacttcaaggttcatccatgttgtagtgtatatcagtacttcattcctttttatggttgaataatattccattgaatgattatagcacattttgtttatccatttgtctgttgggggacatttgagttgattgggtcatttagctatcatggataatggtgctataaacattcatgtacagatttttgtgtgaacatgtcttcatttctattgggtatgtacctgggagttgaattgctaggtcacatggtaattctaagtttaattgtttgaagaactgccagcctgtttcacaaagcaaagcactccttccctttgaccatgaggattccaatttctccacatccttgccaacatttgttattgcctgacttttttattatagccttagtaggtgtgaaggtggtatctcactgtggttctggtatgaatttccctgatgtgtaatgatgctgagtgtcttttttatgtgcttgttggtcatttgtgtatctttcttgaagaaatatttattcatatcttttgaccatcttaagatgtggggtttttttatattaagtagtaagagccctttatatattctgagtacaagtccctcatcagatacatgatttacaagtgttttctcctattttgtgggttatctttagatggtgtcctttgaagtacaaaagtttatttttatgaagtccagcttacctattttttctttttttttgtttatgcttttggtgtcatatttgagaatcctttgccaaaaccaaggtcacaaatatttacctgttaaatgtttataagaattatctctcagttcagtaaatgcagttggtaaatctttcttcagcacttagaactatgtctggcacatagtaggtactcaaatatttgtcaaaacttctgggattatgctaggtagtttacaaaaagatgaccttactggtcttgtttgtttgtttgtttgtttgttcgaggcagagtctcgctgtgttgcccaggctggagtgcagtggtgtgacctcagctcactgcaacctccgcctcctggattcaagtgattctcctgcctcagcctgccgagtagctgggactacaggtgtgtgccaccacgcccggctaatttttgtatttttagtagagacggggtttcaccatgtgggccaggatggtctcgatcccttgacctcgtgatctgcccgcctcagcctcccaaagtgctgggattacaggcgtgagccaccacacccagccgaccttggtgttctttaaagtggaaggtggaggaaagattagacagaattatttcctttgtgttcgtgagttgttttaataggaatttttccctttcattaccttaatttagatttagaactagaaggcatttgaacttaaaatggtggtagagcagtagcatcataaaggttgacatacttgagcatatgttaaaccagaagtctacacttttgaaagagagattattgttttatctggctttctctcctgtctataatcacactctctctctgaggtgtttctctaaagtggtggttctcaaaagggggcagttttgcccccctcccatatttggcaatgtctggagacatttttggccatagctggaggggaggatgatactggcctttcgtgggtagaggccacagatgctgctaaacatcctacagtacatgagacaacccctcacaacaaagaattgccttgctcaaaatgtcaacagtgtaaccaacctctgcactactggacttacatagcagtaagtcctgtgaagaaaaaatggagcgttatgcaaaactgtatatttattggtgtttggaaccaccgtagcagagcatgcgcaacacaatcacgtgagaagaaaaacattctctattgtgtactatataattatttgaagacaaaaggtaggtacctctttatataattgtgtttgaatggatgggatgatttgtcttttggttaaataatatcacctgaatgctgtgtaaactgatccttcatttctcctgatttgtatgttttattttcaggtctatagaagaggagggaaaaacacacctaggagtaagttatcctgtgctttaaagactagcaaacaatgtcaggcttatagtaggtttactcactaaatacttatttccttaatgaatgaatgaattaatgaataaatgaaattttattgactactcttgggctcagttatttatttcaactcacctcaatgggaaagtttttttaaaacaatgttatttctagtctacctgtagtgatttaaatgtgctcctccaataaatatgtgaaaagatggaatagcagatttcacaaggacttgcttatcctaatgatagttcaatcattatatttttgtgatcagttagtttgtcagacattttggttatttaaatttttaattagaattttttaagcatgaataaaaaagatcttgccctatatatatataacaaaatatcctttcttcacaaccaatgtaactgtttcaagatcaagcaaagaaatgtaataaatattttgcttaccaggtgaatttttgttttatttatacatttttaatgtattttaaatactcatctgagttctaagctaagatttaaatccaccatgtgtgaagagaagttccccttgcttaattcaagtgtatattgggcctgatttcttgattatctaaggaggtaattagcttatcaatagtgctatcaaattcttctatgataaaatatcagcgatttgtttttcatttgagaaacatcactaatcttttctggaaaaataatttaaaacaatttttttttttgtccagaaagtttaggtacttgggatataaatagagggaaaagtcttaaagagcaactcctaacattttaaagagtgtttgaatttgggcactgtattagtctgttcttaagctgctaataaagacatacatgagactgtaatttataaaggaaaggggtttaattgactcacagttccacatggctggggaggccccaaaatcatggctgaaggcgaatgagcagcaaagttacatcttacatggtggtaggcaggaaagcttgtgcagaggaactcccatttataaaaccatcagatcttgtgagacttattcactatcaggagaacagcatgggaaaaacctaccttcatgattcaattatctcccactgggtccctcccacaacaagtgggaattatgggagctacaattcaaaatgagatttgagtggggacacagccaaaccatatcaggcacatactttagtttatagttattcttttgcacatcaatacaattcagtcattcactgaatgtctattacatgtcaggtattgagtagtcaatagaatgtgtaccaacgtttactagctgctgcttttggcattttacctgcattttaaaataacacatgtattctatttctcaacttttcagttttagatgttatgtactgtcttcccactatggaagatgaagatttagctctcttgcccttttctcccatacttgtatcttccctatattgtagtagaccctaatatatcattttatcattgtcatattttggttagagtggtcgtcagtgatttcattatgttaatgactaggtaaacctagtcacagctgagccatgtagtgtgtatattatgattacttgcatagctttttgttttctctacagttaagaattgccttgtttggtcctttgctttttagttgcgtgctcactcctaatttatccctgtactttccccaagatctgtttcttcactcagtctgttcaaacacttcatgtgtcatatcagattcttgttctcagaggcatttctcccaaagctttctgatcttcaatctggactagtattttctgggcctttgaaacagtggacatcaatatagtctcccttcaccatcatcctggtgaatcctgtctccttttacgttggatcctcggtttttgagatgtcatgtctttctcttccttggtgtttttttttttttcattttggtagagcaagtttaataattttctggaaaaaatgatgtattgggggttaattttttgagctcttacaggtatgaaaatcttatttttctcttgcacttaatttgatcatttggcttagtgtagaattgtagtttggaaatcatttatcctcagaatttttctgtttctccctattccaagtcttgttcttgttgttggtgttgagaaatcagatgttattctgattcttcttgaatcctgcttttcttctctgaaagttcttatgatctcttgcttgctctgaaatttcacaacaatatgctctggtatatgtctattttaaactatttcctgggtaccctttcaatctggaaattttctgtatacctttcaatctggtccttgagtttggggaaattttcttttgttttttgttttctttaccttcatttttttctgtcctatttggatgttggacctcctagactaatcctctaattttctccccttctattttctacctctttttcttcttgttctatttctgggagatcacttccactttatcttgctgctattgcatttttcatttgtttcatatgttaatttctagaagcttctttttgaggtctgaatgttctttttttctagcatcctgtttttgtttcatgagtgtaatatagttttaatatctctctgaaaatattagtaatttttttgagtttgcttcttcctgcatagtttccttcagactgttctgttttctggcatattacaggcttacctcaaatttctggtcatgttttgctcttttttctgtacgtgtttaagagggggcactacgaagctgattggaagctcttagcctgaagtacgtgtttatcaattgtaatttgggtgatttggctgggcagttgagttttaggaccaaggtcaatatctttaggtctcttcttttggtctcatcagatatcctacagaagaatcttctaattgctctctgagtaaagaaggtgagaatatagaagtctctatatacagtatataaacctttgcttaagctcctgtttccagtgtagaatccatgtccactgtgcttatattccccagttcagggaccatctctttcaccctccaaagaataaatatctgaacctatagtagaatgagtagaggccagagacaggaagttggtggcgggggtgggggtggggaatctaattgtttttcgaaaaactcttactggaacctacttattttagctcccctttcctccctacttccaggtgtgcatggagctgctaacccctgagtcttttggggatgtttgggtgcaaatattttattttgtgcttctctcacagctgccataagattttgctttttctcagctttgaagagatcattgtggttgtctcctctctttgttattgtaggttaaaaacattcttttagtgtcatttcagtggagttttgggagatagccagggtaaatggatgtgttcaatccgtcatctttaactggaagtcctttatatctttatctctacatcagatggtactaattaaatacccagttgattgtgagtgattgaatagagcatctaaaacagcaatagtcgggctattctaataaatattggtacccagttttcaatttttaaaaagcttttggatttcaagggaagtgttctaagttggaacagacttactaagacacatcctctgtaaggtcgtctggtcatcagcgactggacaaatggaaatgaagctctgaaggttgctgctgctttttctgcccctcttatttcttcccaccagatgaagtcccatgtgtcttctgacctaattcggaccttgctggattaatttagtgtttatagtgtggtgtgtgtgttggggagaggaccttgatgttaaactgattattgcttggctgtttttcttttactacagtgataacccttcatggttattatgggacttgtacattataatctggagttttttcttattttatcaacttaatttactatacgcaatatacagttaggatgtgtgaactaccttttataacatttggggaacattaagtctttttcacttagtcgttgcttagaaattagctgaattttggtctaaatagaatgaaatactcttctccattctaatcacaactagagttcttgatttgaccttattgtgagttgcattacttattcagtgattgttctttatatactgctttaagtaagtacctcagaaggtgctgaaaattgaaagtcattgtgactgtgtttctttgtttaaacatgttaaactcttgacatagatgactaatgcactgctaaacccatttgaaacacactttaaaaatatattcttatgtatttttctcctttagttccattacagcagcttccaatctgagttacctcctcattgcaagcagatttttggaatgctgctcttaaatttcttattttggctgttattccccttgccatgacagaatgattttcattcttggctgaacatttttttcatcttactgcagaaccccactattcatcaagaaaaggatgtagaggaaaaaggagagggttttctttgttttgtttttccttttggttatttgatcagttaaacaggtaagcattttatttatttgtttattgccttttgaaacatttattattttatagatttagggaatacaagtgcagttttgttacatatatatattgcatagtggtgaagtctgggcttttagtgtaaagcatttaaaatagtttaaacatcacattttgactctggaagattttctttggtgctttctgcaagatatagtgggattttcccatcatcatctgtttctaggagaaattccaggtgccttatactagaggatgatgagatgagtcagacacaggtactggtgaacagacataggtactagatcagtgattctcaccctgtttgcccatagaattgcctaaggggccctaaagaagatacttagaccccatcctaagagattctgattcaactggtctggacagagtgccagaattgatatgctaaaatatgctcccaggtgattcagctgtgcaattaggattgagaaacattgatccagggagaactcagtagataatagtaggcttggttcacttgagcctcctggatctgcaggtagctacggagtatctaacctagtactggcaatattaatttggtcttcgttgcctgagagtctggaaccaggcctgcagtgtctttcagtaaaccaaaatggccttgcactcttaggagaccatgctaatcattcctgactaaagcaatgtgtatcagaatcaccaaggacatttaaaaacacagattctcagccctatctcatagagtttaagttttaattgatatgaagagaaacctgggtgtgtgagttaaaaaaaaaaaatcccaaggtgattctgattcctgggatgtagctctatggggctgtgatgccatttgatataaatgagttcttacctcatgaatgctttcctatgatatgatctgtggtaccataaagctgaattgaggagagtattccagaaaacaagatgtagtcaatgtagcatttttcttacccacttaattggtctttggcaagggtcttcaagtgaactcttggagtttggagtagtttccattccttagggggaatctattttttttcacagttattctgagaagttagggaaaagtcttggtttgtcaaagacaaacctctgtcaaagagagaccataatccaacatgtaaaacaaaacccagaattcattacttaccaaagtaagagacagctgtgttaagcatagtctgtgagtgaagcagattactgatctttttgggaaacatagtggtgttttggttacagaggcatgagtggttgaacttgaccttagaagcatggctatttgagtgagactgttgttgattgagaagcatgttcactgcagtgtgtctgctgctgatttgctgaccttgaatcgtgtgaagctcattgtaattggcttccagaagtgtgttcctgaagcaagttgagttgtcattgatgattagtctgaggtgaattgccctcaatcaaacaggtttaaaagttggtgctggtggttactagttaccatggctattgaataatcaatctttttctcaccagtaatacagagacttttattcttacctcagactgctattcttcttagtgaaatgaagttgcttctgcacctcaattcccattcattcttcaaacatcatcatgatgatgtgtagaactcctggatcagttcattgttctaatcactccataaatacttgattgtttatgatttccagggattagactaggacttcccaaaggtagacccctttggggttgaaaaggaacccaaagcttgataagactgtggaaaatgttgctaaacatcccttctacatccccatctctatttgagttaaagttctgtttctggtgaagcttttgcggacttctagctcctccagatttctgtttcatattttgaactgtatcactcacttgatattcttttaaccattgcattctattgcagaggatttaaaattagacttaatgtgaagtctcggctagtacctttgctgtgtgaccttaggcaaatcacttattctctctgagccccagtttcctctttagaattgaggatatctatgattacccacctcagtcaagtgttgagggtcaaataacattcaagtgcattataaactaaagtgtgatacatatatattttggaaacattattccttagggtgtaaagtgtttctttcctagtttcttgtacatgggaggtactgtatcaatacttgttaaatgaataaattggtcagaatatgccctatcctggaaattaagaatgattcactttcagggttttatagtttgctaccaaagagagctgagttaacagagtggtttgaacaggaaccaaaaataggactcactgagtttggtcctgtcattgggataaaggtattcctatttaggatgaataaatataagtctgacacttacagtcaaatgaggaattggtgacttccattattctttttaaaataagcttttctttttggaacagctttaagtttacagaaaaattatagagatagtgcatagagttcccatatatcataccaccatttttccctattactaacagcttacattaatatgatacatttgttatagttaatcagtattgataaatttttattatcagaagtccatacttcattcctatttcattagtttttacctaatatcctttttctattacaggctaccccatattacatttagtagtcatgtctccttaggctccccttggctgtgacaatttctcagacttttcttgtttttgactgttaatagttttgaggactactgctgatgcattttgtagaatgtccctcaatttggatttgcctgatgtttttttcatgattacaatgtagttatgtgctctggggaagaagaccacagaggtaaagtgctatttcaatcatatcatattaaggatacataccaccaacattatttatcactgttgatattgactttgatcaccggggtgagataatttgtcaggtttctccaccgtaaagttgctctttcctcgcttctcatacggtactctttcaaagaaaatcacaatgcacagttcacacttatgtgaagagttatgttctacctccttaagggtggagtatctaccgttatctttattaacaaagatgattttcattcaacaaatgttaaaaccaacagtaagtatttgtttaaacaagtagtaaaatactaaaattatttgagccgatcagaaactggacagagattcttgtttaccattattatttatgacttggtttatctagcaaatgcagtaagaaaaaattaacattggagaaagagataaaattatctttttacagatgtagttgttgtaaactaaataacccaagagatgttaggaaaaaactactaagagaatttgataagatggatggatgtaagagaaatatacaataattaatttctttttattattttagcataagccttaggaaagagaggaaggcatttcattcacagcagcaacagaaatcataattacttcagaataaagttaataagaaaggcaaggctcttatatgaagaacaataaaatcctatcttgggtcataaaatgagatctgaacagattaaatgataccagatgttcttgggtggggagatttagtatcataaaaatatcagttttctaaaaatgtttttaatgtatttcccaatagaatactgacaggatttgggggagggggaggagatggtacttgataaaactgtattgtttacgtagaagaaaaaatacctgagaaatcaagagatattttcgggagggaaaggaagtatatgccttattatcagaatatactattgtggcaggtagactataagatgtcccccataatctcacctcctgatattcatgcccttgtttaatcccctctgcttgggtgtgggtgagacctgagactgtcgtctaattaatagaatataatgaagtgatcacatgcatatgactatgtgtgcatgattttattacataagattgtaaagtctatcttgctgaaagactctgttcctttctggctttgaagaatcaaacttttatgttatgaactgccctgtagagagggccacatgacaaggaactcagggcaatctctggctgacagctaccaagaaactaaggccctcagtaaccagcaagcaactgaatgctgccaatagtcaaatgatctgggaggcagattcttccccatttgtacctcagatgagactacagccctgtctgatgctttgatcgaagctttgcaaggccctgaaacagaagactcagctaagctgtgcccagatttttgacccacagaaactatgagataataaatgtgttttgttttgagcttctacatttgtggtaatattgttatggagcaatacaaaattaatacaactctaaaatcaattcaatatgatgtttgcttagaaatacataggtcggtggaacaataaagaatccagaaataaattctagtgaatatgatttaataaatgaaaaggagcattcatttcagtgagagaaactagatttaaacgatcctgatactacgggatatctatatgtgagaaaataaaattggagccctcacttagatgatatgaaaacttccaattagtttaaatgctcaaatataaaaataaaatcctatgagaaaatgtacataccatatgtacaaattaggagagagactgccttatgtaagctggaaatttggaagcaattaaataaaaaataaatgtggttataaaatttttaaaaattatgtgacaaaaggtacaataaagtcaaacagttgtagtgggataaaaagcttgtcagactattaattaatatactgcttccttcattcagaaagctttgtttaaaaaaaagtctgtttactttctggtacaaacttcttctcaatgtggactgacaacagtttgctgaccagacactggtttgtccactaaccacactttgggaattattgctctagagaagtggtaggcaaacgttttctgtaaagggccagatagcaaatattttattttatttatattgtgggccatatagtctctgttgcaactagtcacctttgccattgtagtgtgaaagcagcatagacaatatgtaaatgaatgagtaaggctatagtccaataaaactttatttgcagccagatttgacccatgggctacaatttgctgattcctgttctaggggatacaactagaaggaaagtccgatccttaccctcaagaattaaaatctaaagtttaatatgggcctattggagtgggaatgaagaaaggctcatgatttttatcttgaaagagctggtaacgcactgtctaataaattaaccgcctgagcacttcaaatgtggatagtccaaacttgggatgtctctatgtgtaaataccagactttaaagagttagtatgaacactgtaaaatatctcattttttacattaattgcatgttgaaatggtaatattttggatatagtggtttaaatatactagtaagattaatttcaccagtttctttttactttgaatgtgatttttgattgaagctttgtaatatgctaatttaaagttagatatgtgcctcttggacagcaatgaactgtaagagagagagcttgtggggctggggaatttggaaaggtcacgtggacagagttcacttggagaatgacaggattttgacaagtggttcttggagaggataatgaaggctatcagcagaatggtttctgtgtttaggacaggaataagtttagctgtaataaaaagtgaggcatgcagcaagtctaggtaagtagacataagccttattgtgggttgattgcatgagttagggttttgggcctgctttggccagtaggtgaagactagtccatacttttgagcagggagcagtaactttgggagctacactttgcaggccttatctggaagtagtaagttggttgggttgaaataggaaaagcaagaagtggtgaaaccaggttaactaggtaagaatgaaggtctaatatagggtgacaatgggaatgaagaatggaggacaggggacagctacttcatgatgtggcaagaatatttgtgagagagaaccccagtattctgtgcttaaagagcatggatgatggtgatactctcatgaaaatgcagaccttagaaaaagcgggtttgagactaatatgatgtgttccattttgcatgtgtttagtttgagacaaaggtagatttaaaagataggctggttctcagaagcttgtttgcctatatttttcattgatagaggtggccctaggaaattatttatttttgaccatctctatacttcctcaccctccccaccatctgccatggtcacagttgattgacctggagagcagatctgacctttaaatatttgtttgttgggtgttcagtggaacttgagataatcagccttgtaagatgtgaatggagaagttcttttttaggcattcaaactcaagatattcatgtcctttgtagggacatggatgaagctggaaaccatcattctcagcaaactatcgcaaggacaaaaaaccaaacaccgcatgctctcactcataggtgggaattgaacaatgagaacaatggacataggaaggggaacatcacacaccggggcctgttgtggggtggggggaggggggagggatagcattaggagatatacctaatgctaaatgatgagttaatgggtgcagcacactaacatggcacatgtatacatatgtaacaaacctgcacgttgtgcacatgtaccctaaaacttaaagtataaaaaaaaaaaagagacgtggttggtgtaggggcagaaggagaaagtgacccagagaagtagcagagacatgtgagcggtgaacagctggagttggaccagtgaactcctggtcactagactgtgtaggcccctggacagctctactgtagcccatgcttttcccttctggcctgaagagtggcttttcatagttgggatgaggcctggctgagtgggtatgattcctagccacctcatttcctcctctcttaaacccccttggctaaccaaaatgggtgatcaggtagatgtttgaagtggctagaaaggcaggattggaattaaaggagggggttggggtggagatacaaagttgtgaaaggccatatgttcatttaagaggcataagatagtaaatggtattcttttcaactgcacagtaagcccagagttctaaatgcagttaatgctgagttgcttgctgataataggtgtaataggtacagcaaagcatttggccggcagcattaatggatgcctacgattccagtagagacttgtctaagggataaaggttctcctacagggtaagagcaagttacttattaatctccttaacagctgctgctgtatttgggaagggaggctgcaggttgttttagtttatatccttcagagatgttttgaggacaaacaagtaactgcttggtatgttgtgtttttcaaaagatagccctggtatacagaggtggtagctagcctgagggttatgtaaatgacttagaacaggccgctctttgagtggtgcctcaatgagcactttggggggcttttttctcatctagatgacaaatggaggaaaggtacacttctccacatcactggaaattcagtcttttaaactaagatgttagaagtgaactctgagatatagcatgctaataattttgagagaaaaaaatacaggaaaagaaaggtacataagtgaatattgtactaaaaacgctgttcaaatgagctatctacaaattacatatataagcatatgtgtacatgtatacatatacacatatgtatgggtgtacatatgtgtatatgtattatgtacatatatgtatacatatgtgggtgtatatgtacacacatatacataaatatatggcaagccatttttgtaaagaaaacaatgcatgtaacaaatcctgagggggatccacatcaaatgttaacagctgtggttgggtgataagacaattaatatactacttctttctgtgtgcttttcttttccaaggtgttttccttcttttatatataacatgaactactttcataatgaagagaaccgttaattcttttttaaaaaatcagaattactctggacattttctagtatataattttatgtctcaaaggtagagtgcctttattttttaccacatcatctcatttgtaatgtagttcattaacccagtgcattttatggatttgattaaattaatgcaaggccgggcatggtggctcacacctgtaatcccagcactttgggaggctgaggcgggcagatcacatgaggtcaggagtttgagaccagcctggccaacatggtaaaaccccgtctctactaaaaaaaaaaatacaaatattagccaggtgtggtagcatgcgcctataatcccagctactcaggaggctgaggcaggagaatcacttgaaccttggaggcagaggttgcagtgagccaagattgtgccagcctgggtgacagagcgagactgtgtctcaaaaaataataataataataatgcaaagcaaaaatgcattaacttgatttttaagccttgtctcttcaaaataaagaattttattttgttcctattaggcatttaaattttttggtgatgtatttcaaatgtaatcctaaaacagagaacgatatgataattttctgtgtatctactaactaaattgtgtatctactactacacctactagatagtagattttggcattatgccttatttgcctcaggtattcagtttttaaagaaatatgaaaaatttacagttgatgcccctacatctcctcctctctgtcataaattcagagtttatcagttgggcttatttttatacacatattaacatttacatatctataatgattatacagtattttcatattttaaaactataaatgaatcatgccatgcatattgttttgaaacttacatttttgctcaacattgtttaatatgtttccatgtcgacagacctggctttagtttagaggctggcaaactttggcctgtgagctaaatctagccagccacctctttttgtaaataaactttatgtattgtctatggctgctttcacaccaaaacagcagagttgaatagctacaacagagactgtatgacccagaaagcctaaaatatttactatctggccctttgcagaagaagtttgccaacccctagtctagttcattctttgtgagagggtctccagtgtagcctattgaacattaaacaatttggcttttatatattttgtccccgttttccatacttagcaaaaaaataaataaacttaaggcagctatgggctctgttcctagatgttttatttagtggttttggagagagaagatacttttattcttgatttagtttttctcaaagtggattattattgcttgaagagagaaaagggctgtgtggtccatgtggagcaaaatgagagttatgaatttttctgtcagcaacaaaggagtaaccactgcatgcagttaactgtcttaggttattgtgatgttgttactacaattaatagctactactatgatcactgagcatttagtaaaggtcaaggatagtactaagcactccacatgcattatcttgtttattccttgtaacagtctattgaggaagtaattactcctcattttgagaggaggcagctgaggtccagagtgtgccccaaggtcgtgtttaaagtgaggtttcaacttggacctctccagccccactgagcccagtgcacgattccaggagtacagttctctggggtaaacctttgaagagatgggttagagggtactctgagaatccctgctgccccaagggataaattctcactgactccagccttggcttctaaaatctggccaaggcttgatgcacaagggagaagcctctgttttccgcaaaggtcaaagtttacaactgtagtggggatagttattccacatggctcctttgtagaaaacttaggccaggtccatcttgtcacattttttgctatcgtcccagctcaaaactttagtttctcaaggtttacatatagtggatgctggagatggtccaagggaccttaatgtcaggcccagtgctcttgcgagcaacttagcaactgctcattcactttcaaaggtttgactcttgtgttagtcggttctcacactgctaataaagacatacccgagactgggtaatttatgaagaaaaagatgtttaatggactcacggttccacatggctggggaagcctcacaatcatggcggaaggcaaaagaggagaaagacacatcttacatgcggcaggcaagagagagagcatgtgtaggagaactccctttataaaaccatcagatcttgtgagacttattcactatcacaagaacagcacgggaaagacccccccctcatgattcaattacctcccactgggtccctcccacgacaagtgggaattataggagctacaattcaagatttgggtggggacatggccaaaccatatcaaatctataaatatttcttctcccctttagtttatggctgctgtgggtaagacataagaaatcttgaagactttcatggggatagatagtcttttcactctgtcatttaaaacaaaattaccttgtgcctaaaactctccaaattgctggctcagacacctgggtattatttctcctgctgctgtgaaatatagtaagaatgtgaacttgcctcctatggctataagcccccaaccactttgaacaagacagaagccaaggcattaaaagctgctggagatgcagggtttacttttgctttgctttaaagaaacaaagctgaaagcaatgggaatcttcaggcattttcccatgagctgacactagctagacacagtaatctgcacacggacacacaggtaaggctcattggcacatggccaagtaaaagtttgtcagctgggatgatcttgcctcctctacctgaacctgctttcagaaaataatttgaccagtcacgtatactgcctatgaatggtaacaggaattcctgcctgtatcaggataattagctatattacctctggtgagaatttaaggtattagcattggagaaagtctcgttttaaaaaagaaattcctcccaggctgttaaaattacatcctatagatggacctctttttctgcttgtaagaccagctacacgccaacatcaatgacaataatttatcatatgttacaaatacaaagctcaacacaaaatgtttcttaagttatattagttaatgcacatgtattctacttctattactaccatcacaccaaactgagataccattctcctgtcccagatctatcaagtggcagaaggaagtgttatagaccctggggtctaactttaacagacctggcttaaatcgagtgttcatttgtaaccatgtcaatatttttccaaccctgctttggggcctctgacctccctttgcacgaggtctctatgattgtaaaggtttgactaataaggattttggaggatttgtattttaaaaacaatctatttgtaagatggggcattgatcagatagactgagaaagctgcattcagattaagtctaaatttagcagaatgtgtaaagttgtgttaccttttgtgtgaaaagtaaccccctacacctgctccagcaattaaagaatggagtttgtctttcttctctcactcctgcctctcacaaatcttttcttgtgtctattgtatccagttgcctcaactataaatcctaggttttttctttcagcctcattgacatcccatgaatcaccaagccgtggtgaatttcattcttagattaaattagtagctcttgcatccctttccttcttttcatctcaccactgttttttcattcacttggacctttacagcagtttcctggttttcctacctctagcctcattttatcccatccattctgttgaaatagttattttaaaacaatctcataaagccagtgtgataaaattggtagtttcatgttatctacaagactaagttcaaaattccatgcatgtgctgataaaagacccattatggtcctcactgtacttcctccccattttttagctttcattctggtcaccagctctagttcctctgcttagcgaatctcgcttgtcttcaagatttcattcaaatgtcacattttgtgggaagccttgccttttttgacacgctctccctgccactctagagtcattttctttcctttataccttctttgaactttgcccatccatcatagtactcatgttgtatcgtaatcatttgcttacctgtcagccttcctcaattactcatcgcatttattcaagaaatatgctagaaatattgagtgcctgttcaaatccagatgctgagatttaattgtgaataaaatgaacaagatgatctgtcaggaagggaggaaaatagacaataaacaagaaaataaatatgttaacttcaagcattgataagtgttccaaaggaaagagttcacgaggtgctggtgtgggagcctacttgatagagtcatcacagaaggcctctctgaggagttgacatttgagctgagtactgaaggataagaaggtccataatctacaattcagatgatgcagaattcagtgttttttgctatttgctgaccattgttaacctgatcgttctagttattgatatctgctgaagcacgtaacttagaagtcagtttatggttttggtttgctgtcactctccctgcgttgacagcatcgccagatttacctttctaatcaattattttagcatgaagaaacataaacctgatttttttttcttttttttcttttcttttttttttttttttttttttgagatagagtcttgctctgtcgcccaggctggagtgcagtggcacaatctcatctcactgcaagctccacctcccggattcatgccattctcctgcctcagccttctgagtagctgggactacaggcgcccacccccatgcccagctaattttttgtatttttagtagagacggggtttcaccgtgttagccaggatggtctcgatttcctgacctcatgatccactcgcctcggcctcccaaagtgctaggattatgggcatgagccacagcgcctggcaaacctgattttttttaagggagatatataaataatgtagtagaaatggaaaaggactgttttagataacgtccacatgggcattattaaaagatggccatgatttaaagcacttcattgttgatgcaattgtgattgggatgaactaatgaaattagggtgggccattctgccatttcctgaaactcacatgatcctttatttctctcttctttttccttatatctaaacttgaaaatttctccactcatttctcttatccaaattgatctctcaaatcatctcaaacgtgtggagttctgcttttcctagttaatgttattcaggtgtggacttgcatatgtataaatggttgtgtgtcttttttgtgtttgaaagactctttatgttgtgagagatgtgtaaaaggctgcaaaaatatttatgtacagtttagagaataatttaattaaaaatcacatactcacacagttaatctcccaggttaagaaagagaacattgtcagtactcccagaagccacttcagttcccctctccctctctatcatgttctcctcattcccctcttccctttcctgagaaactccatacaaacttatttaccatctccttgattttctttatagttgtaccacctatgaatgaactcttaagtggccaaattcttttctcttttttggtgtatttttgaacattatataaattgaataatactctttgtattttgtaacttctttcacttaacgttgtttgagatccatccatgttgctgcttggaggtatatttattctttttcattgctgtagagtatttagttatatgactataccataaattatctgttccattatcggacatttgggtggtcctcaatttgcttttatgaataatgctgctacgagcactcttttctttcctgttgaacgtgtgtgaagatatagatgcatctttaacttaatatgtaactgttaaactggttttttaaatggttgtatattggtgataattctagttgtctgcatcttcttcagcacttcctcttattaaacttctcaatatttttccaatctggtagatgtgctttcaatttgcattctctgggtaataatgaggaagtacatatttttgtttgttgcccattcttatatcagtttctgggccatatttcattttcccataagaggcatcttatttttcccctaacttctataagttgaaagatttttgattaataaattacatttttaagaaaattttttatttctataattcttggaatttttatataatatgtataaaatatttgtatacagataataattttaatacaatacaaaatatgtaattattcaatggatgtgatatagtttggagatttttcccctccaagcttcatgttgaatatgattcctcatgttggaggtgggatgtagtgggaggtgtttcgatcacggaggcagatccctcattaatggcttggtgccatcctggtaatgagtaagttcttgctctgttaggttcctgagagttcctgcaagaactggtgaaaaaagcgtggaacctttctcccctctctgttgctccctcttcttgctatgtgacatgggggctccccactgccttccaccatgtgtggaagtagcctgagtccctcaccagaagcagatgctggtaccatgtggtaccatgtacagcctgcagaaccgtgagccaaataaacctctttataaatcacagagtcttaggtattcctttatagcaatgcaatgcaaatgaatgaatacaggatcactcatagtgttctgactgatcttgtttctttgcttctctgaatcttgcagcttatcaccaccaactggaatcttggcctaggcattttcttttaagtcctaaaaatgcccagtgagccttctttactaccttcaagtcccctcagtggctcagagacctggcattggactagatggattactcagatttctttcaaccatcatttatgtgtctgataaagtattgtgtcttttgcttcacctcagtttgcagaattgggagtttttcaatatttgatatcaggaaggctttgaatatttttcatctaatttcttttgggggttatttccttggaatatattcccaaatgtggaattataaaacaatgtatttcttttaacctggtatgtcatatgttaggagatgaaaagattaaatgacctatttgcccagagtctgtcccacacaggggcttatttaaactgcattttgttagtttaatgagtagtatagatttttcttttaatttgactaaatgttgaactcagggacttgaatttttaaaaagccgatttcttgaaaaatcatttattgaaagtctaatgcatattttcattatgtcctcagagtatatgatcaattctttaattcttctgtgttctactggaacaaatgaccaatttatgaagttgttgagagacttggtcaatggcaatgatttatggctacaaaacttgagacatgagtataatgatgactcctggaaaaatgtacttgagatgtttccagattagcatgtgctctttagctatggaggaaggcattgatcatattgattacctatatttgaaagtgtcctaaataacccctcagccatgaatattcttcattttttccctctctgccagtttgttacctttcaccaccagccttagctgactttacataataggttttgtaataagtgtctaatgcaaaagttttcaactgggggtggttttcccttccccacaggggatatttgacaatgtctggaaagatctttggatgtcacaactgaagaggaaaggtgcaactggcatctagtgggtaaaagccagggatgttggttaagtatcctacaatgctcaggatggccctgcacgacaaagaattatgtggcccaaaatgtcagtagggctgagactgagaaaccctgttttagtggaaataagtttttatctttccttacattttctccccattcactgttattttcatgttttgtcagtgaattatcagttcacatttatgatctgtggagctctaatatgattgtttaatctgctttgttgtggagagtctatatatgtacacatatacacaataaaatttgccaattttaagtgtataatttgatgagtgttgacaaatgcatacagttgtgtgaccaccatcataacagtgtttgatatgtttaaatttcatgtagtttccaatatgcattcattaaataatattatattctaggacagaaggaaacctgaagtaattcaggtactgacaggtagcttgtgactgataggtagaatatacatggtaattaatgaaggataacacccttgaactgacttctgaattttaccatattttaatattaatctaaagattcttaattttacttggacatgatttgacccctggatgattggctgagaggagtttctatattgtgaaacaggaaatctatattaacatctctcataaaatactgagttttatgtccacaaattcctagattctctttgcatcttctaggtcttttttattcctgcaggtataaaacaagactgagtgtttgaagggaaaaacagaatatatacttctttcctaaaggataatttccagaatgttggttgctttggtagttgaatttaaccttggtaagtagtagcagttgtctgcagtaaagtggatggaaacccttgattccattgctgaaccaccttcttagagtgagaggtttgtcttgaccactaattgctataattggagcttgagagatggtttgagatgagtcttgaaatgataagtgtgtctatctgcttggcaggtgttttctctttccttttaattccctttccaaatcaaggtggtatttgtagtcaaggtttcatagggagtttgctaatgcgtctctaggagaaacatagaaaagctagatagaagggtggtctaacttgatttgtgtcctcatcattgtggtgtaatgagaatataccaatttttgcatgatggcaaaaaatgaggtaagcactggagcactgaaacatttagaggtatttaactacatcttaatactataggctatggctcagaataaccataggaatcttgctgtttttatttgtgggtttattttaggcaaactatcaacagtgctgaaatgatactctgtgaaaaggaagaaagaatgtacccacaaatttaaaatgctgtgcttgctggttttcttctcttagccttatccatcaatcaagaattgttggagaaaagtcacgttgaataattctgccagttccactatgtaatcttgggatgaattgtgtcgctctgcatggtaacctcagtatttcataactgaggatgaaaatggtttttcaacttgagaaaaatcaggactcttttggaacaatatttcaaattccaataaaagactattttttgtttggatgttcatcctctgtcccttcttccttagcctcttagcccaaggtgctatttttatgtactggcagtcgagttccagaagtgagtgtcttatcctgaagtgctattttgaaatggccttattctattttttgaaagaaatgactaataaaatgatcccagtttatcattgtaatggactagaatatgaacaaaaacctcaggcatttaaattcccatttgtctctactcttcttcactgcgtactcttctactgtttactttcagcatgcttcttgacatggaagccattttgctaatggatctgtggctatttcaccccaggtcgcagccaggttagcattagaaggatggattggattttctgagttcagaatttctatttggtattgctcaagcctttagttgcttagccacttcaggccacaatttggtgaaagagcttaaagagcagtgcaaaactttcaaaacctggggtgtgagacagatttggaatcttgctgtaccagatttgtgtcctgatatttattcgatcagaattttctcgtgtctttaaaaatcctttaacaataccattaaatggccatgtattttttcatcctgaggttcatttatttagcaatttccctactgttgcatatgtaggtgtttccacttttttactaatataagattatgattagtagcacttaaatctttgtcttcgcatttcattatgtgtttaaactaatttccttgtggtagaattaagcatgaatatttttaaatattgaaaatttttgctagaagagctttctcaaaggatgcttaccaatatgcccattaattgtataagaaaatgtgaatcacaacacactcttgccattgacaaagatttttaaaaatttggaatgtatagatttaaagatggtaaatgatatataccttttatattataaggtgaaacttaaatatttgtattttatgaattttctgttcttttgctctttttctaccttctgttagtggtatttgattgtttcattagaatgtttatacattaaagctaccaatccattgtttttgttgcagaaaaccagatttatcattccccccttaatttatgaggtagacgctaaatacattatgcgtttgataaaacataaattcatatatagctatgatgctatagagtaggttgacgttaatttccatttacttctctataaagacctaactggtgataattctaaggtattgtgactacaaatttctggtctgatctggattctacttttctccaacattcttatgacataaccccttgcatttctgcaaaataatatttggtcataatgtattatcctttttatgttgttggattcgatttgctaaaaattttttttgtgacttttttttgtgacattctgttgcccaggctggagtacagtggcatgatcatggcttactgcagccctgacctcctaggctcaggcagtccttccacctcagcctcctgactagctgggagtacaggtgtgcactactatgcctggctaattttttattttttgtagagatggagtctcattgtgttgcccaaactggtaattttgctaaaattttaattagaatttatgcatcaattttcatgggggttgttggtgcatagttttcttataatgttgttgctttttgtaataacagaatgctggcctcataaactgaattggtaagtgttcctttttattctgttttctggaagtgattacatagaattggtactggtcttccttaaatgtttcagagatttcaccagtgaagccatctgggcctggagttttctttgtgggaaagtttttatctatgatttcaacttctttagtagatatagatcaattcaggttgtctggggttttttgagggagctgtggtagtttgtgtctttcaaggaatcagtccatttcatctaggttattaaattttttcagcttttgtatatctgaaaaaatttttacctttgtttttgaaagctatcttttgctagtatagattctaggttgatagttgttttcatttttgtattttgtattaaatgtattggcataacatttttaataatattctttgattatgcttacagtatctgtagaagctgtagtgttgttacctttctcagtacttacattggtaattcatgtcttccctctgctttttcaaatcagtccaactagagatttatcaagtttgattttctcaataagcaagttttttatttcattaatttttctttcttgttctttcattgtcttattgtattgattttagctctgatctcattttgttccttctacttgctttggaatcagttttctcttttttttctgatttctgaaggtagaagctgaagtcattgattggagacctttcttcttttcccatatagccattcaatgctataaatttttccctaagtactgttttagctgcatcccaaaatttttgatatgttgtcttttcattttccttcagttcaaaattatttttaatttctcttttgatttttttctttaatccgtggatgacttggaagtgtattatttcattttcaaatggagatttttccagagatctttcttttattaatttctaaattaatttatttgtgggaagaacatactttgtatgacttgaatcctttacagatttattgggttttgtttaatagccaagaatgtagcctatcttggcagatattccatttgtgctagaaaagattgtgtattctactgttgttgggtggaatgtcatgtcaacattgataatgtttaaacctttcatatccttaactaattttctcaatacttgttctatcaataaagagagtctttttgaaatctccagttataattgcggatatgtctgtttctcctgacagttctgtaagttttgctttatgtgttttgaagctgttctgaagcataatgtttaaatgtttaggattgttatgtccttgtgataaatggagccctttatcattatgaaataagcttctttatccatgttaatattctttcctctgaaatgtattttgtctgatattaacataacaacataaccactccagttcttttttgaatagtgttagtatgtgtattaatctgttatcgcactgctataaagaactacctgagactgagtaattgataaagaaaagaggtttaattagctcatgtttccacaggctgcataggaagcatggctggcggaggcctcaggaaacttacaagcatggtggaaggcaaaggggaagccagcatgttctacatggctggagcaggaggaagagagtgaagggggaagtgctacacacttttaaacaaccagatctcatgagaactcactcgctatcatgagaacagcaagggggaaatccgccttatgatccagtcaccccctgtcaggcccctcccacaacactggagattacaattcaacatgagatttgggtggggacacagagccaaaccatatctcttcccactccaaatttaaacctatttgtacctttatatgtaaagtgtctttcttgtagccagcatgtagttgacccttgctttttaatttaatctgacaatctctgccttttaattgggatgtttagtctacttacacttaatataattgtttatatttttaggttcagatctattatcttgccatgttttctatttgtcccatcacttctttatttcctttatctcctttattttttatttttatgattctattttatcttacctgttagcttattagctataattctttattttgtgcttttatttgttgctttatggttcatagtatacatatttaacttatcaaagtctaccttcaagtgatagtataccaccttgcttatagtctatgaaccctgtgatagtataaaatacagccatttctccattcctagcctttttttctattgtttaatacattttatttttatttctttttaatttttgtgggtacattgtaggtgtatgtacttatggggtaccaccacactccattgttatttttgtgtagtcagttatattttagatatttaaataagaaaaaataattttatattttcccaagcagttatttcagtgcccttcattcctttacatagacccatatttatatctaatatcattttctttcttcttgaacaacttattttaacatattttatgattcactgataattttttcagcttttatatatctgaaaaaatctttacctttgtttttgaaagatatttttgctagtatagattctaggttgatagttgtttttatttttgtattttaaagatgtttctcctagatttttttgcttatattgtttctaatgagaagtatgtcatccttatctttgttcttccatatgtaactttttttcccctctggtggtttttaattttttttcttaatgatttttagcaattttttaataatatatcttggtatagttcatgttttgcttggggtttgttgagcttcttgaatatgtgggcttattgtttgcataaaatttagaaaattctgaccattaattctataaatattttttctatcccacccttttgtggttccttttatggaaggatggtatttagaaactaggggctgggtgctaggtatgtttgttgccactggagtgtcattgcttcttggccctagcaacagctaggaaatatacttgagtgtaataactgtgcaaacacacgtctatatttatctgctatgttttaaaagtttgtcccctccgaaactcatgttgaaatttaattgtcattcagtattaagaagtgggacccttaagaggtgattaggctatgagagctctgcccccataaatggattaatgctgttattgcaagaatgggtttgttatttcaaaagtgggtttcttacaagaggatgggtgttgcttccttttggctctctcttgccttctctttgccctttgccatgggatgacacagcaagaaggcccttgccagattccagcaccttaatcttggatttcccagcctccagaaatgtgagaaaataagtttatgttttttataaattatacagtctcaggttttctgctatagcagcacaaaatgaactaaaacattttctgagtttctctttttctatccatctatttatctgtccatctattcattcatctataaaaactatgagttcatactgaaacctctgattctaatctaataccacatggttcattatagccttctttctctgatagtgagaaacctggttttcattatctacaatatatgtaaacatgtgtctgtatttctttaatccttgtagacatggagtattttcagaactgctaacctgtacccttgtaagaaacacatttactaactagagtagttctgggtactgtttttttgtttgtttgttttttgtttttttgtttttgtttttgtcttaaaatgcagtagccagtagccagtcatgatgctgttttatacagttaataaggttagttcttttcttccccactctcttcattatggttacattattcacttgtgatataattaggttctttgttagtgtttatattccattttgtccccttcccccaaacacactgggtgattttattactgacttatattttcagtacattaaacatgacaatgcttctcagagtcagggctatacaaaacagtatacacagaagtgacatttcctttttgttcttagcaccccttcccatccccttgctttttcatccctttctctattgccttagataccaatatctttagtttctggtttattcttaatgtatttattttgcacaaatgagaagatacatgaatgttttcattcttaaatgaagggtagcatactacagatacttttttgcactttgctttttaaaaatgtttacacatttatagaaatacaataaaatttgtttttatgcaagtaaaaattgtctatattcgaagcaaacaatgtgatgatttcatatctgtgtcattgtataatgattgccatggtcaaattaattaacatatccattatcgctcagagttaccattttgtgcatgcatggagtgggtggcggtgaggacacttaaagtctgtattttgccttttttacttctaacagtttatcctacaaatcatttcatatcagtttatagagatcttcctcttccttttttttatagcagcttggtactccatcatgtaactgtatcatagttaaccattctcctatttatggacatttaggttgcttccaatattttgtaattgcaaactatttttaacgaataatcttgtacatatgtatttttttattgggggtgctttcttagtgcagattcctaaaagtgggattcctgggacaaatagttctttttgtccctccatttgcttgaagaatttctgatgtgtatcagaaaataacaacttttctttgcatttcttttctcctatggttttgagcaaagcaaaaacaaatttgtacaggaatatagatgaggacattttccaatgtgtctattgtttcaagtacactcctcctaatatctaacttttatcccttgagcattacatttttactatcatctctgctctttctttaatcatttcttttcatataactcattacatatgttctgaaatgttctcaattcatagcttgagctaagatgtgatgtcctcatttgaagtataattatctgcattttgcctttttgttgtcagatttaaaaatacaacaaaaacaaggttacattagtgagaagaagtcaaatgaagacagttattttttctccttaattgcaactggtaccatgtgtactgaaataaaattggtataaggaaaataaaacagctatgaacagtcctcaagtagcatggaaaatcagacttgctcaagtggtgaagaaccctatgtttggtttcaaatggaactttgaattgttaaatttaaattattaaacacaaactatcaagttggaatcagtggcctgaaagaatcagtcttgagtgtcccagaggcctttcttactttctgccttctacaattgtctgcccctctgcagtagtagtgaacacagtcttctttttatctggtttgtggttatttttgtagctctacaaatctttgtgggagactaacgttcctctgaattatatcttaaaaatcaaatttccactggggcatttgcatcaaactgctcttcttgctggctctttagtgccagatttccttccaaaatgacaggttgtgtgatctgtgcttctactgccctttatttcacaaagtagtctttgatgtattctgtgtatctgggggtaagagcatagaggcaatgagaagcaaatgcctttatctgcagataacagcttcccttatctgcatgttaaaatggacaagtggtactttgcccacttgtgtgtcagttgcctgcaagtgaagcattctgtatctttcagatgactgtttctttacttccttaatgctgctaatggtcagttgagagaagagaaaaatactcccaaacctgagattctatttggaaagcagtattgagatcctaattactttgttttattttccatacaacactaatagacttaggcagtaaaatcaatggcattgtcacttctagactgctttatatgtggaactgttgatattctgaaagtttacttactttttagtatctaatatataaccttaaactgaagtgctttttaaaatctaagtaattatcatctattggacgtaggtctatattgaggctgataaatttcttgggggagcttgtgatctacacccttgctacccgaagtctgtgcaacatcagcatcatctgggtgctagttagaaatgcagaatcctcaggtctcacctcagaccttctgaaccagaagttacattattcacaagttcccaggggattcacgggcacactaaagtttgagaagcactaccacagaagatgggacatttgtttaggtgtttaggaatcaggccatctagaattcattcctggtccttttcattctttttttctgaaataagaacttgctgctcaatttttcaaagctttggtcttcttatatttaaaacctgatttaaaactgagctttttccaggctcatggaagatgagcaaaggggtcatcttgatatgaagtctgagagacacttttgaactcattctggaaaagaacataactaaaagtttggcattgttactgactttctctgtccacctacgaaagtgctttttgaggcctcaaggtaggacatgatctcttggaaatatagtcaattctcataatttgtggattctatatttgcaaatttgctgacttgctagaatctattactatttgtaacccccaaatcggtacttctggtgcttttgctgtcactcacagacatgcacagagaagtgaaaaaatttgagtcacctgacatgcacattccctgttaaagtcaaacaaggcaatgctctactttcttatttcagctctcatactataaacaagtatttttttttgtaatctatttagtgctgtgtttttcctgatttttgtgctttatgttgttgattttggtgtttaaggtggtctttaactatagtgctgaagggctgttcagtgttcctaagcacaagaagcctgcgatgtgccttacagagaaaatttgtgtattagatgagcttcctttgggtatgagttagagcagtgttggctgcgagttaatgataatgaaccaaaaatatatgttaagtacagtgtctttaaacaaacacatataaaacaaggttatgtattgattaggtaacaaaaatgttgtgaccagaggcttgtaggaacttactcctgtatttcccctaggagcaatggttcagtatttgttaattcagtctttgtggtgacttcataaaacataagtgctgtgaatattgagaatgaactatatgtttaaaacacaattagactaagatttcaactgggtgtcacattttctcttctgtgggtgataacaagattagcttgttataagaaattttggggttgtattctgtgagtataatttcaaataataataactggtaatttatgaaaacatacttcagtatttggaaggtttcttgggatggaagcgatattccagagaggcttttctcttcctatgggcaactttttattcttttaggcatggcacttgaaacaattgtactgcagttacttttagaccaccaatgtgtatgttaagctcattttttgttgagtctgtgtcttctttttggtcaactttgctgcataaatatcacagaaatctgtgtcctcctctcctgtatccatgatccatgcagctgcttcagtccaggtccacatcacgtattgcttggatcatagactagtattctaactgttcttacccatagcccactctctagtgccacccattttgtagtatagtaaatctgatcctatccctcctctctgtgaaatctctatgtggctccctgggataaagttgctttgggacaaagttcaagatgctctaagttttaactcttgattttcttaccaccgtgcttggagacctctgatcacttgataactctcccacctctgtgcctttgcataatgtccctctgtttagtataccctttttttcttcttcttctaccaggaagttgattcctgggctaagactctgcaattacctcttgtattattgtagatttttaaaattattatttcccccctccattaggcagtgagaactttgaggaaaaggaatggttttgttcagcttggtgtcactaatgccttatatcttttataggagtttctggccatgagatcactggaaatgttgaataaattagaatttgggggtgagtctaatttgactactgttataacaaactgactttggattggcagccctaatctgcaccagttctaatatcactaatctttaagaaaacccagtatagaacccataatgagcattcaattttggaaaatatgaaaaaaggaaagtgaagaaattagttataaagtacaataaacacagtagcaacttgttatatatggtcaattgttttaaaacaagtgatgcttcatataacatttgtctgcttaagaagtaacaaaggtaaaataaattaatgcaatgaagtattcatactctaaattttactttctgctttccctgattcatacaatgagtagtatacagcagtagaaatgaatgaattattgcaatacacaacactgcggatgaatcttattaagttaaagtaagtcacccaggattgcatgacaggaatatatcaaagatcaacacaacacatggttcttaatagtggctatcctgggatgagggaggcaggggaaggaaatggagatcactacatagggagatgtaagttattatccatgttctagtctcttttgggtagtgggttcatgtgtgtatgtgcatattaatataataaacacaagaatgccatgatgagtcctcatgaatcaaggattttgattaataggatttatctaattctcttcacccaagttccacacttatttaaaaaaaaatcttatttggaaattttaggggagcctccacccctttatcctctcttgaatgtgaattaagcacatatgtaagaattgtacatattttgtatgggaaagaaggggaacaaaatgaccaaatataaaatgtaatattaatggtgaattcaaagacaataggcattatgaaaatgagaaaataatgggaaaatcacacaaatagccagccttttttgagtcaatcaagtactggggatgtggagatgaattgcaatcaggtttaatggagtcccccattttgcagtgcttgtattagcttgccctacattttcttggcagcaggaagcaagcaaagggcattattcaaagaaaagcaactgtgcgagacttgtgagaaaaatatgcatcctgtttcttccatgttgcatatcatagaaagaaagctttgccttccaattttgtgagaaatacccttcatttgaaaatgattttgttttacatttctcccaatagcactcccatgctcaatttcttgtcaatcctctcttttctgctagaatccttgaaatctctttctagtagcagttggtgcaagacaatgtgcatttattttggtggcagcattttctagttttcctgccagaatgtctgccttcacaatgaactagttttaaggcactttagatttcagctgattcccagtatcagatgtgaacagacaaaattctatctgagaagaaaatctctttttaggcagaaactttagttaccctcttggcagagtccagagagaggaatcaagggttgcttggattctcaagtcattttaaaaaccatatcatgagtatcttcctgtctccttggtgatatgtgaccgttttcctcctggaagagctgttccatatatttttagtaacagcaggagaggatagatatttgggtgagctgtgtacccagctggaaagcctaaacatacaaagggtcttaagtttcccttgatcttgtttttctccccaaccccctacattctttttttgtaaagcacagaaatggaaggcccacttgtgaaaagcatctcacttcgggcttactgactgccattcacttctttggccctttgttctgtttcttctatcagcaagggaagcacgtaagctctgccagctgtttgtcacttccagagatatgctgtttctgtctcatctgtccagcccagctaagagtggaatcttacaatttgacaacctataaataggagggatgagagggtataatttagcaatgttttttgttttccaagcctcatttctcttgcctacatagctagcaagtgtcatagacttattgcttgattgaatttgggcagtttctaacaaaaagtgatgttcttttcttccaataagcaggaaggctgctttatattctttctaatagcaatgggcattacattagcacctctctttcaaaatcacatacccagggctttgaatgaactgtggctttagaacaagattttttgagaaggtgggagtggtgttttcatgaaataggctaatttgtctgtttaagccaaactgtgacctcatgaacaccatcatccaaggaatcagccagcattatgtacacattagattgaattctataaatttcccttcatatagggaagtcccttgagtagacgttggtctgcccttcccaagtctcttttgcagaaggtatcccttcatgaatacctcagcacagggatcaatactacaaggtagagtatagaagaccatgatattctgaaacaggcgtggaaactggatgtgaaaatatgcagttgttaattagtaagcagggatacttcgctttctggaagtacatatcatgtagggtatatcatacagataggatgatattattttgagacttagataatcacataaaactgctcaaacaagagtcaagggagtaatttctaagaacacaatggtagagactgtggtccctgccatggggtaagtatagttgtgggagaagacccagaatagatactctacagatggatcttaaaggctgttttactaaaagaatttccatttaaaaccttgtaaaatttacatgaaataaatataaatgcaatcagtaattatggaaattggcataaaccatctaccatttaatttatccccattgacacaaatatttatcctccatgtttttcctctaacccagcataaaaatgttttatgtttttgtgtgtgttttgaaagatatactggccacatagcacttcattgaactgaattataagatacatctactggtaagggaatgattagctattgttgtataaaaatccatccccaaacttcgcagctgaagacaataatttatttgttcacaattaggcaagttggtagtatgggcttgactcagctgggatggcccatctctgttccacatggtgtcatctagccctcctcatgcatttggaccttagctggggtggcacactacattctctcccatcttccaggaggccagcctaagcttttcacatcatagcagatgagttctcaggaataatgaacaagcagtcttgatgcttctgtctacataacattggcccatgtctcactgaccaaagcaagtcacatcaccaagcccagtgtcattgtgggagggaagactacacaagggcttagatatggggaagtgtgacttactggggttgttaatgtagtcatctcccacagtggaccttttagttgctaaatgcttttaatataatgaaagcaactctactagttgctgtgatgaggtatgagagctgagcatgaaggaaaaccaagtttctgcagtagtatgatgtatgtgctttctgaatgagaaatcatagggcagtatgacaaagggattgttatgataagtgttttaagtataatacctaatcactttttttattcctggaaaaagaatgcatcaaaggcaatgaataaatataaatagactagtctccataaaaatgaactctcatatggcaaacagcatgaataaacaaggaaaacacaagctgggaaaattattgataatagacaaaggcatagtattcctaacaattaacaagaaagacaaatatgccaatagaaaaatcaacaaaggtcatgaatgggatatttacaaagaagaaatataaatatgcacatggctgccaataaacatccaagaaaacattcaatttaaccagtagtcaaagaaaggcaaacaaaagtttctgacaaatctcaattcttgatatattttctttgcacttacataatataaaagcagggtaagagaatggagaggtgggcgggaggagttgcaattttagagaaaacgggcagggaaggtctctcaaaggtggtaacattgaagcaaggcttcaatgcagtgagagcacaggccatgtgctccagaagtgttccaggctgagggaagagtaatgacaaggtccttaggtgggactaagcagtgagaaagccagctagtgtgtgactgcaaccccttgagctgagtattcgggaataagtggatattctgtactaccgaactattcagacagacacattctgtgtgataagcaaaaaagtggatgttacaacccacaaaatgggaaaaacttttgcaaatcatatatctgaaaaggggcttgtatcaacaatatatgaagaattcttacaagtcaatatttaaaaggcaaataattaaaaaatgggcaaagaatctaaatagacatttctctaaagcaagtatacaaaaggtcaataaacacatgaaaaacgcatgatattaaccattaggaaaatgcaaatcaaaactacaatgaaataccacttaatgctcactagaatgtctataataaaaaagaagtgttggcaaggatgtagaaaagttggaaccctaatacatcgctggtgggaatgtaaaatgctgcagacactttgggaaacagtctgacatttccttaagtggttaaacatagagttaccatgtgatccagtaatttcactcctaagtatatacccaatagagttgaaaacatatttccttacaaacacttgtgtataaatgggcatttaggcacattattcataatagctcagaagtggaaacaacccaaatgtccatcaactgataaatggataaataaaatgtgatatatccatacaatggaatattatttggaaattaaaagggatgaagtactgattcatgctatatcatggatgagccagtcacaaaagatcacatattatatgattccatttgtataaaatgatccagaataagcaaatctgtagagccagaaagtaaattagtatttgcctaggactggaggatatggagtgatttgggagcaacagttaaggtatgtagggtttctttaatgttacataaaaatagtgtcttatgaatttaatattttatttatttttttgttgtttttcttttgtatttttatttatttatttatttattttttattttattattattatactttaagttttagggtacatgtgcacaatttgcgggttagttacatatgtatacctgtgccatgctggtgtgctgcacccattaactcgtcatttagcattaggtatatctcctaatgctatccctcccccctccccccaccccacaacagtccccagagtgtgatgttccccttcctgtgtccatgtgttctcattgttcaattcccacctatgagtgagaatatgcggtgtttggttttttgttcttgcgatagtttactaagaatgatgatttccaatttcatccatgtccctacaaaggacatgaactcatcattttttatggctgcatagtattccatggtgtatatgtgccacattttcttaatccagtctatcattgttggacatttgggttggttccaagtctttgctattgtgaatagtgctgcaataaacatacgtgtgcatgtgtctttatagcagcatgatatatagtcctttgggtatatacccagtaatgggatggctgggtcaaatggtatttctagttctagatccctgaggaatcgccacactgacttccacaagggttgaactagtttacagtcccaccaacagtgtaaaagtgttcctatttctccacatcctctctagcacctgtttcctgactttttaatgattgccattctaactggtgtgagatggtatctcattgtggttttgatttgcatttctctgatggccagtgatggtgagcattttttcatgtgttttttggctgcgtaaatggatactggcaaaccgaatccagcagcacatcaaaaagcttatccaccatgatcaagtgggcttcatccctgggatgcaaggctggttcaatatacacaaatcaataaatgtaatccagcatataaacagaaccaaagacaaaaaccacatgattatctcaatagatgcagaaaaggcctttgacaaaattcaacaacccttcatgctaaaaattctcaataaattaggtattgatgggacgtatctcaaaataataagagctatctatgacaaacccgcagccaatatcatactgaatgggcaaaaactggatgcattccctttgaaaactggcacaagacaaggatgccctctctcaccactcctattcaacatagtgttggaagttctggccggggcaattaggcaggagaaggaaataaagggtattcaattaggaaaagaggaagtcaaattgtccctgtttgcagacgacatgattgtatatctagaaaaccccattgtctcagcccaaaatctccttaagctgataagcaacttcagcaaagtctcaggatacaaaatcaatgtgcaaaaatcacaagcattcttatacaccgataacagacaaacagagagccaaatcatgagtgaactcccattcacaattgcttcaaagagaataaaatacctaggaatccaacttacaagggatgtgaaggacctcttcaaggagaactacaaaccactgctcaaggaagtaaaagaggatacaaacaaatggaagaacattatatgctcatgtgtaggaagaatcaatatcgtgaaaatggccatactgcccaaggtaatttatagattcaatgccatccccatcaagctaccaatgactttcttcacagaattggaaaaaactactttaaagttcatatggaaccaaaaaagagcccgcatcgccaagtcaatcctaagccaaaagaacaaagctggaggcatcacactacctgacttcaaactatactacaaggctacagtaaccaaaacagcatggtactagtaccaaaacagagatatagatcaatggaacagaacagagccctcagaaataacgccgcatatctacaactatctgatctttgacaaacctgacaaaaacaagcaatgtggaaaggattccctatttaataaatggtgctgggaaaactggctagccatatgtagaaagctgaaactggatcccttccttacaccttatacaaaaattaattcaagatggattaaagacttaaacgttagacctaaaaccataaaaaccctagaagaaaacctaggcattaccattcaggacataggcatgggcaaggacttcatgtctaaaacaccaaaagcaatggcaacaaaagccaaaattgacaaaagggatctaattaaactaaagagcttctgcacagcaaaagaaactaccatcagagtgaacaggcaacctacaaaatgggagaaaattttcacaacctactcatctgacaaagggctaatatccagaatctacaatgaactccaacaaatttacaagaaaaaaacaaacaaccccatcaaaaagtgggcaaaggacatgaacagacacttcttaaatgaatttaatattttaaaagggagtagaaattagactaattcctttgaaaaatattaaattcttaagacattaatatattttatgtaacattaagtggagactagagttacaaagaggcaggacctagcccaacttggggggtgaaagagttggaaaatgtaaaagataataaaaacaagacatcagttgactttggtcttggtgcccagacgagccagagctacagccttctttaaggtattaggtcagagttttctaggatagtagctgatgtagtaagtgtgatctttttgtcttgggatcctgaatcttaagtccataatattggtgatttacaacctggaagtgatgaatgcaacaccagacacccacccccaacatttctgcatcaccagaagctactgctgtgatccccatgcctaatggggccccctttgtgaagttacacctaaattggagcttgaacttttttccagaggaagtatttttaaatgattagattttttataatgccaatttcattgtaaatctattttgattggacatttaagaccacttataacattgtttaatgaggaaatgtgtccagctttcaaacaaaggatttagaaatgatcttttggaaatgtaaattattttgtgagctagaactccctacatttcagagctcctctctgagtcttggtgtggatgtggagaaggacagcctgagaaaataagataagggactctagttcttcttttacattaatatatagtcaagttcctattctggcatttgctgctctgattttctgggaactactttagaagtctgcgcttagcttgttagatatgatttgcatgcagtcgacaccccagaactcgcatgtatgatgaatttcattaatctagtgatttgtaaaaagagtttgaattaaatgctccttcatgctccagagactgcactgggctgctctgtaatggttgccacagtttctccaagggtagtgatgtaaaaacgaaaagacaactagaaatgaaagataatccagagacctgcaggtacagcattgcagatcttgaaacagaaaaatagtgtagctttatttagatgtctcactgcttttttttcctctctctcgttttgtgaagataaatgatactctcactgtgcttcagcttcttactctataatagtagttttcacttaggtgagcctcaagcacctggagagctagtaaacatgcaggtacccggaccccacacgcagagctgctgattgagtggacttgtggtgggactggagaatctgcaattctaacaagcacccaagcagtactgctgctggtagaccagtgagcacacttttcgtagcattcatctataatatttagaaagccactttcaactctaattttctataattctgtgatttcatattctgacatctgaggcatctgtgtgagaccaaaggtgagcactgacgattgaacttgcccaaccatttttaggactcaccttcttcctgattctgcagaaaccaaaacatggctatgtttagtgtctgcagaaagactggtctcgggtctagttttagccttgaggaaaaaaaaaaaaaaaaggtgggaaagagaagaaacaattctgagttagaattaagattaccaaatgagtattgaatggcttcaaagctgtttcccgggcacccccaaaccctagattcccttgaatctttcctgattcagcctggtccctggtagggaaggaccccagcctttaggaaatatgggagaactggagaaataaagcaaaggggagggcggtggcagtgtggtaagaaataagtcgaagtaaattggggacacttaagctttcagttcctttaaacatctgtttcctttgggcaattcacacttccagaagagttcttgagatgccgtttaaagataaaaaaaagtaatgttacagctcttttagaatttgtctagcaggctttccggtttttaccagaaagcccccccaccaaaaaatatatatatatatttttaaagaaaaatggtgaggtaactgaactgttagcatgtgccaaagttagggtcttgagaacctaaagttttaaaacacttgactgctgactccaatccaatatgggtagccctcacttcagaagacagtatttggttttaaaatgttcagttccactgcctttgttttctggccatttcttagtggataagaactatgtggtaacttggtgccattactgaacttattttagacaactcttgagaaatatgggaaagttgaaaagtggtctgttccccttctttattttatatacatagtattatttaatatatctttattacattttatttttaaaattgtagctattttattcattttattgtgccagccatacataattgaataattaaaaattactgcctgaaagaaaatgtcccacaatcccattaatcaaagataacttcctttaacattttgctgtgcatcattccatacattttttcagtgattaatatccttatttcccacaaaaatggagtcctgctatccaaataacttaaccaccttttcctgataacattatcgcagatattttcccatttcactcaatattttgctatgctacaggaccccattgtatgaatataccaccctctaggtaatcagtgctcttttttgctattaagcaatgttatgatgacctttcttgcacgtgcatttttcacatgagtgtccattacttcctaaggataaatccgtgttagaggataaacactgtaaatgcttttaatatgcagtaccaaattgccctgtagaaatgagcctgtttacacactctctcagcagtgtctgatgagtaatctgcatgtttcaaaatgagctttcattatttttaagaagcgattttgtggcattagagaatttaagtgttggtttttgaatgaaagcattggcaagctgaatgaatttgaagtggtgttgggcaatattatttggagctgtctctcttcacacaacctttctgcagcatttttgcactgccttgataataaatcagttctattattagtggaagacagagagactctgaaatgtttaccatcagccttcctctgtgtttaggagctacgtgtatgaaactatttttcctcaaatactattttatatttatctgtgtagttgaaaagcttgtgcagccaagtgtctgttctcacattttaggactgcattcagttttgatctcctgttttaaatattttttgaatcaataaatttctgtgcatggtgcttggcatgcagcatatatacatatacatatgtatatgtgtatatacatgtgtgtgtgtatatatatacatatatatatgtatataattaaagtaagaaaaatccaaggacctctatctcctacaaggctacagagaactctttgaaaaaatactcctttatcttctaggtgagacagttacatactcatttgaaaataaaaaacttggaattctaaagccgttcttgccaattcctgcaaatatagtgctcagatttcacaccaggttattaacaatgacatggatgtctgaaatgctggagagagggttggacccagcaataaagaaatgtcgctaggttatgttaaattttcctcttggacctcaaaaaatgcccctttggccagagctggataaagttccattataaaaataagaggtagtacaaaaaatctgagagatttttgtactaaaaatgtacgattggcattccaaagaaagtcgtatctgattctgtattatttggggttcttgacagaaactggcttgacagtttatccagcaaacattactaagacatgttctgtgtcatatccattgttttaagcattctataaatatcaactaattaaataccattttgtgatctatgggtattcatattaacccatttcacagataaggaaactgaggcacagagcagttatataagttgtccaagatcactcagccagtgagtggcaaagccagcagtcaaacccaggtagcctaactcaagattctgtgctcttaattacttagctatgctgcatggcatatgtaaacatacacactgttaaagcagtgatggtttttaggaaatgttagcttatattttcgacaggaggaaactggtcactattattctctaatagaccatatttcttacctttgactgcgcattagaatcacctggggagctttccaaactcaacccagaccacatccctgacctagtagctcattcttggaaggtgagacccaagcaccagtagtttttaaagctccccaggtgattccagtgtgcagccatggttgagaagctctaatctgggagaagagtcattattgatggccaatattttatcagaaacatctgatgaaaaagagtactgtggccatgtcttgatacacttcactgagttttctcagaggtgagcctattcacaatggagcaatcttcttcaagtggaggcagtttaagtctgagaaaaattattctttctgaagatgctgtttccagtgatattttagaaaagtcaaggtataaatccattggtgttaatgtaacgtagccagctgtttcactttattagtcaggtgagtggaatataatgctcttactcaaatcagtgcccagttgctttcgattgtctgcctctgaattttgagttgaattccaaaagaggtaagagaaaatcggtgggtagggaaggcaggccgcatctcagccagatggctaaacagcatgagacttgggctgcatcttcagtcctctgtgaatgctgtagaatgacttctttctttctttgactacacacgtaaggaaaatattcagcacatgagaatttggaaagagtttttctgttggagcagcttagtgaaatcgaatagcaagatgcctttcaagaaaagtgacttttagtcatggtggtatgcgcatagcatacatagtgtttaaggaaattgaccaaacatgggtcagtagttaacaataaacatttctgctgcttcatctgaatcatgctgggaaagtgaacctgttgtctggggtatttattttggaattgccagtttgttcaaacaagactaagtcacgttggggaaatggtgagaacaatctcttttggctagacacttcggtttcagaagcctgtcagcttgcaggaatccccactagttgaggtgcattagggcatttctcatggctgtatatgaaagctaattacagagggtcttgtttctgtttgttcctgccataaagtgtcttctagaattgctgttctgtgactgctgtcttgggccatattaaaggatcgtgatggtgggaacagactgtccactgctgttatggggaacaacagagacaaatggtatagattcttgtactctttgtaacataatctgtgacccaaatcatcttataaattgcaaaatgtattgtaaatacaaaagaatgtttagtagatataggtacaatataaagaataattttaaaattctaacgggcccacacccccagtttaagaaatgggaaaatagcagctccttaaagacctttcctctgttccctttcccagttgcataacctccagagataaccactaccctgacttgtcactcattttcttccttatctttttagcatccagagttatgtatgtatccctaaacaatatattgtatggttttgaaaaccaagcagcaagcacaaacctagctgtgcaaggaaagagagacattggttttgtttgatgaaagcccaccaagtctctgggagaaatctggcttctgctttcagagcttattgtggggaagttggtgggtaaagccttgagtgaatctgaggaaaaatgggtctcctgataggcaggacatttgacaacacttagtgtggaactggtactgagcgcccagcaggaatgtggtgggggcacaggctgctctgcgtttcctactcttcagctctttgatgcctgcctccagttctcagaagcctgccttggagtgaaatgagagtcctttgctggttcaggcagtggagaagaacaggaatctcctcagcccacgccaggaaaagcaaaacagaagaagcctcatccagctcaccccatcattgttttcaggtttaacggcagcaggcatcttgtgatgaaagttctcagtgtgcccctctcttgagtcacattgcaccaatctggactggttgtcttcttttagtacacagctgtcatccggagcttcccttggcctctctcctgagtcagagcttcttttctttttatatcttctgttttgcttgctggttttagtggagcacttccagtaactttgtgagaaagggtacaagggaggtaagtttttcgaggccttgcatacctgaaaatgtctattctactatcatacgtggtgggagtttgggagtagaattcaaagctctaaaggaaaattaatacgttgatctgttgtcttctgtttctactattgctgtagagaagtatgaagccattctgattcctgacaggatacttaggacctgatttctttttctctctgcaagtttataaagtctttttgtccccaaggatctgaaatgtcacactaatgggccatgacatgggtttgttttcatccactatgctgggcattctatgacatactatgtgccatttcattctgacacctcaattcttcagttttgggaaattatttttgaaacatttattctccatttttcttttcattctgcaactaacactcaggagctggaatctccataacagttatctgattttctgttttctcctatttttcgtctcttcgtatttgctctaattttggagtaatatcttctaacacttctcttatttttgatttctcataataattttcaattccaaaagtgtttgtttcggttctttagtttcctgggttaaaaaaatcattttcttattttatggatgtagtatcttatgtctccaaggatatcattggtatatatttgcttaatttttctcctaggtgtatagtttctgttcccagtgctcttttgtttgcttattttgatctgtcttccttggtagaggcttttctcagatgtctggtaatccttggtttcttgggaactagaaagctgctctgaagctaagcaggttggtggagcttgttgaattttttttcactatagagtgatctgggttgggcatttgttgggaaatacctatgacaatatatctttagatctttcaccttgggttattagatgccctagagaagccttcaagtctcctgcaggaagggtaggtctagtgcttagtctgggagcttcttggggaaagaggacttgagggcagtctctctgcattcaggcttcagtgtgtatttggtcacttaatgaccctattttcattagaatactcatgacctgactatgcctcccaggataggtaccctatgttttaccctctttaggaaataatcctttggatattttcctggctggggaaagtgcagtccctctgtggaatggaaaggggagctagacataacagcttctcagatgccttcctttccagcctctgcacgtttgagacccccttatcccccagtttcagaggagccctgtgcccattttcagctttggtcactgctggtttgaggttttttttttttctttttttttttcatctttttcccttgcctgctgagttggttaccactcatctgtctgctttggagcttccaaaatgttgttcctattgtcccatctcctgttctcctgagtttgtcttttaaaaaacaattcctttacgtgttttttatggggtttcaagagagtgaaattagatgcatgtatttccaccgacttaacctgaagggtagaactgttgtttcttttttacattattgaatccagtacatttttgactatccaaagcccaaggcttctgaccatttatggaacacctttgtgccaggtactgttgttgagttcttttcatgtgtagagatgcaagtaagaatggatattatccttagtttacaaaagacaaattgaaactcagattaagcagtgcatccaaggtcactgctaaaaagtggcagtactgggatctgaatgcagtccaagatttgtgttttgaaaccctgtgaaggtttttaccaagtccagttcttcccatacaccaggggccgagttgaaataatgcttgtgaatcctattaagatctctatgagttaactggactttgaaggagaaaactattctgacatgttttgagttgtgtaaccttgatttacaaagtgaatggggcacccacaaagtgtgagaagcacctgctttccccagctgcagggactcttgcctccctgctagcttgatgtgtggctgaaggtcattcatgggcactgttgtgccgtctatctggagaacaaagcatgcatggttttctggcccacccagtagaatgtgtgtcttatgggtgatattgtgcagtaatgaaggacttattttctatatggccacaaggctaggtaactcattacccattcagtgtcatgagcaccagcatcacatttccctattgagagttttgctttttttgcaactgtatggagtcactgatttgcaaaatgaatacagccataaatgggagctgtagagtctttacagatttattctttttttttttgtaaacctttgtcaaaccaaattgttcagaccaaattatgtatcaaaaactgtttgttttcagcactaaagagctgcctatagccttaagtatggactgggtggatttgaatattagagtattagaaatattgctaaacaatgaaatcttttttcccctcgagtgttgaggggtgttatcattcttgtaacaggtttcagcttcagtgagctttctaagcatggctgcttagttaagtacaagattctgtttatattctttttcataactatagctagcccttttcctataagaatgtaatataaaatactgacacatagctgaaaataagcttttttttcccccaatgcaaagtaatatcaacctgcctctgcctatgaaaccttgaaatgagctggggttccattttcatacagtgtgtcaagccaaattatttttagtttatttagagagaacccttttcatttaaagggattgaaagagcactggaccaatttcagctgctttaaaatgtgcattcggggtcttttaatgtcctctccagttttttgttttttgtttttaaaagaacattacaaggacactctataaactgcattactgtattggttttcaaatttaactagaccttttacctagagaagaaaatgatgggtaacatatcccatgagtattttatttgagaggaataaaatgcttaaagtattaaaatattttatttttaacactttttcatcatggggatatcatctcttccattcttgcctaaagagaaatatttaggtgtctcattgtagaaaaatctgctattccaaagccagatttcaaatcccgtgagaaatgtagaagaccttgtgaaggcagacttgtgattttggggtcaccatcactctagacaacctcgcacaagggagaatgactggaaagaaaactggacttcagagtcagatctaggtttcaatcctgtctctaccttgcattcttggaaaagtcatttgacctctctgggcctgtttctgcatcattaaatggggataatttgcagcttgagtagctattgtaaggtttagagagaatgtacatcagaggcctactgtggcaactggtgtgtaattgtgggttctgatcatagtcatagccctaattgacagcgtttagtacttgttagcttctgttctaagagttttatgtgtattaactcaccaaagcctcacaacaactctgtaaggtaggtactatattaatatctccactttacagatgagaaaactgaggcacagagagtcttcccagggttatacagctagtaagtggtggagctgggctttaaacccacaaagactggctccagagcctctctctcaacggctataccttaaccactatacagggatggctgataatgatgttctgaatcgtggtcatctgcagggcagagttcctgcctcattcatctatggcaggggtgtccaagggcaagaatacagtcatggattcttagtttctgttttggttggccagcaaagccccttcctcatccctcttttccgcttattactaaagacagaaacttaaaaaccatggcttcaggctgctaaaagcctaaaaacaaaacagaacaacaacaaaataaggtgggttggacaagcttgatctatggagtacccgttgcctgctataggtggtggtagattctccataagtgcttgctgaatggatgtatgaagcactttccatagcttactgaggtgggctactcttgctacacaaagtgtatttttcctcagagccactctatgcaatttccttgagcccctatgaacctcctctcacctttgagtgctggtaccatactcagtgtcagtattttcactgagctttccatggcatggccagcctgtccacaatcaccttccagtgactctaaaagatttccttgataaatatcgactttgaaagctattccactaaagcaggggttggcagaatttttctttaaaggaccagatagtattttaggttttgcagggcacagggtctctgtcacaactactccactgcggctcaaaagcagccacagtgtccgtggctgtgttccaagaaaactttatctacaaagagcctggctggttgcattcggcccgagagtgctggttttcccactttctcgtgctgaagaatcatctttttcaagtagagattcctgggcctacctctgttaaaagataatattcagaaaaggcaaaatcattactttcatacagataaggatgaacatgttttaaagatttcattttacccacatgagggagcctggcagaagttataagcagttcaaagggaaaaagtcaaaaagcacaaatttatattgagtaaaggaatagaattgcaaatggaagcaaaactgattttttcccctaaagggggagggaagtcaggcaaaaccagacaacgacagagtttttaatattttccagttgcctgcaacttatgaagttgcaaaatagctcaaactcagtgagagcttagaacctgataacctagagggatgtgctctatagacaatacagagttttgcattttatgcaccctggagagactggttcggtaggtctcatgttgtacttagaaatctgcattttgaacagactcccaaagcattggtcaggcaggaagacttcatgccacactttgagcaacactggttcattatttgtatgctattctctttatttagaatactccttctgctctgtgagcctctcttctgatttagggaaatcagccctcatcttgtgaggcttacccatccatttgatcagatgggtgatagttttctttgttgtggggattggaagggacagggaaagattgactactgggaaaaacagcctcatcttacatttttactatttgtttgttcacatcggagagaaggacaaaatgatggagacttaagcgatacgatgatttaaaaatattttgggtggattaaggaaggtgtttgtaatggaggaagaatgaaccttggaagtcgttggtgcagtgaacatcaggaaggtggaggaaggaagatggagagaatcaggccatcactgggaaggaccatagggtggtacagactaggagaacaggaagcatgaattctaaataatcaggagtacagagacttcaataagcatgttagggaagtcagaactcgttaagttcacaatccattgtacatttactttcttactgatctttaactgtcagccactgttcatctccatcaaatgctgttcctctctggatagaacagcagacctggcttgtgcatttccggagaatggggaagttcagaaagcccccagactgtcagccagctgacttcctttttactgggctttttctctgtgcgaataagcaaaggaatcacacacggacagatggttgggtgggtgttcttgatagcgtgtatttggaagttactgtcaagtcagggtgcatgaggcataattccccctctgatttgctttccagtgggaacttttgtgtctgagagagagtgggagagtaaggagggttcatttccccacaaatcttttactcaaactgtctggcttctcagactatacctctagtcgctgagctaccttgagagtggtaccatttcatactagctaggagagtcttcatgttaattcctttgctcagtgagttcagcagtttacagggcagacattttccttcatttgattctctgtgagatgctgtgttaggtctaggggcttcattggacaatgggcacaaatcctggctgtatggggttgggagttggtggtctctctgcgggtggtggtaggtggtaggtggggaggcatctgggtggcacagactgtggaacaaagtagttgtgttatagtggaagctgggtggcttttcttcttggcggtgaaactgtgtctttgaagacattgcactttggcacctgtgccttgctaaggatttcatccctatcttgtctttgtcctgagattatatctcaggacctgccaattttgccagaaatgtcaagttaccatgcactgaaaaatctcagacagccaagaaatgtactatttttgctagcatcaagagcctaagtgataagagtgtccaggtggtggccactgctgcccctgggatatctcaggcctcctgcttgactgggaggcagcagccacgccagctgtttgggccccactcacaccagggcccccattgcattggagtctgccctactgtggaatttgggatgctgcccttgttgcattcgctctgctttgagtacttggtgcttcctaaaagagcacagcaagtgttctttgcaggtgatattgttcatgccctcaccttgtttagactctaaatggtacctgaaatggcataggttatcagtgtttattagctaaggcatggctcagccttgagtccctctcaagagctacaggaaaggcctttgcattgtctctaaatgatcctttgctgcttattttaatcacagaagccttaaggggactgatagttgtatgaagggtaggagcttgtttagcaggcaggacatattgtcattttagattcataacccttcattcctaaattagattgaaaatctgagcagctctgtgacatctacagtattgacattctcggttttgtgttcatgggttgccaacacagagcatactccgacaaaactgtaaaattgtatataacttaagaatgaatttttatgattggaggctctcctgtattgtacaagtcatcttattttggggttgcagatagtaataaatacagaagttttataaacttacatttggaaattaaataaagaaaaatcactaaggaagtatatgcttcaaaccaaaaatgaagctactcagattttcctaatttaaacataatgtattttcccattcttttccctaagacaatggtatctatcccctgtgctagagaaagtagtgtgatgtggttattgttatttagacccacttggaagttcctgagggacatggcgagggtggatggacttgtctgcctgtgtagcagtgtggaagccatgttttaggaaagaagtggtgggacatggagagaaagcaggtaagagagttgtgaatggggtagggtgacttctacaagtacacagttctgacgttctccttgcctttcagttgcaactctaactcatcagtgatgataggccgtcaggaaaatcctctttgtggatgttataaaccctaaataccaccctgtaaagaattcgcctcctcatgggagcagatgggatggccatacctaacacttgtctcttattgttaagcaaagccccatcttggtctttaaatcatttcctgtgagataggctctgaacatgtggcttttgaaaatccctttcttagggcccttggtttagaaattgcttgccttttctgtttgagattgggagccaggtttatcttaattcattctgtgtcacaaatgagacagaggacttgttactgcagacctacaatttttgtctggagaaaaggtatgaaagggatcagaatctcccctcctcaactccagcagtggcctgatctggcccctagagacctgactacaaggtgtggacagttcctctgttgtctactgtccaccttcaagggatcaaacccagttctgaaacccacaacctgtcagagcagagaagaacccaccatcaggcaaaaggactagacatagggcaggtggaatctaagaatatcttggcactacattgggtgaggaatatagaatgtggggagacttctgattggtctctgccccttggcacgctgaaattcctgactcatgaagggcaggacatgtgtttttcctcactctgttcccaacgtttagcacaatgcctggcacatagcagaagcccagtaaatatgtacttaaagcccgttagaattagtggtgctttccgttctgaatagattgggacagcctatggatcttgaaaggcataagcaaccaagggtgttagactctgtagctattaattaccaaacaaaattatagtcttgtactctaagaagcagccatgtcttgagtgagaaggcttaggatatgaggactagatatcagcaaggataccataggtttggaaagacattttaatttacccttagaatacacaactttactgatttttaaggatgatcagcccatcatatagcactttattttttcttttaaagacaatcctgtttcatttaccttcacttgacacaggagtttgagaagtcctgggcaggtatacctggttattttgtcattggtagtctttttaacttttagaaaataatcctagtaaactaaacctgagcctctgaataagatgttgtctgcctttgtagctatatgagaagagtggcagaccacagcttttgacggggatttttgaataaaataactaaaaccaacaatacagcaaaagctcatctgggaaaaggacaaagagtaaactagtaaaatgtaaggctgtaaggaaaggggtagaagatcagaggaattctcatcaaaatattgcaaattatcccctgaacacaaactggtaacggtggtttgcttaagggaaggaaattcggagattagggatactgggtgaaaggcagattcttttttttaccatatattcctttgtatcttttaaattttgtattacattcgtgatctttcagaaataaataaataaaaatgcagtagcttcctgatcagaaagagggaataattgctgtcacttgcgtttcagaaacatagcatccaaactgatgtgattatggtgacctgtcccacttagttttgctgatgtactataattactttctccagtgaggctgacttcagaaacagttgcagatgcagaattttaatccagggtatgctgtatataagtaacttttgcatttacaatctaccatttggcgttttatggctaataatccacaaatatctaaactaatttataaaggcaaaaactactgatttaatgtagtactctgcttctgtatccccgaggtgagtcagaaaaatttcaagttgccacgccttggccagaccccacagtatattggttattggtcctgaagttagttctttaaaataacttgaaatgtttcatgcttagttctaggatctatactttctttgatttgactgggactgaaaggctcagaataactgaatatccttggctctaaataagaagctgtaactttgggccaggtgcagtgcctcatgcctttgggaggccaaggcaggaaggtagcttgaagtcaggaatttaagacagtctgggcaacatagtgagacccccatctctataaatgctttttaaaagtagcagggcatggtggcatgtgcctgcaatctcagctacttggatgggtgagttgggagcgtcgcttgagcccaggagttctgagctgcagtgagctgtggttgcactactgagctgtgattgcactcaaggctgggccacagggtgagaccctgtatttaaagaaaagaaaaaagaaaagaaaagaagctgtaactttagttaggattctgactggtatgtgatgtcttgcattagatcagaattgggtcctacttgggaaggtggagagattgagtgccatgttggcagtttaccttcagtagaatgtaaagtaagcccatggtgaggcaaagaaaagcagtcctagttctcatgcctgtctttaatcttggtttctatgacttgtttagtccagacttggttctttcccctctttttctgatgttgatcacgcactagtgtgatctgcaaaatgatatgcaaatattagttgtgtgtatatttctgtttgtttgggatagccttgcctactgaagagaataagaagctgggtttctcctcatttacataacaagtaatatggtatggaagatggaaccgaagatttgaggtcagaagacctaagttctatggcttttctacaacctagatggtaggtcttaaatcttggttgatttgtagtttgttgttttatctgtacagttgaagctaacccttctcacctcacagggaagttgtggagatccaagagagcccatgtgaggcagcactttgtaaaccctgaagtgtgatcattgtcagatttatttactcctatttgtaagcattactagcagacccttcggtttctgagaaatttggctttctttttgaatgatgaggcaagcactgaagttaatgccatgtggtaagatcaaagaccttcctggaactcagcttccattcctcccaataatcatgaagaggattcaacttcaatcactgagaagttgaaagctcactgtgttctgggagtttctcttcacctggcttccaaagcaccaccttctcttggctatccttctatctcactggttgctctttctcagcgtcctttacaagttcttgttctctccccattcccttaatgcagggtgggttccaggtctcagtctgtggctctttcctctatactcatttggtgacctcatgccatctcatgactttatacattattaggttggtgcaaaagtgagtgagggttttttttgccattaaagtaatggcaagaacttcactcacttttgcaccaacctaatagctcaatcctgaaaactcgtagactttctcctgaaatctggactcatattccatagcatctctatattgatatcccaaactcaatgtgtccccaaactgaacagatttttcttccctcaaaacaaaacgaaaaccagttctgcccacagctgtacccttccttaaacccccacttctttatttcctaaattatgctctagatacttctccatggaccccaccccccacccctcagtgcctttggtagagtcacaaggaggagaaataagtgtatctcagtgttagaactgaaacacaacccacattgtcatccactgtgcttattttaaggatgaggaaacagacccaaggtcacacttgggatgcatggattcttattctcttggcagacaactctgagagcttttgagtgtttttttgttttgttttcatttgtttcagatccatacagtgtagtcatttataaagatggatagcctaggctggctccaggcaagaggcacaaccaaataatgtatgagacataatttgcctttcagcattgctgttatatacctagtaagctatggcccccccaccagccatcaaaatgttgttatttaaagcttcacattgtaaagctgtattatgcctaccagctggaggaaatattgctgccagattggttctgaccacacacatctcttgagaccctgaaaaccaggttcatgatgaaaggtactatgcaaggacaattattgtatttatttttaggttgttaaattatttatgttaacagtcgagagacttctctgttttttaactaatgaatgttgacttctctaagtaaggttagtagtgctcagtaaccttacaggtcactgaagaaataggtttcagttattaatgttctctaagctaagaaacattgcctagaaatagtaactagagcctaaagatttaagtcaagaagaaacaaataatcaaggcagaattgtctcgcccaattataagtagtgtttttaatctttctgtatcttgctcccttgaattagaaagcaaaaagacaatattgaatattccttcctctaaagtggtagttctcaaacttggctgtacgttggtatcacctgggttttaaggaatattcatgcctgggtttcacccccagataatctaatttagttggtttggggtgtgtcccaggaatcaggattttttaaagctccccagatgatttttaatatacaactaaggtttgagagtttctacaatgaagtcttgaaagcagtttgcagaggtctgtcctaattttttgttttctggaagagaccagacacccttggaattttccatatcttttactcatttatggaagatataaagatgaaaaatagttcccccttgcctgtaaacagtatacttttccagacccctgagaactagcaacatgtatctagccagttaccaaggcatggagcagatacatttcccaccctgttgagcttaggagattcttattattgtctcccttaatctgtctaaatcctaagatcagctcaccaccacccaccgagtaattgcaggcctgagatttgaaccctggtctttctgaatttaaaaccccttttcttaactactgaggcaaagtctagtaggattcaccaaatcccattccatcttcttcctaggcacacagctagactacctttctcagcctccctcagagttaggtgtggtcaggtggctgggttctagttgataatgaaagcagaagtaacgtatgccacctccaagccttgcctccccaggtgatcttccattctttcctcatctgtcggctacaactgaggaccatctttggatggctcccttccaaatactcacagtgcaattctatgtgaacaagaaaaatatgttaagggagagacttgagggtttatctgtttgagcagctagtcctacctgaagataactactgtgtagtaatgacccaatggagaggggaaaataatagagtagagatcccaggagatgagatccagagcacaggtgaaagcattagttttgaacaggacacatctttgattttgagaattgggaaggaggatgaagcaagtgtggatacatgaaaattttagacgtatgaggcaattttctttctgatagcttcaattttctttgtgatgtataagatataagtcatctgtgggaacttcgtgggaccaagtaggtagtctgaggagatagtgttttggaaaacattatcttatggagagtggaaaagagatccaaaggagaaaattgcagacagtgtcaggaatctgttgaggatgggaatcacgtgaatttgtcaccgtaaagactgtttcttgttcactgctatttcttcagtgcttggcattgtgcctgggacagggcaagctttgaataaatgattgaaaaataaatatagtggtactaaagaagtgagagctggaaaaatgagagggctgtggtcagagagtgggattttaaatgtactattctggaggtactttcaggttctgacaaattttatgtttctggctatgggagtaggtggcagacatggaatgaaggtgaagatcattgccattgggaatacttcaggactgagatgctaaaggcaagaagtcaccctggatgatagggcatggaataaagtataaccatcaaccagctgttaatctttaaaaatataaaaagattggtacttgacattaataggaagtgatagagtgtggtatatggtatagccagatggtctgagcatcaggagagcaggatgactattcgggagtgaaagtgcagtgatccggaagttgcactggggcatgagaaagatgttaaccgtgcctcctggcaatgagtgtgttgggtgtaggagaaagggccacaaaagatgcagtacgctcagaggagatctaggttccagagagggctgggaagtgaaaggcacattcagaagagaggagtttatttctcaacaaaataactgagtaacaatgggaagactttgggtaggtgtgtaggggtgctgcagtgagtaccagttatcccttgccacattaatgctgcatagcaaccataaatcctagagagcattcaataattactttattttgcatgtttctggagtcagatttggtgggggggtgcctaggtggctctaatggtcttggttgaacttacatgtctgggagttacctagctgtcagctaatctatactggctttggctggggtaatttggctctgcttcgtgtgtatctcatctttcttctgggatcaatggactagcctgggtatggccttatcatagtaaagacagagacaagaatgaaagcaagcagaattgcttaagtgctcttcaagcttctgcttgagtcgcctttgctaacatctaattagtccaagaaagtcacatagctaagtttcaaagtcacaaaattatgtagcaaagggtagggatgtaagaagaggtgcagaattggggcattttttgcaatttatcacacattgggaaagtgggtaaagagagaaattgaagagactatggctggaagaatttgcactgagggatgagcaaggatgacttgtaagttaagccagtgtgatggttggctggcagaagcattaggttccagtaggcatctgatggattggcagtgggcactccgagcctcctcagaggaaactgatccacttaccctcttggccttagtttctgcatatgtaaatggagatgctaacacttttcagattgttacgtcagtgaggtaatactttctaaagcattttgtaaacaacttaaaatatgggggtaggtgtgaatgtgtgtactagtccaatacccttttccagcatagataaactgccaggtagctagtccccaggcatgtgagtaagcccagtcaagatcatgagagccacagtgaggaatgttggggccagattaccatgtaaagtctgtgtagttgtctcaaacccctgccaaagctaaagtgactcaaaccctatggtttaaaaaaaagtctcttaaaaattattttatctctagtatactttcaaactgagtggtttttgccccttgtggggggatggcacagatatacatatgtatctggcatatgatggcacagagtacagacactaaactggtaataatgcatgcttcctctagagggcagtgccctccacccagcccttgctaagtcctctggtggccacagtaggactctatagctctttctttcagatcacctgctgagagccctctggacttgaatatgggaagcaagtctgcctaacttcaagtggcttgcactgggctgtctctctgaactcccttggatgaaggtgaacttccctactgtctagaacaggcttttcagatgcagagttctagatcctattgttttctcctgagcaatgtccagaaataggggtccattggcattaatgccaagtactctttttatacccccctccacaatgcccgctgtggggcatgggagctgtgttggtaagtggactcccaggagcatcctgtaagtcccaagcaaggtatgcaaatgactccgggagtgatcctggtcacatctatgaatgaggacctatttatggatgtggctttggaaagactttggcaaatatgtttttttttgtttttgtttttgttttgttttttgtcttaggaacacttacggtggcaattctgttaaaaataaaaagagaaaaaaacaactccagtcctcttttactgagcagggaaagagtccttaccggtgcatagtgggcagagtatagtacccctctgtggaggctttcaaatgaatgtcgtgcattttgacttaagtagcacaataaatatctctgcatgcaagattgtactatctgccttattcttctgtttcatctcaggtcaatattggagttgaatgtcaaagctccttatgttatattcagctgtcaactaggtattctgatggtttttaacacctctgacctcttgaccattccttggtggatttggaaaactgagttatttatcaatttatttacttgattctcatttcacatttaccaggtatttgtttttgggggatttgatgacatcatcattaaaaggaatgccattcactggagtatattaaggtttgtgcaatgcaggtggctttgcatttttatagctatttttaatggccagtaagttttaggccttggatggtctttgggcctgtcctaagtaacacagatataatcaagaaccatgttgtgtatttcaaatgtttttctcccttgatatttttgttttctttttaaagaaaatctatggcagttttgttcaatagaaacaatatgtgagccttgtgagtgattttaaattatctagtacccacattaaaaagtaaaaagaaataagtaatatgcatgaaatgttctgtattctttgtttttcatattctttgcaatctggtgtggatttcacacttagagcacatctcagtttgcactagccacgtttcgagtgctcagtagccactggctagtgcaatgaatcacacagacctgtagcattaagacggtgatgtgatacaatgtggagaatcttccaccacggtttgtgtactttgttgttgttgtaagcagcagcatcttgattaaatttgggacaatacacttgaattacttaaattgcatccctaattatcacacggttcacttgattaccctttagcaccttgttgctttttgagtagcactggaagaaaacgtgttgagaaccactatactgtttccgaaaaagctttagaatagcaaagctaagcagaaatattgagcctagctgctctgagagacagtatttatgtggatgcatacacacgataaaagactcaccactttagagcactcctcttaggaaaaagggacgggaggtgtgatgcttaggaccaaatatctaagagcactacagcttgttccaccttaatgttccactgacctgagggcctccagtgctccttaagtatggctaacattgcatgtatatgtaggacttacaggcatttggccttctcctgggctttttagaaaaaaagtctggggaaactcagacttgtatcaatttaagtctctgctcaatttagtatttcctgttctacaatgatagagtgcctttagaatcttgtctatagactctggaaaccagtccattctcatttaaaaggtattgacttttatttttttcctttgggctctaaaattggcctaattgtatagttgcagccagaatgagtttggcttccagtttacaatcttgtactatggaaggtttaggattcttatggttatgcttgagaagaatgagatgttttcaaaatttagaatgttgttaaggagaaatgaacaaaaggggataacttaaatttccccattttaatttagctattttatgccaagtttcaatccaaaatgtccagatcagtttagaaaatgattgtgtccttcatgtagtctaaaaagtgttaccatgccctgttaagtttatgattttgatttattgccaaatgtgtaattgtttctagaagaaaatatataatggatatattgctctgttctgtagccatctttatattcatgatttttagaaatcaacaacccacatgcttaaagggtggtaaatacacagatatttcctaacaaatattaatctaaaaggttttttttagtttgtttctacctcttatagtaggactgaatttacctccatctaacctcaaagttaggcctgatggtggggactatgtcacattggtaagtccaggtaaagactgtttatgagtatagcagtatcctcagtataatgtaattttaaatccacacatacaaatggggaccaaatacgtgtaatatggtagttatgtatacatctctactattctgatgtaatgattatgtcatgttcacggtatacctttaggccatttggggagccagcatgtctttttaaatccctctcattttttcttttaacctttagaactctctttttaatgtgatctgggatagatccagatgatctctttgtactcccaagttgccttgagaagatcccagtgatcagcaccacaattggtcagaaataccccatctgtgatgacaagtgaacagtgctcatttctacctctgcgctatgtgagaacagaaatacagcaccaagaactagataaatcttgaatactaaccttttcatctgtgctgtccatttatacatttctttgagtcaaagagggatggatatatttttcccctttaaattggatagcaaatgatcagtgggctagaattcttcattattcatagatgtaataatttaaaaaatacaagtggcttattttcttaatttttgaaaactccaaacatgaaagtaaatatttaccatctgagtctttaaacattgtttataaatgttttaattctggcatttttatagtggtggtctcggtgcattttatggcaggaagtttgagaaaaatgtaaagaactggtgaggattggggtggatgtgtttttgaattgccacagttcttttgagaatttcagtgccccatcaatttgcatagacaccatttgaataaacatggcctctgccaacaaatacactgaaaataattttcttttttaaaaaaaggaaagagaaaattccagtgaacagtttgcaaacttgagaaatgcagccttcggtataaaacaaaggtgtgctcagatagaacaaaaagaggagttgtcttttatatagaaagttcccactctgatcctcttatgcaaattaggaatgcaaacttgcttacttctgattggttgatgcaggccacagactattggttaattcaaacaatgtaaacagaaacagacagctatggaagtcccagaattaagtgaatttaggggttttctgggaatgcacatgtatgatgtgcctctattttggatttaggtcgttagccactcaggatccatcttgaaggattggctctttcaggattcacatttcattccttgttttgatgtttttccagaatcccaggtttaaatggagtaattgctacactttcaagacatctgtctgttgctttcctaatgtgagggatgtggattaaagaaacagcagttgcttcttgctatatgatccattgtaccttatgcaaagttaaacatacctaaactcttggctttcatattgtgaccataccccactaggacaatgctttcaataggtgtaaaacttccaaaggctttttcagctctggcacatctttgatatatcttttgcaattttttttttaggtctgatgactgtgttaaactatggagaagacacatcatttagagaacattctctagtggattgattctaaaattagacttgtcttaattggcgtaaactctcaccttctaattatgctaatgccattaagatttcaacagcacagcatcctgaagttgctgcagacaattgatctgtgttttctaccagtagcaatgatgacgctaattggtaaaattctcctggacaatattataggattctgaactagtatattattcatttagtttgcataaaactctccttctacactcaaatgctccaaaatcagtggctttttaccctttatacaaaattttatttctaagcaacactgttataagatattctaaaaaattgaatcactaaaatgctaagtttgagctgggggcatagagaatcgtgttaacaagaaccaccagagttaatttcagctactaattctgttgagctactttcactttacaagttcacttctgtttgcctgccggcagccagaaaggaagatttgaaatggttgtccttatgacatcgaattaatcttggaaaaagttgaaatctggttcaatttcataatttaatgttttaacattcattgactttcatttgccaccattatactgtcaggaagatgtctctaccaagtgttacacatgtgtatatctacaaaatggctgttaccaggagggaacactataaggcttcagtattacttgttgtcatcactattagtgagatttttttgcttcagtactcaagaatacaaaccagatcattaactgatagagaggaagaaagataatctgtaggaggataaattggaggaggatatttaaccatacaatgatagaagaccagaggttatctggtccagttcatgaactacagaagtctcttctgccatttcctggatcaaggagcatccaagctccagagatggggagcatacgacctcacccagtagtctgaggcagtgtgtgccataggtttacttactgggaatttttcttaagtatgtcttgttgaaacttctttttggtcttggttttgttttaggtaacaaagcagaataaatctatttgtacttgcatgtgatagatttttaggatatttaaagatatccataatacttttgtgatgctgaagccaactcaatttaaactatttctcagagagaagatttattttagtttttctattaaggagctgattctcctaattgatttagccgtcaagtagttgttgagcacatactttgattaaggccttacaaagttaagtaatgcctaaatttggccttaagggagcttgtccaataatagaagctatatacacaaatgaaggttacaaactgggccaatactcttatatacatgatgatataaagacatccttaattgattattttagcaaaataaatgttaggtttaaaaattttatgttaactatttagtgtatttataacactgagtgtgatagtaatatagctacttctccaagtaaatctaactagttaacttaactatgagcattttcttcaacatacacatgacaaagcaagcacttattttgaccttccatctttttttgtagaatttgaaattttgatactttattcatgtcaacatggacttcttatcgggtttcacagctaactgagcatttcttatttatagattagtgtcatttggtttcttaaatttttttctgtttacatttgcaagtcctttgtcaatttgaataaagtagaccataaaaggaataatattttaatacctatagattatattgctgcttgtctaagaaaatgcttaagcgacctcttatactgtgttcttagatgatattcactaacttgtttattcttgctaaaattttctttaagattttgttaagtacagccttcaaatttatacatgagatgattgctagatgcctgtcagaactatttcattcatattagtaaaagattgatgtaagatagcactgttattctagttcatggtggctggtgcttgaaaggatgtaaataaaaatttttaggaccagtcattgtcacttttaattcgaatcggaataattaaattggaattaatttaaatatgtatacagatggtcttagtgcaaagaaataactgacaagaaagtccttgaagttgggtgcctgataggagagactactgaggtattcgaagatttgggggagaggaaaagtcaaattggaacacatccttaagaatctaaaatctccagtagacctgcataaggctttaaaaggtaaacaccatcaagtacttattcctgtatcattccacaactcatgcatatatgtgaagaattgcagaattttgtaaaacgtttgtccatatcctgttagagatctgtcctgcagctaatttaaaactgaaccatgttcctcgtttctgggacttggcacttgactcattctcctgttaggactgtgaccttgctggtctgtgtttcaccccacagatctacatccagttgttttggctaggcccctgattctacctcatctgtctctgagatgggctgagttttataagtgggctggagaaaaccaccatggtagcagcagaccaatttctccatctacttagggactttattcccagcatccagattttcttttccttcttgctccttttccttcatgagggacctcacatttattgatacaactctctgcagcctccaggggtcctcataaaacttctttccagcctctcaggggtatgagaaaattgagactcaagaggtgcaaggatgagcacttgaacctcagccagatggtatttctgaactactgccgctcatgtgcataacctgataagaagccatggtcaggagggatccaggaagtgagcccctcccccaagcacaagcatgaagacatttatctagggcaaaggccacaaggggagaaggatgtggcccctgggtcggggtgggagaacaagcatagccctggttctgactccatggtgatcttccaggcagtgaacttgaatacctgctgcctggactcttgctgtctcttcagattatccttcctctctctctctctctttaatctgccttatatagatgtgtacttgggaatacttctatgacataacttccttccatgaaaataaattatacctttacttggaaccctgaagtttggaagagaaaggagctaattagtccagtcaattaagtcaattttaagttaattttaaatgaaacacacccctagatctagtttgaattttttaccttgggtgcaaggattttctagttgaggccaagatgccctcaaaggtagaaaaatactatgaaatacctcttctgttaggctttggcaagacttttgggggcagaggtggtgtcataaagggatcttctatactatttccatttcctgaggaagatgatgtaggtctctggttacatttcttaagaaattcacaccatttcccatctcagttgatgaaaattaatgctcttttgttcttagaaacatccttgccggaaagagaggaaaagtaaattctggaataatctaaaatgatgatgatgatacttaatgtctattgaacacttactatatgccccatgctatgtgttaacctcattcagtccttagtataaccttgtgaaaaaagtatgaatattatcttcatttgtagatgaggaaattgaagcagaaataacttgtcccaagttctacagcaataaattgcagagtaggactcaaacgcaactctgtctcaccccaaagcccattttctaaaacactgttaccactagctatgtgggcccttccagttgaggtaggccatggttctgagtggccctgtgctgtgcaggcctttatgagtagtaccccatgaagttcatcacaaacttcccatttctggcaaaggattctattattcattttcaggtgaaacttttaaaagtccttctttgtagccccattaattttatgcatttgctaattagggttttttttcattttgttatttatttatttatttatttatttatttattttgcaaaacataagggggctataccccagaatcaggccacatttgagtgcaataaacctctcactgttgatcagaacagctaagtatacctgccctgtccactgtttaataagtcaacctacttaacagcaggacagaagccattttcttttattgttttcttttcccttgctcatacaaaattctttcataactatcaccctgactttgagtgaataaccgttactcattctcttctcgtagagaaacatttaaaattgcaagttactttctgttcaaacagttgtccctgttcaaaatcaaatttcttgcacttaggatcagtgagactgctaagcaaatccccaagataagttttggatgagaatgaactcaaagatcagagcatcatggaaaatggtggaactccagccccaaggctatcatattgagcagaagtgaaagacaacaccagcagtagaggacagtgctgagtcacctggtgggaggcaggcccacagaggccaagactgtataccctgtgacagaatcagcatgaggggtagggcagggatttctttctttcttttttcttttttttttagtcagacagagtctcactctgtcacccaggctggagtgcaatcgcgcgatcttggctcactgcaacctccgcctcccgggttcaagcaattctcctgcctcagcctccggagtagctgggattacaggcatctgccaccactcccagctgatttttgtatttttagtacaaaaaggaggtctcgaactcctgacctcaggtgatccgccagccgtgggctcccaaagtgctgggattataggcgtgagccaccacgcctggccggatttctttttgtccataatttctctaataaaactacagtcctgttgaagaaacatcacgggacaaatagccaagatgttacaaagcacacgactatgtaagaaataaccccttcataattgaggctcattgttacatcctgactttctgggaggtgtttccttagctagcaaccctggaagttcctgtgtcctggttaggatttcagcttactgctgctgttggtgtcttgcaaattggcctttgggtattctagtgggcagatttccttcctgtaaaattccaaaaatactgtttttaattcatatgacctgtatgttcccatgaatacagttattctgatgttgctttaaccttgtgcaccatggcaaatatttgcttcctctaaaactccctccccagtttgcttccgttttacacgctcaaggccagtctattctaaaagagatatataatcttgtgtccttgctcctagacttagaaatgtcatggctatcattgcttcagttcaaccccagatcccttgggtggcccagctcagcagagcttgttttccttcatgtgctgcttagttattgttgaggctgctgaactcactttttccttcccagtgcctcttgaaacccagccatctttccccacaggagagtaagcccctgctgataggaatcttcccatgtgccacatgcacacagcagtttgccaacgtggatggctgccaatggttttctcctagttgcaagtttattttccctggatggcagtgctgtgccacacgggtggtccgtgacacactaggcttcccattgatagaagcttctttgtggagaagtgcctctggtgtacttggggttcccacagacatatgtgacagttgaataagtgaaaaaatattttcatattttagtgatttttagcttattttgcagcagaaggatgtgtcaatattagtgtacgctataggcccctcaagaggtaacagattgctccagccccgggggacttcactgactgttacatcagacctggagccaccagagagcaccctataggcagccacccatgattggcctattaatgaaagtgttaaggattccacactatgtacccctactttgtagggcatggcatgggtccctggctaactctgcaaagcagggagaatgagcaccttcctacaactgcacgttagggagctatacctctctccccgctaacttcccacttctggtaaaatgctacagtctttaatcttctgcccatttttaaaaaattgaaattgtattgacttacctccttcaccctatgtgactttctctctccaaaatcacagggcaggccccctatggtacaatctgagtgctacctataaaaaggtttttcacactgtgggttacaaagatcatcttagtgagtcatgatcaacattttaaaatattgaatacaatggagtagaaaatagaatacatgctcatagtgagggtaagtattgttttgagaaagccatgtttaagctgtatatgtgtacgtatatggatattcagcataaatctgattttttatgtagatcgtggtcaagtctggaagcccctgattgtagagccctatcttctaccttagtctcaaagtacctaccattcccatcagcttgcctttaaagttgggccagctcctgctctgcaaagcctcaattgtgtggaaccttccttaattatatgggccttgggcactccaggtcttaaatcattaaagacagattaaattatggccacactgcatgttctaaggcaaggggtgtactcatgggcttcagatttttttgaattaagacaaattggtcttctattaattcttggttaataagaaaattcaatttagcccagtatgatgctctgtaagcattttggatattcaaggcttttctctggaatgcaggggtttaagacatacagcaagcagggactttgctggggaaagacgaagtgtcttttcttttcatgctttaataggtagaaagaagcctcctagtgtacatggagaaatatatttagctatctttacgacaccctttgcctctgactgattatatggataaggaattgttttagcaagctctccccagccacatctagaaagtctcctcaaaggcatgtttatttagtctttagaagggacttctcgtgtgataatgagataagaatagcagcaactctgggttattgggcatttagtgttagtcacagacctaagtgatttactttacattatttcatctgatccttgtaacagcccccctgaggtgtctgttgtcatcccccttttacagagaaaaaaaataaactgggtactaaggaagttatgtaacttgtccaaggtcacatacctgtgagtggtggagaggggattccactgagcgtagcacacaagtccagcattcatatgccatgtgagatggccactttacatcgtctgatttggttcttatattttcccttctgcctggaatattctctcttgttcatccccagccatcagaatccattctatctcgtaggccctagtttgaatcccaccttttgtgaaatctttttttgcttttcctggtgagaagtgatttcctgctctctgtactcttgtggcacatggttgtctctctcttggcacatcacattctgccacatactgggttactgttagatgtaaatatgacccgttcttgggttgcggttcttatgggatggttctattgcttcttctttggtttgggtgagaatgtatgcactgtcttcatcagtggggtctgctttggcaacttcaagttcaggcttagtctttccctcatctctgagcaatgattcatgtcctaaagggatgagagtattttttttctcactttcattgtaattgccacatttcatatgaggaccacttattttctaattgtgattctatttaccagaattcttctagatttttctagattcttctttctggattcttctagaaaactcagccatgaatgagataggattttaaaaaatatatacccaagtaaaaatggacagttttgtactacaatggatctgtcccatattttactgtcatgtgccttcatgggttttgaaatggagcaaggaggatgccaggagaaggagaagtaggtttaaaacatgatggtgtgaaaactgaattttcattgcattttagaagcctgaaggtaattgaaatttagtttttcaggattgaatgtttagggtgcctttcttttaggggaagggaaactaccatttctttagccccttctctgtgctggactccacatttaacatgtttctgcttctcctggcttcttcctcacccgctttcaaaactcataaatagcataatagcgaaatatgagaacaaaagggcaactcccaagattgcatcttattgtgtttacagatatggaaactgaggctcagtgagattgtactcaaatcagctaggtacttattacctatctgataaagcctgaaatggaacccaggccaactttaccccaaagctctttgtccacagcatttactgttcaaggagaagcctggaaattttctgtttgtgatgagagagagactttcagtggacatctcctcaacaagcaagcccttccttcccttgccaaagctgacttgattaaatcacatattctttaagaagagtcactattttattgccttttaaaggtattttctctcttaaaatgctaacatttaactacagaatatgcatttaaaattaaattataagaagtctggcatttactgtgtaggaaggaaagattggagaaagatctatctcacacttctcaaatcacattaagtaggagacatcttcctaagagctgaggctgattctgctttggaggttgaataacagtggttagaagtacatttcttaagcacttgtatgtttcaggcacaatactaagcactttagctatatttcatttaatacccactatacctctgtgagattggttatcctcatttacatgaggtaagggaggctttgcccaaggtcatctgttaggtattcatgggagctgggttttgtgcctggtcagattaaaagccaaagcgtgtgctcagtctttctgctagaggatttgtgtgtagaatcttggccttggatacttggtacacaacctcccagtgggagatctcaagtatgtttgcagcatgattaatgcccagagtgcagccccctctccaagaatttctactgtctgcagttctgaagagaggctttgaactttcacaagtgaaggttttctcttccaggtgtgtgtttgtagttgaagaacaaagaaaactgtgcgatactagtaatgcaagttcccttgggaaggcatgtatgttgttcttaactgctgaacctattattgcttatctttaccttcagggtggcgttgacagagttaactatgacgaaaggagtccaaacccctctctgaaggaagtagctgtcctctgaccatctctacccgatagcggagttctctctgtgatgcccttctctggtataccctaaaactgaaatcttagaaaagaactatgtgcctctttcctcctccttcctttcactctcccctcttaattcaccttctgatcctttctttaaattttgttcatgtactccttcaaactctcaccaacaataaggtctgaattttgtctgatggtatgtaattttcacggtgctttcccattttgtccccatgatgcagacattatcttcattttgcagattggaggttgaggctcggaggtcttagccaagatcacagcaaaggtaggatgaaagagagagtaaataggtaccggaaaaggaaagaagaaatgcttttctcctggaatttcctccttctagtcttttggaaagtcctcttaccattttttctcaggccttatgaagcctttctccactagctgatgcctcatgctgctactgcctcttcattttcattacaaagtataaaatcattatttcacttaggtacaaagagctctcctccttttacagtagatacttgtcatgtttctcctgaaagccattaacaatttctgtttttctgtttccggcatgctctggggtgtgcgtttgtgttgccagagtgaatgtgcagcttctcttcaaccctgtctgcagtggttcccagagattaaagggagcacaccttgaggttatttgtatgattaaattgagcagctgtggctaggacatttcaagattggactggggattcagggtgactgtgactaattgaaaaactcaacaaaatgatgttgaataaggacaagtggacaataccatcatgagaggaaaaaagccacccaatctcccagtgggtatttataggacaattatgctttgctcattattgtgctgagtactgaggttgactcagaaaaagctgagaggttgtctctactctccaagagtttaaaatctagttggagagcaaagacctaaacacacgaaacaaataaggaaggaataaatggctataaacagtggcctttgtaatctatggtgctcagagaaatagacttaaatgccgcaaaatccagaggatgaaagattcaataagaaacaacctctgaccaaaccaaggctcctgctactgagaaggtgcacatgtaaatgattaagatagagtgtaatcacataatacaaacaactacaagagtaagcagctggagggcagtggttaaaagcatagactgcagtgatgctgcttgggttcaaatcctgtccctggcatttcctgatcatgtaatcttgggcagtttatttaaccactccttacctccatttcctcatctgtaaaatggggagtaataatcctacctcccatgaggtaggattattataagggttgaataagttgatacatgcttctgagagttcctagcccatggcagtgctttgtatgctgtggtgatagtgatgatgatgatgtcagtgaccagcagcccagaaaggggagagaacctctgctggggaagaatgggatggagagtggggaaacttgcacaatgggtccttagcaaagtttcttaaatgtccaggcagatgatgaggaaagacacaaaattacatgataggttggtaagggggctgcagcttgttgggtattgttgcagcgtcaggtttgagtataagggattcaaatcctgggagaagatataacccacattgggctataaaggatgggtagaacattagtagtggaggaggagggcttttcagtatgaacaaaggtatacagttgggctgtttgttcaaataaatataaaaaaggatgtgtaaataaagcaaaaaaagccacaagggggggaatgtgtctgcaatgtggttggtagctaagactcagcagaaagtacttaatactgaaacatcacattgagatttagcctatattaaactaaaatctccccaattttactaagaaaagcaaaattgttagaatggaagctgggtgtgacaggaaaaagatcagttccaaagggacaaagtataggttaaggagtgaaattttaaaaaatttaaaccagggccgggcacggtggctcatgcctgtaatcccagcactttgggaggctaaggcaggtggatcatgaggtcaggagatcaagaccatcctggctaacacaatgaaaccccgtctctaccaaaaaaaaaaaaaaaaaaaaaaattagccagatgtggtggcgggtgcctgtagtcccagctactcaggaggctgaggcaggagaatggcgtgaacccaggaggcggaacttgcagtgagccgagatcgcgccactgcactccagcctgggcgacagagcgagactccgtctcaaaaaataaaataaaataataaaacaaaataaaaataaaccagtttttgctttggtggtaatgaatgagagataatgggaaggaggggcagaaagggtggtatcttgcctgtaaaagaccaacaaggtaaatctctggggtttgtggaatcctgacaatgccctgtgcttctctcactctgacactatgaatgttgctttcagtgcaggatagatggctccagtgggtataataaaattaacggggcccaaactccctcttcttctcaaactgtgctgacctcagtaaactatgcacaggagagaggttttgtttcagtagggtgatgtataggctaaaattattctgagtcacctgtttgggggaacattttgctgagaagtgctgatgcttctgaccttgagcttaaggaatagctgcactgttgttctggtgacattctatgatgttaaatctttatttcaaccttgtgtgaccagacagtttactgggaatgaggagaaagcacactagtatcaaaataaatcttcatatagtctatcatagcttgttttttcagataatgagtgtccctttcgatttatatcttttgcatttccttaatgaattttgattttcagaataaattaagtattgtcactatatacagtcctgataaggctgaccttgttccccagagactcttttacactgccctcaacccccgtctgtaatagaagttgtttagaggcctttaaaggtgacattttgaagcaatctgtagggatgaataaatgacgtggattctagtcctggctctgcctccaactcactgtgtgatcttaggcaaatattttgcctctccaagcctcaatcttctcatttgtaaaattgtgagggttggactagagatgatattgatgaagatagtagctaacattgattgaatgcttctgatgtacaaggtgttattccaagcactttataaatatcaatttgtttaatcctcccatcagccttgtcaggcaggtactcgatcatcattgactccctcttacagatgagggaatgcacacacacaggtcacttgccaaaggtctcccggccggtaagtggtgtggaacaggattattctaacccaggaagacaacccctaagcctgctctcatggccactgtggcctcctgcccctcactgtcttgctgctgacagtgatgtctaatgtggtatccagtgagggtttagaaaatgtcatgacatccgtatttgcagtgaagtcaccccacccatctgcactcatacaccaacaccagtttgatcctactcaggctgctcattgctactgtgatgtttggcatcacttcagttggctggagtagggacaggggcagccttggagcccttgctaattcccaggagcttctaattctgctgctctgtgagcccattgcttcctggatgggtctgtccaccttgacagggtccccacagtaatcctatggtagacctgcaaacaaaggagttgacaaattttatgcctcttccaagagctcaatttaaaacagctgctattgctgatttgcaaatgaatgacaaagctgtgcacctgtagtcccagctacttggaaggctgagatgggaagatggcgagctcaagcccagcctgggcaaaatagcaagactcccgtctccaaattaattaaacttgtattcaagggatgatttgaaggaaaaaaaaaaaagaaaatgaatgacagcaaactttctcttgaacagtgagcataggaggggctgtgcagaaagtaaggagatgactattttctagctgcaaaacaacgcttatttttcccaaaagccagagcaaacctctggatttataactgtctagaagcttaacagaatgaaagattctctcaggaggcaattcagaacataaaaggattctggacggtacagattcttggtagcgtgcatggctgtggaaatacttggaagcactcaataataacataaataataataaaaatagcaatgggaaaattactgcttttgtttgacatttcctgtttaccagacctgaatgcctggttagtatattagagaaattatctgtttaaacctttcatcagcacaacagtttacatatgaagaacctgaaagtatagggttgttttttgggtgcctgcacaatttatgtttaagttaaggtacttcttgtcaattacctggcagtgaattactgacctgataaattccagacttattggtcaaacagacttaaaactctggtttttaaactagtaatagttggtgtactttctataaaaaaaaaacctgtaaatacattaaaactctggaaaaagtaatctggcaaaaagtatagatccaataccatagagcttttctataatatcttttgtattacatgttcataaaagaaagaaaaggctgcaggattttgtggcagacaggatgtggctatggctttggtaagtaaattttgttgcagggttggctcctacaaatattaatgtgtgtagctgtgggattttgtgaaggtagtgtttgtttttactctccctgaagtggcagtggaatagagtagaaatattaggagcagtgaatgcacgtaaaacaggggttcttagcaggggcatgtcagaaaccaaaggagggaggtgtatgtagttggagaaagtgcgttcgcaattaccattgcttggaagaacttgtgaaatgccagataatcttaaaggagggcatcaggtattttatgcttaccaaaagttgagaagctctaattacttccttgttcaagtgaatgatgatgtgtaatttacatgctgtaattatatgcattcatgtggagtggaatgtccccaaatttcaaaaattgcattaaggtgatagaatttggggataatatttattttaaaattctgcctttaagaacgagaatgtgcaagcacaggtgcaattatgtacttcattgcttttatctgtacttctgggacatttgtgtcttcatattgccagagaccagtggccacgggaaaacagattgtctcagttcacggtccctcactgaggtcagagcttaaatttcccagtgttccacttaggaagaacagtgctaatgtgtatcttttaagataactcagcctgaaagccatctgactttcagtgagaatgaggggtacactaggggagaaaataggcatcaaagtttggagagggctgtgctgcctatagattttcttctaattacattcacccagaaatgcatactttaaaaaaattatgcttactactcttttaacacagaagcttctactggttggttttgctagttaaaatccttcagttaagctctgtaaaattattcccccacttggattaaagggatagaacacatgcagttaatacataaaccctcatggtacatttgtcctgagttttactgaaatatttttggtagagatggggctttaccatgttggccaggctggtctcgaactcctgacctcaggtcatccgcctgcctcggcctcccaaagtcctgggattacaggcataagccaccgtgcccagccttgtctgtgatacaaaattttgtgtcacagaattctatttttaacactattactttctagaaggtaccaaacatactataaaataagcatttattgagtgtgtactaaatttaggacaccatattgggtgctcctggaaatgtaaaacacaatgatttggtccctaacctcaattgtttgcatgctattaagaggacaagatggacatttgtgaagtttcaagacaaattgaaactgtaatctgcaaagcaacataattgtggcagcattgactgaacaggctttcttttagccctttgatgtttagtccttattctcatggtttgattatggaagagtccaagatgctgaatgttagtcacagattgagtcctgtggttccggcagcttgtcaactctggttgctatacgtttggataatgttaataaattcattgttcaggggagcttacagtgtagagaaccaggttgagcacaagtcagatacacaaaatacaattaactataccaagtaaccaagaaaactaacttataaaagttcctggcatggtgtagtcaaaatgacttggcctatgattaaggacattgggtttttgctttgtcttggtccctaacagactgtgggacatggggcactacttagctttctctgagcctgcattcttatcttgaaatgggtatgctgattatgtgagcctcatgggattattatgaatactaaatggaattttatgaatgaatatactttataaactgtaaagcagcttacaaatgttagaggatattttaatttcacttgttgcataaaatccaagagccatttttcttcctcctactgtctctaatgattatataataacattttttcacttattctttttctgcttgtgttttgaggttctccctcacaatacactccaatcaaaataaagattatttgcatcactacatgtgtcccctcctattattcctgaccccttcatggacagtcacttttaggatttctattgctgtagcttagttgagccatttacattttatttattacttatagttgggatcttgctctgttgcccaggctggagtgccatggcacaattatggctcactgtagcctcaaactcctgggctcaagtgattctcctgcctcacccttggagtagctaggactacaggtgtgggccaccatgcctggctaattttttaaatttttgtcatcgtgacagggtctcgctgtgttgtccaggctggtctcaaactcctggccttaaacagtcctcccacctcaacctcccaaagtgctgggattacaggcgggagtcaccacacccagccaggcatctgcattttaactttagccaggcatggtggcataagcctgtaatcccagctactctggaggatgaggcaggagactcacttgagcccgggaggtggaggttgcagtaagctgagatcacaccattgtactccagcctgggcaagagcaaaactctgtctcaaaaaaaaaaaaaaaaagaagtaacagatgccaatattatgttattcctgttaggtaaggagggtccctggtgtaatcccaaatgtgcttgcttttttatttactatattatttactttttaaacatttatttttattataccctctagcattttggaaggcacttattttatatatgcttggtccttaggccctttcttcaccccaaatgagtatgttaacagattgtgacacagtgtgacacctcttcgtatgctgtattgtccacactgacacatttctgatgaccgccaagccctcattcttgcatgggaagagtccctgctgcagtaatgttagccacttgctgagctcacaagtcagaaggggggtggtggttcaagaggtgtggtgagaggctcagtgatggtgaaaggatatccaaaggatcctgccaatgccattggatcatttaagagagacctactttgaatggtccatagagtatggtgagtttggcaacaagccaattccttcaagatagtgtcttcatttatttgaagtcacttggcatgtagccttatgtggtcaaggacctaagccacacttttgggaggagctgagggaagggcctggcctcctgagaattgccagtattgcaccctccttgtaggccccctggttagccaaccagggattctgttctctcgctggtacaggctgcttgtggctacccgagttgggtttccccagggtccgttcagggcaaagggttgtgctgttaataggtctatcaccacagttttctgatgctgtacaggatgcagtgtttaaagtcaggctgaacacataggctgcttcacagtccctatcctttatttcaggaggaaagggatagccaagtctcgcagtgacaggcatgttaatctgtgggttgcccggctcacagccttttctgaccatctgttctcctagcacttgctgataagatggggcattgggacatggccttgccctcatcacagctgatggcttccgggaggtcacctgacctgagacaggcccctcagattctctcttccatgaatttgaaatttgtgttcaaggctgctcatcagtctctgttggatgtttgaattgggaatgctctaatgggaggcttttggacagagagagccagtgtgcatagatagagaagaatgcagctgatgtgcaagagaagtacatcccagagccctgactatagggaagggtagctcctttggcttcctgtcccaggaagtgccagcggcttgtgcttccctacaggatgcccatggccctcaggaagccccttgctcaaggtggcttgtatcatctcttgctagtagccacatgatttgtggttaagatactttacgtttgaataatgcgaggcaaaatgagttgagagaatggtttactaaaaataatatcaattgatgtaagaggtcagaatatagccatggtgcctgctggtccatcctgccagcaagccagtgcagtccttggtcacagtcactcacagtgtgtgccagggcttcagacagcccttggctgtgagtgaagacatgtggtaagagccaggggctttcctgtgcccaggaaagcatgtccttggccataacttgtgtggagcacaggtaggactcaaccattctggcccttcaatgcagctttaaagagtggtcactgggccagtcactttcagctgacactgtcaaaggggaaggatttctgcttcttgctgagaagccttagctttctaaaataagttgttttggtgactcttggggaaggaagaggcttatatcactggtctttgagttgagggacctgattaccaggttatacttttctggacttctcatttgtctaagaccacaacagtcatatttatttctaagcacaacatggaaggaatgcaacagcttctgatgctgtttccagacttgactattgcatctctctagccgtttttacatgtaaggatccctgcccaacctctcccatctcatgccctcttagcaacctcagaaaccaaagaaaaatgccctgttaatgtgtccttgatgagagctatttgcaaacaaagcactctttctagtcatatttcattatcagaaatgtgattacatatatatatatatatatatatagttaataacaatcccatgagggactcatctctttttcagggagcagatgactggggatgcagataaggtgtacccaaagtcttagaatacaaggtaaaaatgtcagtaatggccggatgcggtggctcacgcctgtaatcccagcactttgggaggccgaggcgggtggatcatgaggtcaggagatcgagaccggcctggccaacatggtgaaactccgtctctactaaaaatacaaaaaattagccgggcgtggtggcgggcgcctataatcccagctactcgggaggctgaggcaggagaatggcatgaacccgggagccgaagcttgcagtgagctgagatcacaccactgcactccagcctgggcgacagagcgagactccatccccccaaaaagaagtcagtcataagaggtatgtggaaaatcttaagcacatttagaagaggatgaaatgattattgtctttgagtgtcaggaaaggcctcttggtgaaaggacatcttcgttgtgctttgaaaggcaggtaggacctggctgagcagcgatggggcaggagggctgagcaggtagagccctgcatgtatcctgcaggagcaagcttgatggttgtgttgcctcagggtccaaagtgtagttgtatttgcccccatagccatgtaacgagctatgtaattttctataggaatagatctctggtgcaatataccattactaatagcaccttattagatacttcctctttttagttccaatatatgtcaggtttttgacagaatccttgtctatatgtgaaaagtatgaaggttgcaactatagtttttgtaaatttatctttaaccagcttcactgattcttaaagtcatccaggatttctgactctaagtgatgtagagtgtatttgcttatggaaaatagaagaattaaaataataaggcaaatactccttccagtgccatatcctcttttaaagaacacagctcattttcattgcagccccattacactgaacaggcttttctcttgctcttaatgtgtcaaaattgtatgacctatcgcttcctttgaagatcaaaggaaatgaaactccagatctgggaaaatggtttccccaattcctgtgctgttaatgctcctattcatccatgtatgaaaatccagggagataattggctagcaaaggctagccaattagctagcacaagtcttctgggacaatagtcagaatgagaacaggttttgagaaacagtgtaacttaggccttcctgctgggttcccagtcataggacttctgtcccatggttgcatccagagtctctatggggctgcccagaaagctgtttaccttctgttgtaacacctcccaaggcaacccactccattttgggcagtgcctattattagaaagttcttccttgtaatgagccaaaaatctgtttccctataactttccctaatactggcttaaatatagatttttgaggactggcctagaaacaagccaccaggtataacatggtttctcaaagaaaatacattttgagtttcaaacaagtaatgtataaataatccagaacacagcccagttcataaaatggagtatgcccaataaggggcacgggaggcccgtcccaggaaaggagaagggaaaaggccagtgcccccagggtcagtctgtagagtccgtttcttcccactctgcgtttacccatgtttcctggctattgacaattagaaactgcccaagaaacctcgctgtggaaattggttcagggtactggtttcctcacagctcactcgtaggaagcccttaggcagtataaagaaaaccaggcttctctttagcgttcacctacctagacgagagggtcagtgactgggtaatattggacagaggaactcagcccttggccttgactgctgttacttacactgccgcaagaggcagaatataataatggccaagaaaactgccttcgagttggacagaaattgattggactccgggctataccacttatttgctttgtgactttgagcacgttgctgaaagtcaacaaccgaaagcctcaggttttcatctgcaaaacagagattaagaataaatgtgatgaagcgtataaggagcacggtactgctcaataaatgtcgtttatcacacacatacatggttaactctgtttccagactgtgcccttcgttcatgaacagccaatcaaatccccctcccaggctgtggggtgagcagatacgatgcggttgccttatctcgtgactcagcccatcacttttggttagagctactttgaaaggcaattccacagtttcagagtgggttcttctcatatatgttgcacctgtggcctcttgtttctcttctcagggccaaaaccagagtacttaagtttcttaagctttcgttctagaatgtgcttggtggaaaaccaatactcaagacactacagttttccatgtgtttgtcaagctttattgattcttcagatcagtcctcccataggtttgttcctggtgctaatgatattgaacatttctggttcacgtcgacatacacatgaagatatttatttcccatactggcttttaaagtatcaaactatagcttggagtggaacatgctttcatttctatagatttacctgcttgaaggaggggaataatgcatagccttttattattttttttattatactttaagttctagggtacatgtgcacaacgtgcaggtttgttacatatgtatacatgtgccatgttggtgtgctgcacccattaactcgtcatttacattaggtatatctcctaatgctaatggatagccttttaaaataaatgaattattggccatgcctatagatcttatttatttttaattatggcagccaaattctcagggttgattcaaggaaaaatcagtgccaggatggacgatgctggcttatgaactcctcttatggaagagttaggagtaaagggttgaggagaaagaaccttctacagacaggctaaagaggacattaaaggaaagcagtagtggagggtcagggctttgagtaactgttctgccatttagtggcgatgaccttgggcacgtttcatagggttattaagaagattgagccagataaagcattaaagcacttagcatagtacagggcacacagatagtaagcacctcagttgtacattttttaagagacagggaaatcttacttaaatgctgttcattatcttggctcctaaccatcagctacagacctcatagagttataggatattagagcttcaaattacttttctattagtggtgatggattagaaggaactattcccatgctttctcatttagtcccccttgtggccaaaagcagacatttatgaagcaatgtgctggattagaagcaattggctaaagcacaggtttttatctgagtgcaactgccagggccttacagtagtcaggcccaccatttagcctccttgatgcagtgctagtgagaatagactttatgcctccaaagctcatacttacttacctgcctgctgtcttgtatttggtcagttagcaaatatttaactaagcccctcctgtgagccggcatttgtattggccctggggatacacccatgaataggatgaataggacaaaaatcctgccctcacagaacttaacattcattttggtagacagacaaagtgagtaaggtaaatagtatacaaaggtgataggtgcagtggcgaaagataaagcaggagccccgtgggggagtggaattctggtttcaaatacggtcatcagggaagggctcatggaggagcagagacctgaaatgagagatcttggaattccaggcagaaggaagagcaagtgtgaaatctctgaggcaagagcatgccaagagttttgagggtgaacacagaggcctgtgaggctgcagcagagtgaaccagtgggggctgcaggtcaagtaggaccttgcaggccaggataagaacattgactttctctctgagagatgaaatgttgtgggaggattttgagcaaagtcacgtattattggacttaggtttcagcaggatcatctcaactgctgtgttgaatagagaatgggggcaagggtggatgcaaggggagatggaggcttggcctagggtggtagtggtagaagtggtgaagtgtcctctttgtgcttttccaaaatgtctgatttttaggggggccaaaaacatattactattaccttaaagttatttttttcatagtactctgtcaatattagacatctgaattttccctgtacattgcatttagtagcagtaccatatatatatatgcagtgtggacatatgagtgttgaaaggaaagctaattaagtcactaataccagtttttaagttttttttttccttaaatcacctcaggagaaagttaggatcattgaaaggagaatcctaccttactatttatatgagaatcttgctcttgaacactgcatacatgctttcttttccaggtttttccacatttaatagtaggtcctcttctaacattatgtcttattggctccagtttcacctgaaaggaggcatgagttcttcagaccaacccacctcatcacaccccatcaatgcatagccacataaagcgtgggaattcagtgacttttttgccatctgagttctagcttcttcctgtgtataaagtatttattaggactatggttttggtttcagtattttgaagatgataatcctatatataaattatgcaaagaagattctcccttttgaaaataatggaactccaggaaagccaaataggttcaacataattatgagaaagaagtgtgccactgtcagattggcatttatggaaaaattgttacgattcgtttttccagattcattcccatccaaaattcacgaggacacagccaataaaagggagctgaatttgaagaagagctcgtcactaagattcattctgtatttattgagctgattctgtttgatggatattaggacagaatatttgaacagcatgttgtcttggaaaatcaggtacgaggtatggctgaggctttggtggatataaaggaggaaaggatttattccttccccacatgactcttaaaatcttgatgtattaatacaattaatacagggcagaacaaatgtgtagtcagtacaaacattctgtcaacacacattaatatgtggctcttgtttataagcttattctgacatgatctttttaaaaagtatcttattagtgtagaatttgatccgtcttttcacagtgctggttacctgaggaatggaagcaagggaaggggtttcttgccgtaactcttctttcactggtggttggctatctgctaatggcgctaagactgttagtgctcctggcactcacacggccttagtgtgtattcaactgtgccaaaagataaaggaggtggggcatacagggaatcccccaaacattaagcttctgtcactttagccactacagctggtgcagatttctaagtacataaatctcctggtaagtggctttgctggccccaattcctaataggcatttacctatatgatgtctatttatatatctgggtcatcatgaaaccagaggtatgagctatattcatatagtcttaacctctggtttgcttgcttcttcctttcacatgctcttggactctcaaagttgaaataagaccttcactattagtatagatcaaaaacctaagtcctgttttaaacatttgctaggagaactcaacaatgcttataaagaaaaaataatgccaagaggctcagaataagctacccttaacattcttctctgatgtaatagaacatttctcaatgtacggatatgtgtgcagttaaattctttcttttctttttgcttctgggcctttttggggaatttagtttttaagggagaagaaacctaagtctgtaagcttttagggtaatataaaagaaatgagaaaccaattcaatagggctgaccatttttttctcttttcccagtgtgatatacagagtacctaataacatgttcaggaattttctgtgactctatttgttgaataatggaattaagtataaggtagagctgtgtgggcctcatttgaaggagtttagttattcaagtagtaaaaggctctcttaacaaggtggcatttattattattttagcagctgtatagccctgattttctgtgacaggccaatttcaaagatctttaccgtgttcagattctgtttttaattctgaaaatactgtcaccatatgggtccatttttaccacttcatgggcccacaggacattagagagtattcagtctctagccagccacctccttgagccaccctccagctaaactccccaggatgagtacagagcccagcaggtgcagccccttggtgaatgctgttgaccagtctttggcatctgagctaacagttgaatttgatatttgcccctctgaggaccactgggcaattcaaagaaacaagtaactctagcactggaagggccctggggctagtcctgccactttgtagatgatgaactaagacacagatatgcaacatgactggtgtaagctagtggttgcaacttagagaaggaagtattgtttgctggacttacagcatgcctggagccatttcctatgaaatgattagttgtttcactacacatatgaagagactgtaatagacccacagtcaaagctagaatttctgacttttcatagtgctattcaaagccattttcatattttcaaaagcatctgtgatttgttataccttgttagacaatctgcattttagactctggctatctgatccctgataaaatccaaatagaagctagagtttgtgacaaatcactctagcttcatgacctagctcctgaaacttgaagtctatgaattggatctaggatgtaataatattaaaatacaaaatgtaatctcagtgggctgtactgggtacaaaaataaagagtaccctgtctggtcattagtgtatgcaggatcaatgaattgtgctggtgttttgtttcccataagtctttttttaaaaaaataagatcttgctctgtcacccaggctggagtgtggtggtacaatcttagctcactgcagcctcgacctcctgggctcaggtgatcctcccacctcagcctcccaagtagctgggactacaggcatgtgctgacacacctggctaatttttttttttttttagagatggggtctcactatgttgcccaggctggtcttgaactcctggcctcaagtgatcctcccgccttggcctcccaaagtgctgggattataggcacaagccactgtgcttggccttgtttccaataaatctttaaaggagaaaatgtctctttcttccatgtcctacttctcatattggcagccacctttatagacttgtccactctgttttgcgtctctttgctgtcccctgtcttccagcattgtcctctcatgttctagtgacagtcttcctcaagccttagtccttgaacttcccaccatcttctgcttctgtttcccaagattcgttgttcccgcttagctgtcacttctggcctcagccctcacctgcagctctgacttactcctaaattcaagccccacattcacaactgccttctgaacatgttgcctctgtgacctttggtcaccccaaacccaatagaaaacagagcctggaccagacggtctctggatttcttattggttctcagattcaattttaacaagtcagcacttaagattatctcactcctctcccgcttcttaacttccctgtctccttttaatgataccaccaacctgtcagccatataacatgtattatcttccatacacacacacacacacacacacacacacacacacacacccacagacgtacacatgtatacatgtacacgagacaaaaatggagtaaaaaggttgaattggtcaaaatacttgcctagagagagttcaaagcacatgtcttgataacagtgggatcttcttataaaaagtaaagcttttgttatgctagtgagcttataaatttttgcgtgtctgtgtaaaactacaaacgcatgtcctgctgggcattcttcctaccctttcttacccaggagcctctcgccacctgggaaagctgacagaacagtgggcttcaggtccagaaatgagccaactttcctacccctgctgctggtggtttatcagatacagggagaatcttagaaactctcttttgtttgcttaaaggcacagctataaatatatttcagcgtgactgagtgtgtcaagtttgagattctgatttgttgtatcagaatgttagagctgggagggaagcactggcaatcaggtttctctacttcctgattttattgaagagtgagctgaggcccagaaatatcaggtgatctgcccaaagtcacacagctcattaatgacaaaactacaactgaagccctggtcttctaaaccccagccaagagctctaacatttttaattctaatttttttttttttttgagatggaggtcttgctatgctgccaagtctggcctcgaactcctgggctcaagtgatcctcctgtctcagtctcctgagcagctgggattacaggcgtgagccaccacattcagctaacattctttttttctttttctttttctttttttttttttttttttttgagacagagtaaagctctgtcacccaggctggagtacagtggcatgatcttggctcactgcaacctctgccctgtgggttcaagtgattctcccgcctcagcctcccaagtagctgggattacaggcacgcaccaccacagccggctaatttttgtatttttagtagagatggggtttcaccatgttggccaggctggtctcgaactcctggcctcaagtgatccgcccacctctgcctctgccttccaaagtgctaggattacaggcatgagtcaccacgtctggccccagctaatgttcttttaaatatattgagtccctttctgccactcatctggaatgggttctcaagcccagtgaggaatcccaataaattctggttcttagtctattttaaaaacactaagtatacatacaatttgtaataaaattttaagttataaatataatggatgcacactgttacttcttaaaataagaccataacattatacaagctgctggtttctttgcttttctggtcactttctccacctctacctaatcaggtcccaacattgtgcaaagacttctcctcctctttgtccccttggcacacacactcacataagaatcagctaagagaatagtttgtcaggtacttttcctcttaaaacctaacatctgaggaacgtggattttaattattgatgatgtgtgtggagtttcagtgtcacgcattttcttctgagttacagaatcctctgggggatatttcacaatacctttgtgtgtagttgctatgaaggaattaacctgtaaacctctgggatgattgaattgtgggtcaactaaaatgcaatctagctaagacttctgcctacgatctcgcctgtgtgtttctttttgttggtttttagatacagtgctttctattccatatggctatttagtaagcagtctctttttgatagcttgtacctctgtgattcaatttctgttgtcttttttttctttaattgaatgatatagtaaatatgaacttgtgccatcattagaataatgtgcatatattcacatagaaggtggggcttatgaaccttgtattaaggatttagtgagaggaaataaggactttgccctctcagacctggcacagcagctgcagcagtttcatcataaggtctgtggtctgcacgcacaaaacagcgtgggctcaagtaaaatgcctctggacaggtgagaaggatggaagcctctatttctggcacctctctgaagatcaggatgctacaagatccacagagagacttatcagtattagccaggttgacctggcaagagcaaggggaattgtttatgttggctactcgttcccctaatggccattttaggatgaaaataaaccttagtaagtctgtttcagagcattttggataccccttggcatattgccaaacctatctgtaagttttctttgagtataattttaaagtaatatgtatcatcacacagaagccttttcagttctgatctaacttttctgatgccatgattatagctttactctgtctcatcaccaagcctaaattaatagtagctagtggtactttgctacccataaaatttgagctgtgttgtaagcacacagaaaatgagatgccaggaataagcaagaaagggagagcctcagcctggttacttctgatggaaggctgggcctgccatcctggcttgtggttgatttgggagcatataaggtggtgctggtccttcaccaggccagtcatgtagtttatccacggtctcctatctctctcctccccgaaccacagcgttggctgcttgctggtcaattcttctgagaaagaagcaaaacctccatgagaaaggtaacatatgctgatgattgatttagggatttgaggtctctgaggagctcagacacacaattgctttggtgaactccgaacttactcattgcacctcacagcaggagagagatgttttaaaaaaaaaagtcccttgcttttcagttcgaaagtcatgtttgagacatgactttcctgtgggtgcttgcaaaagtacatgtgtggagtgaatgtgtgttgatgagagccaagaaaaaatttatacatatgatagtggcttttgtcttgggcttatctttgtatggtttttatccttagtgagaaacatttttatagcaagaagaatgtgataaaatgccagttagagtgttttatggatctttagccctttgcttgtaggtgagttttttccttcaactacctggcaatttctttgaacacccgccgcacgtccaccaccaaccactactaccaccacatatggtcttagtcacctaagggtatgccgcagcctaaccattttctcccttgtctgtttaatcttttcttctttgtctttagccttgttatttccccagattactggccctttctggtccagagtggcattcttatcatttctgatagttcttcacagaggttcagagggtatagcaaatagatggctaacatgaaacttcttctcctttcttaactctacaattggttgcttattcatttgttaaatggacaggtacagaacattgactgtgtgcaaggtacacagctcccaccctcaagaggttgtgctcctggatatgcacaggaggatgggtagggtacagaaggaccatggtatactgcagagtgactttgaggaggctgagaggagtgagtacagtgtgtaccataagaatttaggatatagagtgataggatggataggtaagaagataggatggatagaattctaggtaagaggatcatcatgaacaaaggttgggaactgcccagagaatagctgttttcctggaaccatatagagtggagttcaagcttctgaacagagctggttcatcaggagtgtttgagtatgacaatagcaatattggagaaggccttcctcttctggttattcttagattcctagcacatgagtgctggaaggggcgtgtctaacccagtttccacgttattgagaggaacatgagtccctctaaggcttaaccttgacttggtcaaggttagaatgttggatgttttctctcccatgcaatatggtgttcatagtattgtgtttgtttgcacccactggcaaacttataaagaccaccaaggtctttataaggagtctttctctgagaagtcattatacaaaaaagaaacacgtttatagcagcacgattcgcaattgcaaaaatatagaaccagtccaaatgcccatcaatcaatgagtggataaagaaaatgtggtgtatacacacacacacacacacacacacacacagacacacacacacacacaccatggaatgctactaagccataaaaaggaatgaagtaatggcatttgcagcaacctggatggaattggagaccattattctaagtgaagtaactcagaaatggaaaaccaaacatcgtatgttctcactcataagtgggagctaatctgtgagaatgcaaaaagcataggaatgatacaatgcactttggggactggggagaaaggatgggagcaggatgagtgataaaagactacacattgggtacagtgtacactgctcaggtgatgagtgcaccaaaatctcagaaatcaccgctaaagaatttattcatctaaccaaacaccacttgttccccaaaaacctattgaaattaaaaagtctttttctgaaaatggagtatttgtgtaatttacattttatgaccattttaacaaactggtataggttttgcacttacatgaggagagggttcatatacaaagcaatgattgcattaggataaattatgttatgaaagaaaaggcattaaaatgatcttggtactgtttgccttaaaatcaggatttgtgttaactttgacatactgcatgtaagatttgtttctggtagtaactgaacttcatgaaatcactggtcacagaaatgtaagttatcagactctcatacttgattagcagtatacattttcattaaagcaatcacattccaataaggaccagcaatagcagttcacggaatgcagctgctcagtttgtatttgaagtgttcgtgtatctttgggagcaataccatgaagtcacaagtttccgaatgaggcatatattcagcctaaacaccgactagcttaactgaatttttgcttttgttcaatacatttacattgtgatgtttacagcttaggctgataatgctacagtggaaagtatgggggaaatttctctttggtcccattttaaatcacctcgcagtatttaccagatgtagaagttgtgtacgtatgtggtatctgataagctctgttttataaaatacaggttctaagacccagagaaatgaaaaaaatatattttttttctcaatggaatagtaagcatttactctgtgcctggcactgtgctaggcattagtaaaagatggcacaggcactgtccttttctacatagtgtccattgcatttttacccctaatgacttgacagttgattcttaaaatttgattttagcaggtaaaaggcattttatgtttccgtgttggggagtatggcagaagaggctgctcaaggaaagtacttttttaaacaaccaccgggtgtcagcagaggacttagaactcttggcaacatctgtgttcttggttttcttggatttaatttgctaggccatctccattggaatttttgaaaggcagtcaacctccacggggccactttctcccaaatattagtgtcaaacactttcaccgcaacactgcatcacgattgtttatctttgcctaataaaactagcactagttcctcaatctttttctgatttaaaacctttaattctgtctttcatggtgaaggttctacaaagtagacaggctgccagggtggggaagtgtcaccaaactctagttgtttttactgacctctccccccatacaggtaaagctcacacttaccttatgcagtgaaaagtacagggaccattcttcgtcctgcacacacacacaaaaatctgataatggagcttgatggttccaaattacagaaagtattttcagagtataaaggagagaggtctaagcatcttcactggcccagccatttggttcatggtatagcatatatttggtggtggtcacagatattaggaactgtgtattgattgacaagggaaaccttggcaaggtgggtatggatttgtatcatgccaattctctccagttttctcaccttgactcctcacttgagtgagcaaactagacagggatccaaggcatttggtatgagacattaggctctagggtggggccaaactggagatggtctttcttggacacccaggtttctttcaagcttcatgcggtatcagaagtggtagcagttacaaggctgtcagtttgagttgctaagctattggtgacctgaaagaccagcttgggagatggttagagacataaagcaaccccagtggctttagcagctaaagctgccagggcgtgtggcctgcagggggtggggtgttaggcatagtatgcaccctggaatctatcccataaagtaaaggcctgattgatgcagggttctagtttagacatgctatagggatttcctttggactgatcagtgggatttggcaaatcgcattacagctaattccaggaactatgcagattcttctgttgttttatattgaataaaatattaagacaacacatcaatagggattcaaaaatatttggaatattttgtttttgtggaaatttctgcaataatagtcaaagggaatcactgtgttcctgaaaacattgtgcaggatgtccataaaatatactgtgtacacacatgccatcaaagagggcagctgtcattcttcatggggttatacccagcttggtgtcaggcagcagctgggggaaggctctcagacctgtcgtatgatgtgctttgtaaactgctttttaaaaaagaagttctttattgttggcttgacttctaattaacacaataattgcatatgggattgtgtaaggggcacgtttattggggaaaataaatgaagtgtctttatgatgattttagttaacactctctgacatttctcgttgctcagggaatcctacagcaagtaccgtcttattcacggaaacttgagtcttcaaatttggccacattgctctgtgctgattctcacctctcttggcaatagcttcacactctcctctccctctttcagatcactggggtgatcctgctggctgttggagtctggggcaaacttactctgggcacctatatctcccttattgccgagaactccacaaatgctccctatgtgctcatcggaactggcaccactattgttgtctttggcctgtttggatgctttgctacatgtcgtggtagcccatggatgctgaaactggtgagtatgtcacaacataatactgctttctcaactatatttttgtaaaaatataaattacatggaggtgaagtggttcgtcttgaggtcacagacaagaccttaacaatttcagtccagactctttcctaatccatcctttaatcccctagaggtaaaaacaaccccaaacacagcctggcacactaaatctagtcccagtccctctgggtagatgatgacaaagcagtggccagtgattgcagtagtccatttgtatcctcatgacaagatgccctgtttcttttcttttttttttttttcttttgagatggagtctcgctctgttgcccaggctggagttcaatggcgcaatctctgctcactgcaagctccaccccctgggttcatgccattctcctgcctcagcctcccaagtagctgggactacaggcgcccgccaccacgcccagctaattttttttgtatttttagtagagacggggtttcaccatgttggccaggatggtcttgatctcctgacctcgtgatccacctgcctcggcctcccaaagtgctgggattacaggcttgagccatcgtgcccggcctcgccctgtttcaattttgaactatatcttagaagtctccttaagcatgtgatatgcagctttggtggcaaggcagcatcctgaacataagcagactttcacctccaagttcctattggagaaatactttccacctccttgagcctggccatgcatggatgcatgtgtgtggtcttctctgaacctgtactccctgtctcagtgctatgagagttgagctaagccagagcctgccacccagaggacttatgcagtgtcaagtgttggctaccaggaccagtgcagggtgcatactctcatgggacagataaagcagtgatgcttcccagatgataagggcagactattgaaaggctattactgtgatttttaacttttaggtacagcagttaactaattctctattcactgttcatgttcttcactgatggggattaatggtaaaggattttatagataaaaattagcaaggacctgtcctcaaaataaaattttgtttaaaaatatttatttcaggcatcttactccgtgaagggagaagcaaagattccatcagggccatgttgcctgtccctgtgtagccctaggttgtagtaacatttaataccatctagtgatatatgtgggtgtgagagtggttcattccaaaggaaccatcttcccaactggcactgggcagtcagtctctgttgtcaacctcatagaagtggtgcttgactttgccattttctatcctgcagaccatacaggaggctgatgcctcagccgccactgattcttcaggttgatgggcaagccataatgaggcccatcctgattatgggccaggcttctgctgctgtcacctggcactctattctaacaccctgagtctaccttctagtacttctcataaacactagggtttcttttggtctagtgccatagtcctcaactccagatacatgattaaatcacctgggaagccatttgcaaaaacctttgccagcatcccaccactagctggttgaagtagactcctcagtggtggtgaggccctggcatcttattttctaaaaagctctccagaggattcaatcttgtagccagtattgagaaccttttgtttagcacaatgagtagcaaggggagaattaacttcaaaagcagagaaaagaaaaaattctaaaaaaccatccattcaaacaagaagggaagtgatgtggtgttgagacctgactgattccaactaactgtttaaagtctttagcggcaaggatgtaacctccttggacctttgtctccaattgtaacaaaatagaattggactaaatcaccaaagtttctcccggcccaaatactatgactggagaggggtgggagaggtgatatttttatgttctaattctcaatttgcttgtggggcagaagtatcccatagctgagtataatgtcataaaataggatatgtgtataaacaatggaatagttagttctggcctcttctggaggtggcttcacaccacactaccattttcttctcctaacacaagttcactggcaggtgagcattttgggaagtagagaagttttttggtttggggcttaatttgggtctttaaaaatgtcttttagatcaaattttagattctacatatgtgtaagatcaggcagttattagtcttttctttccctgacttatttcacttaatcctctagattcattcatgttgtcgcaagtgacaggatttcattcttgtttatggccaaatagtattccattgtgtatagacacattgtgtccagtgtgtatggacacttaggttggctattgtcaatagtgctgcaatatacatgggggcgtggctatctcctcaacatattgatttcattttctttgggtatataccccgcagtaggattgctggatcatatggtagttctacttttaattttttgaggaacctctactctgttatccatagtggttgtactaatttacattccaatcagcagtgtataagagttctcccttttccacatcctcatcagcatttatttttttttttgtctagagacaggggaggagggagaagcagaggttggccaatgggtacaaagtcacagctagataggaggaattatctggtgttttattgcatagtagggtaactatagttaatgtattacatatttagcaatagctagaagagaggatttagaatgttcccaccacaaagaaatattttaggtaatggatatgctaactactctgatttgatcattacacagagtatgcatgtatcaaaacatcatactgtaccccataaatatgtacaattattatatgttagttaaaaacaataaaatttttaaaatatgatttggtccttttatgtgatagaggctatactgggtgcgtatgatattttatttttctcctcactaccaccatgcagtgtaggttatattttcatataatgtgataggaacttgggggtttagataacccacccaaattcacacagctaatgtatggaaggctgggatttgaacccttgtatgtttccttccaaagctaggactatttcaactccaatgtttacatttgggaaaaaagctctaacccctactgacctgtatttagtacaagctcgtcccaataggcttttggcaaatgctttctgtaggtaaaacggccactctctgaaagctcctagaggcaggaaacttgccagacacagaaaactgctgattcggctgatgagagcggaagtcacttgattaactgtcagtctagaattttgcagtccttatataacctcattaattgcaaaacaactgaaaataactatgtctactttatggaagcccagagaggctgcctcctttctaagaggtagttcataacaagataggattcaaacctaggaggacttctgactacagagataaatgccctttcttccacctgcctgctaacagttattttcccacccaactttctggaagagtctaggcttatcccatcagcaaaatgggagagtctcacatcaaactctgctttgaattgcattttgtatgaagttgggaaagaagtcatgtacatggggcattctcataactacatgtttagtatttgagtggctgtgctttctagagaattttgttaatatttagaaagaaattaatattttaagccaacatttcctttttcgatatatgtgccactagatgagaaaaaaaaattatgactcagcatacatatgtatactttatgagacatgtgtatactttacaggtaagtaatgtggccacatgcaatctatccaaattccacagcattgtttagggccattgcaaatgttcaaaaccattatatttcattttgaaataagaagcagattgtaagacatgtgccttgtaggtaaggaatcaattcttgtttttatctgcctttcaaagttatccttaatgtttcgtaaataccatgtactacccttgaatttaggcgtgcttgcatgtgcatgcacatgcaaaaaacttgagaagtatcagcagcatgagatgaaaagcactaaaggcgttagatgcttgcaaatgtcattagtagtatagtgcatttactttttgaaaggctttaaactccacgcagcatcccgaacaagaaaggcaggcaactccacaggaaagctgcagtggctactgtgtccagtgatgaccaccaatctgaagaggaacatcatcttgcacacgtttggcttcttgggcccagatgggagggatacaattccaaatgaagcagttttgtaactgtttcatctgagatgtggttgagactactggaggcgtttgcctaggcagcaggttctcatcctggccgtgttcacaaacatgatgggctagcgttagagaaaagacattgggctggttcttatttcttctgaaagcagcaccaatgccagtgagtggaagttagaagtaggcagacttgtggccaaagggaaaggaagtctttccaacaattggaacagtttcaaaatggaatgggccgcagggaattggcttgcagaccgtcgtgaggaagttggtaaaaaaggacccccagacagggcagaatgtgtcctgtgaccttcagagcagtttggtttttttctagctcaaagattctagtgtaacaaatagtggataccttagttgtgaaagttccttccagatttctccaggtgagccaagctgataggcacaatgccagtctctcagtgaattctccccagcctgtgtactccaaaatgcatatgcatattaaacacacattcctagattgaggcttatgtgggtaaatttagagacgaatgttttatatttttttctaaactttgtctagggagtgtgaggacttgtctaattcccgctgattgaaagtaacctaccctgaagaagccctcttcttaatcctgatgtatctgactttgtctttgtgtgcttaattttcagtatgccatgtttctgtccctggtgttcctggctgagctcgtagctggcatttcagggtttgtgtttcgtcatgaggtgagtatacacaaaatgcagaactcagttaaggggtgtttgggaggaggattcttgaaacctcttgaaatgtgtaaagggtgcatataggctagctgttttcctcagtggtgttgttgttttccaaagatcatgtcatatgacctgaaattttcatgaaattctaaatgtgggaattccaccaagcttgaaaccttcattgttgatcttcactgtttctctgtgtagccattgcataaaatgattctctcccgttataaagcagtgaccttcaatatggatttcatactccttaaaaatagctgcttcaggctgggcatggtggctcatatctgcaataccagagctttgcaaggcctggggcaggaggatctcttgaggccagaagttcaagagcagcctgggcaacatagtgagaaccccatctctaaaaaataaaaaaaataaattagctgggtgtggtggcttgcttctatagtcccagctacttaggaggctgaggagggaggatcacttgagcttgggaggtcgaggctgcagtgagctaatatcacactgctgtactccagcctgggcaagagagtgagatcctgtctctattttttgtttttaaaaatagctgcttcagtaaggcacaagtgtatatctgtataacaagatttctaagactataaaggcaagccaaactaattgtcttgctgcctcaaaattttatcattgactctccataaataatagtaaagccagaagtagatacacatgtgttaaaaagaaaaagaaaaaaaatatatacaggtggaaaacagagagtgttactgtgggtctcgaaaggctggcatcatctgttcccaggccctgtttttttttttaatttttttaaaaaatttttcattaacccatcttgctgcacacttaaagatcccactattgtgcttggccaagttcagttccccctgagcttgactgtatgctctctgctcccctactgccttgtttttcccctttaccaaagacagtatcccagatgccaaagctgattcccagaacccagtttgtatgggtgctgcatttggaattagaaccccattcatagtctctagtgaagtgagacctgatgaagtttcagcctcaacagccctaataagtgcccctcgtgcatgtatgaacaccaggagcagcctggcttgttcctacctgagcctcttgtttgttgctgggagtgcgctctgtggagaggtttttctcttaatggtgcttgctgcctagggcctggaaatcctcatgtacctaatctcttttggctgaaaccctgagggctgttgtgggaggaaggtacaatgccactctgaccaccagcgctggtcttgagtttggctagtcaaactcacatgatgacaataggtctcatttagtgccatttaacaaaagcagaaagatataacaaaggaagcacagtttgcctgctaggcagtagtgggcttgtttctccaccatgagtcctcaaaatagtctagtgcctattctgtgtacagtcccccatcctaagagacagcttaagtgtagcgaaatgagatgacacagctgggtgtggtagccaccttagcttagaagctgcatgtaactggtatctctatctcttgtaactgtcccatggacatagtttacagcattttagcaaagaatatgcctagttaggagagtcaccatacttagccctaagcttcccaccaagtagttattgtcatttgctgtcctcccaatctggaggcattttaccaattgggggtcagttttatcaataaactcagtggcctggtaacacatttgacattccaccttcatcaggtttccagggaaacagagcttgaaagttaccccaaagtcaaatgtggtaacagaaaaggttttgttaactttttttttttttttttttttgagacagagccttgctctgttgccaaggctggagtgctgtggcacaatctctgcttactgcaacctctgcctcctgggttcaagcgattctcttgactcagccacccaagtagctgggattactggcgcctgccaccatgcctgactaattttttttttgtatttttagtagagactgggttttgccatcttggccaggctggtcttgaactcctgacctcaagttatctgcccatgtcggcctcccaaagcactgggattacaggcatgagccactgcacctagccaacctttttaagttcttgtcctttattatcttttttttttaatttgcctcaataaagacaggtaagtgaaagttggttttgcctcactcctatggtaaaacagggatcagtttttgaccaaaacatcagtcatcctgtccacccaagtggtttgtcttttatgagcctcctgtgtaagggcagagaaagttatagaaagatgggtattaatcaattcaaagaaaataagtagaaagctcatgcctgaggtttggcagctcaccatcacaggcctttcagaaatggacaggcccctccagtaggtcattcagcaggtcaggctttctctggattgaggctgaggggaacaattttttaaattccggagcttaaaaaccccctggtgaattttctgagcttttccatctcagaaaatggggcattgcctccctggcctacatttatacagagactttcagaagaggctatgttagggtagaatttggtaagaattggagtcagtttgggctgtggtggactgcaatcacatccctccttgtcttccatagatcaaggacaccttcctgaggacttacacggacgctatgcagacttacaatggcaatgatgagaggagccgggcagtggaccatgtgcagcgcagcgtaagttccagaggagatgagggtgtgaactaactatgaagtctaggcttagacttatggactgcctgtaggttggcccagtagttgctatttgttcccgttcttcaactcttagtccagttccattgccaagagttgacacccagtccttgtccaggctccagttattcaggtaattaatgtcaaggaggaccactcccttgagtgtgccttgtatcagtaagggttgcaagtatggcaaggacagctcatttgctcttcagatctgaacccttgtgaaggagttaggcagtgagtgtgtgacaaccttgcttagagttggctcccggaggctggctttctggaatcgatgtcttcaggctgggtggagagctcaggcgagctgcattcactggctggggcagtggagtgggcatagagtggacctagaagaaactgaggctctgttaggtatgtgaaggtggtgagctgcctgatgctttgcggaggatatgggggaaatagaagagagatttcctgtctgggtggcaagtgctggcactcaagcataactgcccatcaggaatcactaagggggattttgctttggtttttcttggttttgtttacttcagaagaagtcttttttctaatttattttgataaaagttccaacatatacagaaaagtctcaggaatactacaaggaactgtatactcagatttaccaattaattatatttttgccccgtttgctttaatattctctacattggggttggcaaacttcttctgtaaaggatcaaatagtaaatattttaggctttgagggccataaactctgtcacaactactcatctctgccactgtagcacaaaagcagccacagacagtatgtgaacacatagttgtggctgtgtcccagtaaaactttatttacaaaaacaggtagctcctgggctatagattaccagctttggctctccctttctgtatgtgcatctttttttcttaagaactatttatttacttattagtagatatcccaggggagagttttttgaaaccatatttgcctcaactcaccaatcaatagtcctgatttagtggatgagtacatctatatcaataggtgattgtgagttggacacagacgcactgctttgctttgtggaggtaataagaaagccaatgtgatatataatttagaacttccttcttggagatcaaacaagcatcaatatgggtataattgttattggagcttccattcatcttgactcaccaaagctgcacatgttgtcttagggcttttgcctgtgtttctcttataaaagtcacaaggcagtgattgaggagaccacatttgatctgccatttttttattcttttcctttccctgttaatagctgagctgctgtggtgtgcagaactacaccaactggagcaccagcccctacttcctggagcatggcatcccccccagctgctgcatgaacgaaactgattgtaatccccaggatctacacaatctgactgtggccgccaccaaagttaaccagaaggtacccgctttctcctggcccagatgggaccagtggtgaatgtttgggggggcttttttatttccatgaaattatgacaaatagatttgaaatagtagtcaagggaaagagaatcttactttgtggttccttgattgcctgggagaggcacttgaggctgctcacttctaaaagagaaagctgtgactcagatcagccttgtctttctctcccacagcaaggatctaccaggcatagttaggaaggtttagcaagcagttcctgttaaccctgatgcttatgtcagacagcgagtgttggctttcttcttttggggtgtccgtcttctgcttaatataccatctaaacatgaaattgtttgcagctgggtgtcagtttttgacagcaagaggggagtagagttgacagacagcatctgcttctgctaggagggtggcctttattttagggagtttactgccataggaaaagaaatcagcaactctgattcaactcactgtcaacctcccgactcccaaagaaattagagaggggaaaaaagaggactaaacgaaatttaaaagttagtacatagtgaaaatgagggaaatgaagttttagtagtcagagaagaggaaaatcaattctgcattccattttacagagaatacgatgaagacatgatataactgcatgtgaagattatctacatcttaaatgtttagagaaataccatatataacatatattttggtaaacaaaagggaggaaaaaacctactattgtgtttacttcctgttattcagtcaaggggtaaatcttttcttgctaaggtaaaattctgttcatatgatgccttcaaaattctatgtgatctggaccagctactgaataattcagagaaaaaaagatagttcagtaagattcagtactgactgcttcttgtctaagttaaaaggacatctgtttctatttgaattttcttatgaacccaaacattgaggcttccttcatctcttattagttaataaggtaacttctggcttcctcatggacatccccactgagtacccatacgtgtcattatgcttccattttatgaagtgctaagcatacctggcatgtggtagatactccaatttatggaaggcaagaagtactctatggcagtgagatatttgatataacagagcttcagaaggttgttcatgaaagcagtacccaagtcttttttttccccccactcaagcttcctcttcttttgtgaaaattgaggatccagaagtcaggagcacagggtctagtgtcaggctccagtagaaattctgactgagccacttgttggttatgtgatctcggtcaagttacttaactttgtcagtcttgcttttcttgtctgtaaaatgcggataataatagtacatgttccttgtgcttgatttgaagatttaatgagataaagtgtcaaaagcacagtgcctggcacagattatgacacagatgtgatacatgttaactgtaatacaaatgatgatggtgaaatttgtcttctgtatcacatggagtcttttattaaaaatgatgcagcagtttcttatagggaggatcttttgttagtatgtaaaaacaagtttggagacgtatcttatagtgcatctataatccttacaattatttccagaaagagagatggggtcacattttttcatttcattgataaacctacacattgacctcactttccaccttcccactataatccaactttatattttcctggccacctcaaatacttagaagatctgcttaacttctctcttacttaccttatagcctccaacctggctccctcagaggagaaaaagtgaatgaaaactaaaatttgtctagcaagtttccttagacattcttatttaatgcccacctgaacttatgagacaaattacttttcctgactcaatgtcagacacctaatctatacaaggtggaagattggaatggggtaatagtagatgctcataaatgttacccttcctcccagtgactccttcccctaggaagcttaactactgccacattctagttatatggaatcctatgatttagaacaagtggatcatccctgtagatcctgtggtgtcttggaccctgtacttactctgatagcacagaaagatgattcttggctcttaccaggaagcttgagaaacctgtcttgtacagataactgggagagaacaggaggaaaatatgaacagttaaataggatatttattgtttggatttggggacaggttttattttgattttactagcaggatgatgaaatgtctgcacgttcagttggctaatagcattggctgaaatcctacttcatagggattctttgacagttcgtaagggcaagaggaacatagttactttgcttggcagttacagagatacctcttcccataacctgtctggaactagctttctacttctagtagttaaagtcggtcacttgcagatgttttccattggtgactattgatttagacgtgctgagagagtgagcaaatgaactgttctgagtgtttcctaggatacttagcaggtctgtgtagatttatctcacacctgacaaccgactttcatattaggaaattgagagagattgttgtgagtagataagatcatagtttaggggaaaatttaaggttgaatgtaaacatggcctgtggttgcagtattaaatcagctcttgcagtatgtggatctgtgctgagacatggaaaatgaacttcggggttcatgcagtaaataacggaaaaatccagagatggaaaacatttattttgacattggtctcttattgtttaaaaacaaaaaaactaagtcacttatatcttctcattttaattaatcctattactgatatgattcattaacttgctttcttatttggagtaaaaaataatgagaaaacatttcttatagaagagtgcttctcaccttttaatgggcatatgaagtgtcgggagatctggttaaaattcattaaaaatatgtcaaaagcaataacccatggatttggcagattctgattcagtaggtctggggtggagcctccaattctgcatttctaacaagctcctaggtgaagaaatactgctcattcaagatccatacattgaggaacaaggtttagagagaactatttcggctcagttgtactaatgccaggcagctatttcctttttctggtttctcctactggttggagtggccttaccaaaaataatgtgaccaagtctaaaatcttctagaatgaagtagaaatcatactttagaaaatatattcagcttaagtgtagaattgaagtgcccagaaaaaaatctatgccaaactgttttgcagaataagaaaatagctcattctgcttctctctcagttgtattatcaggcttgtgtttccaaattttgagcttacataacactggtgctgatctggacctcattctttagccccatcatcactgcagggagaagatatagtaatgatggccagcctggtaaactgctgtcttagctgctaccttttgggaaagtgttagaatatccacatctcttctcattttgtcttctttctaacacaaattcttctctcttctactaccttttgaaaaatagtgtgaggctgggcacggtggctcatgcctgtaatcccagcactttgggaagccgaagtgggtggatcacctgaggtcaggagtttgagactaacctggccaacatggtgaaaccccatctgtactaaaaatacaaaaattagccaggcatggtggcacacacctgtaatcccagctacagcctgagtgacagagtaagactctgtctcaaaaaaaaaagagaaaagaaaagaaaaaatgaaaaaaaaatgtgtgatatatagtctcactagtaaaagtgaaatcagtaagcttctactatggggaatcaaatttcaaaactccccatgagtgataatgtatttcctttcccactcctaccctggccttcaaatttgcatcagataactaaggagtatagtttgtcaattgcattgaaaacatgtgtcacacaaagggaccaacacacactggggcctataggagggtagagggtgggaggaggaagaagatcaggaaaaacaactatgggtactagccttaatacttgggtgacaaagttatctgtacaacaaaccccgacgacacaagtttacctatataacaaacttgcacatgtacccctgaacttaaaaaacgaaagaaaacatgtctcaaagcactactggtaagttaatgcaccatttttttttcctgcacacagactacaaatgtatatagataccacttaatagaagacacagcattgccagaatattttacaagctataagaaatgttaaattgttaaatttgaacttaaaaagggaaaacatggctggtttttttttttcttcaaatgttattaaaacttagtgtgccattcttggtaaacaagaaccagctttaatctgtttattaaattaatgtctttatttttcgcagactttatacattttagttgaagcccttttccagaaaactggaaaaagaccatgtcttcctagctgaataagtcagttcaggactctaggttgatttggccagtttcaaataaatatacttacaaattctctctctctctctctctctctctctctctctctctctctctctggaaaagatgaccctagaacataggttttccctatttaaaaaatcctaatggtctcattaggaagaaccctaaaactccataaagttggcagatattcaaacacttccctctagccagatgatttcggtttgtttattcaagatttcatcattcattgtcaaaatgctagtaactatgtttatgatcctgagatttcctgttcaaggatgcggaatgtcttttcaagtctacttctttgtctctatagtgtttgcttcatagatcttacagatttcttgctaaacttaatcctactacagaaacatttgtcaatgaaattgtgtctgggattggctttaaataggatgggatttggggaggttccaatgaagcaagattgaccaaatgttaatttgtgatgttaggggaagggtcatgtgtctctgtatttttgtgtatgtttgaaaccttttcttattgttttaagtttgaaaagaatgctaataaatccctagagtgagttgcaattgtatttgctgaattaaggttgaagtgtatgttgggagtgtttcgagtacacatagcccagcttggcctgagtgaaaacatgtctccaagacagtgtctttctctttccagggttgttatgatctggtaactagtttcatggagactaacatgggaatcatcgctggagtggcgtttggaatcgcattctcccaggtagcctacataattgtgcagaacctggtctaacctttcctctgcctccctccctggcctccagattctctgcctgccttcctgtgctttgggaaaagctgatagatggggtcaaagctccttgctcattagtcctcaggtgatctgtttattgatttttctttttcaactcaaatgaagttttgtcatcaagggaatatcagttacagttaaactaatgactagctccagaaaaacaactggctacttctgtaggtcaaatggaggttaactgaagaacgtgctggcataattggatcataaacaactcaaaacatcaaatggctgatctggatttgggggaagcttttttcctgattgacctaacccttttttgctctctcttagttcctatgtattacagatgagatctctccctttaaagaaagcctaaatttagcaaacttcaacttgtgatcattattttaatttctaagtttggctattcgtaacaggtttgactattcttatgtggtttcttaagaggaaatcaaattttgtgtattaaattttatatccctttatctgtacctaccctcaaaaaaaacaatgggagaagtactatgccaattaagtaaaccacacacactggaggatagaataagattaagctaaatctaaaatgtagcccacgtccaccaggcagggcatggttccacaggcttctgatctctcagacaaatgatacatccttgctataatgttgctttgggtagaagaatcaacatgtatagttaacaagcaagagcaaactttgtttatgtttaactcagactttgttcagaccaacagatcatgtttcaaacaaagctcgattaatgttgtctgagtaatgtctccacagctctcattttttattatttttttatttctttttatttaggacctggtgtctacaacaaaccacaactctaatttctacataggctatctcagactctaattactttttccctagccatctgtatctctggccctcctgcttagcaatgcagatgcactttaattttattccagtttgttcctaaaactttctaattgaaatgtggaatatacagaaaggtgcataaattatgtttacagcttaataagttaccacaaaatgaacatagctgtgtaaccctcgctaagattaaggaatagaactttagcctgatggtttgttttttactagacagccttagagaagtagaagagcttttcttcttaagcagttacaaaacctgtgagacattttatctcacaagagaacgtgggctcagccaacacaaatatgtttcttgttgcaatttcaaaactatcttttaccatgctttgttattttttgtttttgttttgcagctcatgaagtgaattaaaccctcaaccctccaacacatagacaaaccagagtggggtcacaaacaatgcaaattaactcagtctccagagacatttgaaaagtcattgctactctgaaatttcttctagttgctataatatttcaataataatactcagcaacatcactctaatgactgagggacattttagaggatccccaaaccctggtgactgatgcaaatgtgcaagatgcacttgacagccttgaacatcctgtttacttaacatatgtatgtgtagcatcatattgttaacatcaaaagggcgtcttgtgtttggcatttgaggagacctgtcccattggaggaaaaaaaaatattgctgaagtctcccctaatagctatcctagaaccataaagggagattatgctgatactgtacattaggagaagagagcctcaaagaacctggaatctcatgaatgaaacaccttatcatccaagaatattcccatgtggccatgagcatgagtgtgtgtgtggtattaagaggatcctattttcattaatgagatgaatcaaatcaaatggatccttctccaagtaatgaacctgattaatacctctcttccactcttctctcacacatcccaatgaagaaatgtatgattagacaaataattatctggcctgattaatctctctgtgctaccttaaagaaatctgtgatttgtgaattgttgaatatgcactgtgaccctctaggccagtaagagagcggctttggccttaaggaaccccaactctgaaactctctgcagtgagtttaagtctcatcaaggtgccacatagttgttggggtgataaaacacaaagcccagtggcatcataccatggtgcccatactgctcacccatgtggccaggcaggtccagcagggcagagacttgagacctgctcccaggttcaggcaggaagagaaatggctatggctggcttctgccagccagatgcaccaggaactgcagctatttatggtgctgtcagcctcaggggtcctgaaagctgaagttggcttccagacgtccatagatccagggcatccctgggacaatggtggccacttaccagatgcctgttcacaaagaaccagccctactgattctggtcagtgacctggaaccagacctttggctacatgtgttcagaaattttagagccaatgtcatagtaaaatttagcaaatgttggctgatattgatgaaccagttgtgttggcctatgccttagccttcctataataaagaaggctctactaagttagaggccacagagaggacaaagtaggtaggaaagaacagagctcgctctctctcttcctccctcccacttttgctctcctgccctcgacctttttcttgccctttgctttgcttgctcttgtgacctccgtgctatcatcttttggaagaaactggccatgcacatctattgtctcaaagattaaaggtggtataaagtattaggaaaactaagctgggtctagccttttaatagactgggcaagaactttgtcccctgttagctaacttagctaattgaaagctcctgagtgctgtttttgaacagcagcagggttgtgtcaagcattaaacacttctctctacaaacgtccattacctttgccctctcaaggtaaacctcatttgtctggacttgatgggcagggtctgctgccctataaatttatagcagaaggttgagtgtgtttagtagggtacctcttcgctgcatctttggcaactgctctttcactcgagggcttgtggggagagtgagagatggagcatgcacgcacatcacccctgtcctatccccacccccaaaatggcctggaagacaagagccatgggatgtctgggcatggacatgtttattgttcaatttgtgacattgtgtatatgtacatatgcatgtgtgtctgtggtggggtggtggggtgtcctctgggcttctgtatttagtacttctgtgtctaaatagacccagggctttgctagacttggaacctgttaggctggattaattccccatatcacgtaatattatagtcctgagtaaagacagtagagctgttttccagaaggggagggttgagtgactcgcttgaagttgggcagctactatagatccaggattataattctgacctcttcacctggcttgctgtattaacttttaaggccagagatcacccttgttcctgccactgatagcacctgaagggaattcattttgtgcttttataacaaaaagacttcagtctgtgaaattcaaaaggaaaaggtactcataagaaaacacagaccctattactacccatccattttctaaccctcaccctcctgtctggcctcctccagggtctaaatgctgctaaggtgattcattatgtgctggtcattcttttcttttggggggcccttgagaagacctgtttaccttttctatgtagagggcaggacagagctggggctattcttagataggacaagagggtacaaccttaagctctgagaattacctgtgtagcttggggtgtattctttaacctctcataaccctcagttttcttatctggaaaactgagattgtaatattgtacaggttgtggtaaatattcagtacaggctaggtacagtggctcatgcctgtaatcccagcactttgggaggctgaggcaggcacatcacttgagcccaggagttcaagaccagcccggtcaacatggcaaaaccccatctctactaaaaatacaaaaattagctgaatgtggtggcgcacaaatgtaatcccagctactcaggaggctgaggcaggagaatcacttcaacctggaaggtggaggttgtagtgagccgagattgcaccactgcactccagcctggatattcaatatagtcatcactccgtatctgcaggttctgtatccatggattcaaccaactatggattgaaaataacagtacaacaaaaaataatgcaaataaaagcaatatagtatagcaactatttacacagcatttacattgtattaggtattatgagtaatcttgagatgacttaaaatataaaggaggatgtgcatgggttatatgcaaatattacaccattttgtatcaaggacttgagcatcctaggattttgctatccttgggaagtcctggaaccaatctccaacagatactaagggatgactgtaatctgttctacctgaatgtgttatatacctctgacacttatttgatttttgacattatcaagtgtgttctggtgtttgttggttctggaaaatggaagttctaataaaaaagacaagctataaggttcaaggtcgttacactcatattttagtttctcatttggcagaatattctaaaggttacagccatggtatcttcagccacttggcagtaagtgcatgcgactatgtattttatggcaccaaatgatgttggccagagccttggtaggagatagaacgagtccaataagatgatgatgcctccttacctgaaagcggttatagtttgcatatttcacagcacaattttaatttgaaaaaggaagataagagatgagaactggaacctgcatggataggttaagagccaggagaatggagttcaggtgttgccctgaccaacagtgggacctgaagtggcagcaggtgtttcacctataagataagggtgactaggtggactggatgagcagttccctgccctggaagacttgttaaaacaccagttactgggccccaccccccagcatatctgattcagcaggtctggggcgagatctgagaatgtgcatttctaaaaagatcccaggcgatcgtgatgctcttggtcctggggtcacacttctagtgaaacagtttattcccacctctgatccagtaaaacatgcccagttatctaaggaggagggactacattggccaagagaaagcagcctgtagactcaagtgcacaattgggctcctctctaaagaatgctgatcctccagattcatgaatggaaattttcttttctaatgaacagaacaagatgtgcttaagggtgtcttgagagtatcacagtcatctttattagattcacttgtgccacagtttagatcaaggcacaaagacaagtggaggactagaatcttctgaggaggtggaggtactacatcactggtggtcctgaggcccctaaaaaaactgggaggtgggccctgggtgtagatgagcccacttaggcctaagatatctacatggccgagagacagaatataaagccccactttcccctagcccctcctaccttttcataagccttggctttcttacctcactggtgaatgtgcctgatcaagaatagtgtctctattcttgcctcaaggaaagaactattattttgtcagctgggtatggctgagacatcatagtatgctgagaaatcttccaaatgcatgtgctatagatgtgaattaaattttagccttctagttaatatatcactaaattctgtgttccttaatttttttattactctcataacatgaacaaattttaatactccttaagtgtcaaaagttgttcttaaatggccagagtgagctacagctgcaacatgatggccagtttgagaacttccagttggctctgcagttagactcccaacagctgagatcccatggttgaaatctggttttatcttttgctctagtgccctttccccatttacatacagaaacacttggttgttaaaaaattatgtctagtgatacgcatatgtcaaaaatcacataccccataaatatataaaattattaattaaatattaaaagggtgtggttcggtgacttgagattctcattttcgtttttctccctggcaacagttaattggcatgctgctggcctgctgtctgtcccggttcatcacggccaatcagtatgagatggtgtaaggagaaggtaggtgacagtggggagtgtttaattttgaggggtcccctttgggacacttactacccttcaaatgtgcaggagtactccctggccattgagctacctgatcttggtggcacttgtccatgttcagaaatctcatttctgtggttctgggaaggaagtataattggttcttttgtggaaaatgtggaaatgcttttttcagcttgttatctttcaagtccttattactggtgaatcactcacatgttctcatttctctcttagtctttcaagaatgacggaataagagacctgttttaaaaaggaactgcagcaatctttgaaagacttccaaagaatgttagagcacagtacataatacacttgccctgctccctctcccccttaccccacaacgtgcaactgacactcccacccagtctctgctccacctttcagcccacgtcacgtgtagtgtccattttgtgaagccctgttgtgccacagagtgtagccaggtccccctgcagctagtcctagtgaacctcaccccgaggccctgcatgggccagcccctccatctgtacttggtccaactgcaactcatcatcggtgactggttatcacaccatcgctggcccctttgggccctgcatgtagtgtgggaggctcctgttagctcctcactgtggtaaatgccacacacctttaagtagataagcagacgatagttatctgttcttttgacttaatctcatttggtttgattttccctctactaaggctttcctaccttcttcaggctgcctaagacatgtaacgaaacacttcaataattgtccatgaggagaaaaaaagcatgtgtcatgcatgaaggaaactgaacttgaggtggcctccttgcttgttacatacctgggtatgtgtaggcagtttagtgcatctttgcctctcggttgaaacctgtataaccctgttacaaagctgtgttgttgcttcttgtgaaggccatgatattttgtttttccccaattaattgctattgtgttattttactacttctctctgtattttttcttgcattgacattatagacattgaggacctcatccaaacaatttaaaaatgagtgtgaagggggaacaagtcaaaatatttttaaaagatcttcaaaagtaatgcctctgtctagcatgccaacaagaatgcattgatattgtgaacatttgtgatatatgtattaataaatagagcaattacaagca

(The sequence listing continues in the following parts.)
